United States Patent Application Publication US 2013/0034624 A1 - sequence listing, part 8

SEQ ID NO: 33990 - DNA, 2227 bp, Bovine  19866880702126
  misc_feature (1)..(1): n is a, c, g, or t
nccctccccgtaccatccctctgggtcgtcccagtgcaccagccccaagcatccagtatcgtgcatcaaacctggactggcaactcgtttcatatctttgaagtcaccaaaggactgaagcaaaggtagtgactcttaagtggcaaatagagtagaatgaaagtcagatagccattacagggctatctcaggagttcagattaaagataatagtaccttggattgtatggtttcagcattggagataagagagttagtatgcatcttccagggaaaaatagacattacttgttggtttattggagagagagtgtcaaaaggacagtaagatttcttacgtgagcagtggtggtgatatccttcactgaaatgagaaacggtatgtgaagcttaagattatgagctcaaatacgatatttctattttatgaaaactaggagacatccaaatggagattttagatgggcgatttagatgagtgttcaagtgtataccgctcaggagggagatcagccctgaagatgaaaatatgagatttgggggcgtgtggagggattctgaagccatttgtgtcttaagaatcaatattacatacttagagggcatcacaagtcagacaaagataaatactttataaactaaaatctgtatagtcagatctggaatctaagaaataaaacaaagcgaaatgacagcgtactcaattgtgtagatgccagagggaaggcggctagagagctgggccaaataggtgaaggggattaagagatacaggcctccagttgtaaaataaataagccatggcgacgtaataacaaggtacaagggatatagtaaaagaactgtagcagggacttccctggcggtccagtggttaagactatgcttgcactctgcggggcacagctttgatccctgattggagaactagggtcccacatgccgtgtggtttggtcaaacaaaaaaattgtaacagctttgtatgggcacagatgtttactagacttactgtggtgatcattttgcagtgtatgaaaatgtcaaatcactatgtagtacacctgatttaatgtaatattgtatatgtcagctatatttcaattaatagaaagaagtggatattatttggaccagtgaaatagttttttcttagacataatttttgccacatggtttcaaaatacacatgtcattctgcatgattttaatacactgagggacacatattttcccctcttgaataacatccttctaacacaataatgtaagggggaataaaatgcattaattgaacctactttataacactaattgcttgtacttatctgttcttgaatagatatttagaaagttattataatggactcttctgcattctatgcccccagagaatgtattttgatggtaatttattggaatatttcattggttaaataatttcttacatcaggcagttttgtaaataacatgttttccccccaaggaatagggttaagggtggaaatcttcttataataattatcatctaatttgtttctttaaagagccctaccttgtatatgcctaatagttcatttcatcaaatgtgtatgaaatctttcacatcagaggctctgaaacatgaaatgtgttaactcatgataatttaaatgcagattttgttgtgtctatgtgatttctactaaagatattgctactgacttattttttttaagaaacacttcaaatgttccacaatattttaaaaactatcagttaagttcagtcgcctcagtcgtgtccaactctttgcaaccccatgaattgcagcatgccaggcctccctgtctatcaccaactcccggagtttactcaaactcacgtccatcgagtcggtgatgccgtccagccatctcaccctctgtcgtccccttcttctcctgcccccaatccctcccagcatcagagtcttttccaatgagtcaactcttcgcatgaggtggccaaagtactggagttgcagctttagcatcattaaaaactatagtatctgtattacttatagattgacataaattatgagagaagcacagtaagcagaaaagaaactctttctgcacaacttggaaggaattaataagcatatgaataggcaagtagttggaaacccagtcttgttacagatataacagacctaaactatggcaagacttactcgtaaataaaatcacacttaaagagctcatt

SEQ ID NO: 33991 - DNA, 2047 bp, Bovine  19866880880038
  misc_feature (1)..(1): n is a, c, g, or t
nagtttccctctccttttgaactcctggaatcaacatcagtcaaagcactcacatggtccaattccccagatagttttcttccccctattttcttacctcatagtcatgtccaactattgtttttctccttcaataaaagcatctctgactagattaacagcgcagagtgaaaaggaaaggtcgaggtccttcccttggtcttcaagttatgaaagcagtactgggaacatttatgaatgttacacattaatccactgaaatggtcatttagtttcttttccaaacacaggatttcatcacatctaataataaagcaacaagccattttctgtatattttaaaccatggacttgtaattatatgaaaagcttctatatgaattctctgtgatgatgtaagctggtattgcagcataaatgggtttttttgaagctcaatacatacctacaaggatctatttacactgggctaatcatgtcgaaatagcatctatttgagagtaaagtcaaagtttcttttataaacctctatagatagataaataatctaggaggctttttatagttataaaattaaggctgcttttcaatgcctgctaaagtttttggacatactatccatctaatgggcaaaatgtaatcctaaattggtgattaaagactctgcataaaaacaagctgtcatgtggatagagagaaattaaacctgacaacagtaatgctgactttcctaaatgaaagcccagttcaagtttctactcatccatttttcaaaacttaaaaaaaggcattttccaaccactcatagatgagatgccaacatttgcatttcagttgaacctgatgaagtcagttgatttttcagctttaggcttgctcagaactcctgtcagaaaatgtctgcccatctaaaaaacatagcaatgttacaacacaggaggaaggaatgaagcatgcctggctgtagtatttctctactgtaactggttctctactgcattcacaccccaccactggaaacccaagagaacatctggaaggaccaccattgggtccatataaagacacttccaagggagtaattggatggagggcaatgcgtagagaactaggaatcaaggtcaggaaatgggatttcttcatcctggcaaatccaaaccaatacctaaaaaataagatgaccttccttttttgttggtttgtttgccatgtttttcattgtaagtttcctactttgggcaaaaataaaattaggaaaaccttgtctccttggtgataaaaaacaacactgaaaatcactggcccaagtttaggttaaggacaggatttttttgtcagacaacctatgctggcatcccagctctgtccactactaatctggtcatcttgatcaacttagttacaaaagaactaagaagaaaataaactttcttcatagtaaaaaaaaaaagtgtattatagtttgaggagatgatacacataagaatgctggcatggtgtcccagctcatggaagagcctatacagagaagagagctggcactacttaaaggaacctatccctaaagatcctttgggaactttctggagagatgcaagttgtgtaaaagattgggaggaaaagacacactaggagaaacaggtgtagcaaaaaagcaaaaattggtacatggtccttatgtaattattcgcaaaattttcatcttacaagtaaggcatggatagaattcacgttattaaaataaactaatatgaaaaaaaattaaaaataaaaacaataaaataaaatgaactaatatgatgtgtgacttcaaaatatgtaaacttttgggattgtaaatgtctacgtaattgctcaaaatttagacatgtttttagggacactttataagaagaaacatatgcacacacacaaaaccatgctatgtgtgtatgtgactacaggcacgaaagaatattctcctctagcctgttctggatggattactggggacaagaaatgagtatgaatcatgaggagttaaggagaaaatgtaacatctatgcta

SEQ ID NO: 33992 - DNA, 1698 bp, Bovine  19866880925512
  misc_feature (1)..(1): n is a, c, g, or t
ncccttatggcagaaagtgaagaggaactcaaaagcctcctgatgaaagtgaaagaggagagtgaaaaagttggcttaaagctcaacattcagaaaacgaagatcatggcatctggccccatcacttcatgggaaatagatggggaaacagtgaaaacaatgtctgactttattttttggggctccaaaatcactgcagatggtgactgtagccatgaaattaaaagacactcactccttggaaggacagttatgaccaacctgagagagtatattaaaaagcagagacattactttgccaacaaaggtctgtctagtcaaggctatggttttcccagtggtcatgtatggatgtgagagttggactgtgaagaaagctgagtgctgaagaattgatgcttttgaactttgttgttggagaagactcttgagagtcccttggactgcaaggagatccaaccagtccattctaaaagagaccagtcctaggtgttcattggaaggactgatgctgaagctgaaactccaatactttggtcacctcacgcaaagagttgactcattggaaaagaccctgatgctgggagggattgggggcaggaggagaaggggacgacagaggatgagatggctggatggcatcaccaactcaatgcacatgagtttgggtagactccaggagttggtgatggacagggaggtctggtgtgctgcgagtcatggggtcgcagagagtcggacatgactgagcgactgaactgaactgaactgaaccatgggaccactagggaattccctaactcttctttccctactccttttctttctggataaaaactcgaggagaacaggttattagatgatgagggagctatggaaggagataatgtattgggggggaggagatataaactctttttttgtaacatttaaagaagcaattggttgtagcatgtgaaatctccattgataagcttgggcatgagcagtgagatcagattttttgctttgcttaagagagaagtatatccacaataatgaataggtgtgaactgattcattaaatatgaagtataggctttgtaacagaagggtaactttgccactcataagtcatttattattcttttctttaagtctgcagccctgcagatctttgtagaataagaatgcatccctatatttagggacagtggataaaatattttcagaaaatgagatatatcaatggaaattcttgcctaatatgtcactgctttgaaaatgattaaagaaaatggggtctccccccagcagaggcaggtactttgacttgtcaaatataagttggacattttctcttagtttggaactgccacaaaatgagccctttcatgtcctcagtaataccaaaccaatgcaatccatctgttctgctaaattatttctagttccctaaccaaaggcactgctttttcatgcattttatcatgattttatgccctttattatattttacaaaaggttctgattcctccagggccaatgagaactgattaggacactggcctcaatccaggctttgaacacaggaggggaaggaatagaactgtttccttttctccctgctccttggcaaaaaaaaaaaaaaagaatctataccgtgtgtgcactctgtgtgtgggtgggtgtgggtaggctgcattttttcctgttgca

SEQ ID NO: 33993 - DNA, 1826 bp, Bovine  19866881131067
  misc_feature (1)..(1): n is a, c, g, or t
ntgcatttctaagaactccaagtgtgttataaattagagacttctaccatctgatattatttttaatgttataaaatattatatacatggcttccttggaggctcattcagtgaagtatctgcctgcagtgcaggagacccagctttgatccctgggtcgggacgatcccttggagaaggacttggcaacccactccagtattcttgcctggagaatcccatgggcagagaagcctggcaggctacagtccatggggtcacaagagtcaggtacaacttagtgaataagtcactaccattatgtacataaaaatatgtaacataaaccactactgttgcacttttcttgtgctttttgtataaattttattaatgaatgcacaaaaaagagtaaacagcattttataaaagtaaatccaaaatactacttcatgctttgttttgatgataatgttctctagcaacagagcaaccatatattttaatgacctaattttaataataccagtttgcactaagactaactgccaaactgtactaagtgtcagaaatttgaagcttctactttggaagtcagagcactccttgcagttgagtgttgtgaatcttttaagtgtgaggaccacacactccttccgtttagtcggagaacctgaactgtggtcgctacttcctactcactgacggctactgctgcctgcctaataattgtttttggctccctgtaaacctgcagccagagaggtatttgaattttccccctctagcacttgcaaatccgatttttatgtatagctaagtgctcttagcttttactctatctactgctggggcctggtttctagcaagcctgtaactacgccagatccggcctatgtaatgccgtttgtaatgagaaatctaaacagggaatggcagtgaggcatggcaggaatgtgtttccattggagaagtcagtgtagagaaaaagtataagcaaagccgtgtccagaaggcccattcagctggccaagacggaagactgatgttattgtacataggctgttgctgtgccagcccttcctcacgaatctgcttgctctctctctctcccctctcctgaactcccctcctccccctcctcttgcctctattccttctcctcctctccctctcttccgagggctctgctgactgtttgctcaggtggacagtgacaccatttggaatgagctgcactcgtccggcgctgcacgcatggctgttggctgtgtcatcgagctggcttccagagtggcctccggagagctgaaggtgaggtctgggttgcattaagtgtgggaaatccagggaagacgctgaaacagagatgttgttgtttgggaattgtggggagtgtggtgcagtaataaaaggcaaggggcggagggaaggggcagagggatggccactgaggtgtgataataactggtctgtaggtagctggtagctgatccggctctcagggccttcctctccttggggagactctgtggttagggcactctggtgtatttttaagagcacagaaatggtgagtaaagctatggtccaggtcaaaaacacccaagtctatacatatctgtcatgccctcctgggattttcttttgaagcaacataaaagaaaaatctgattactgagtactgtgtataagctcagaataccacccagagagacgagtggtgggggcagggagaaaggtaaatatcagaggggaaggattgagaggaagaaggaaattgttgattagaagggtaatgatccagagtgtgttttgccatgaaagaacttcaaaaatgaactact

SEQ ID NO: 33994 - DNA, 861 bp, Bovine  19866881170732
  misc_feature (1)..(1): n is a, c, g, or t
nctgcaggcggtccatggccattctgaatttgtagcacacacatacaggctcacactggagattttacagaccagacagcatgatcatttatccaaatctctaataccttcaagtattacaacttgattccttaattcttatcaatccctgccagggtaataaatatagcaagtccataatttcaatgttttatgttccatgttgaaaactatatattctattagcaaatggtgtaaaattcgttaaataatatttaaagactgtgctgctaatctttacaccttaacccatttaattcaatgtgtaagttacattgtttgatataagtctagaagctaacataagcatagcgcttttgaataaaatatctttaaaaatttttttatttttaaatttagccacagaaatccctcatgtccccacaaatattttcagaaatgaatatcaaactaagcacagaagtatataaggagtaaatctgttttggatagacatttgattttctgaaattgtcagcaaatcattcagcacaagtgtttgaattaaactatgcaaaatgacctttgatcctactcatcactttcttattttgcctcagattttaagacagattttcttggggaatggcaaaaggacaagcattttttttttcttttaaatacatgtacaatacttctttcggaaaataaaacctttctcttaagctccaaggaaactagatttaaaaataatgataaaattctgtctcaactcacaaatagattaggttatgtaccaactgttctcagaaacaacatgcagagtttggagggctttcaaatcgagaggcctacttagagaagaactcgactcaagacaaa

SEQ ID NO: 33995 - DNA, 732 bp, Bovine  19866881225737
  misc_feature (1)..(1): n is a, c, g, or t
nctggagcactggagacagtttagtattgcgtatcattgtactgaagcccaaataaaacttttcctaaaaggttaaaaattattttaggcttaataactgggaagtttatttctaaaatattttaacatattgtttaagtaaaaggtatattagaaaagtaaaatttattcagattgctaaactcatgactacacaatagtgattaaaagctggaaataaaatggtctgtaattcgggagtttcaagcaggagaaacaatgcactctttatatgtcctctaatacattcacagagctgtgggtgtccaatatttaatttttaaaataaaattcttgagataagtcaatgaaagattatataaaatatgaagaaattttatttaaatgtgtattttatattaatttataacagagtctcaaatctctaaatattgaaaatgacactcagatacttttgtttaataaaataaactacaagtgaaattagatatcacctaaaattgctattaagaacttgaaatatatgataacatagtaataaggcaataataattatatcatcaatagtaataatgaattctcctagtcaaagaacttaatgaatggtggtcattttggtattacaacagcagaggtctaataccttaaaattatgtggcatggtttcttttcaaaactcatggtttcatctttcaaaattgctgcatgccaggggaagcaaagcatttttca

SEQ ID NO: 33996 - DNA, 4615 bp, Bovine  19866881323151
  misc_feature (1)..(1): n is a, c, g, or t
nactggatttgcctttgtgaagtattctgccagaaagtttagtagaagtgtttaagattctcaaataatacatagtgtttctttcagaattcaaaactaaaataaattattttactgaatgcttaagccctagaagacagttcacagcagagtccttaggatgtaatcattctaaccccccaagtagaatccatagctcctgactcctagccagcagcatcattatcactgtgtcatggtttatttttaaatataaaataataagtaaaacaaagtacttaaaatacaaagtgacgactcaccttagcaatgaagcaaacattgcatcaccgtttttatcagtgctaataaggctattgaaagactaatgcgtttgtgaatgatatgcatccaaaatcatttggtttatgtataatgttatccctctgtatgacagtctgtaggtccatccacatttctacagatgacccagttcattcctttttatggctaagcaatatccctttgtgcatatggactgcatcttcttcatccagccctctgctgatggacgtttgggttgtctccatgtcctggtaattgtaaatagtgctgcagggaatctcgggtgcatgtgtcgttttgaattatgtttttttctgggtgtatgtctagtagtggaatttctgggtcacacggtagttctgtttttagttttttagggcccctccatactattctcaattgtgtctctgacaatttacattcccactgccagtgtaagagggttcccttttctctacaccctctccagtacttattctttgtgggttctgggctaatgaccaccctaagcagtatgaggtgatatctcattgtagttttgatttgcatttcttttttttagtgagattaagcatccttttctgtgttggtctgtatgtcatcctttcatctgtatgtctccttggagaaatgtgtatttagatcttctgctcattgtttcaatgggttgttttgttttcttgatattgagctgtatgatctatttgtatattttagagattattcctttgtcagttgcttcatttgaaagtattttctcccatcccaacagttgtcttttcattttgcatgtgatttcctttgctgtgcaaaaacttttaagtttaattagggttagctaaataatatgatttctatggtctctaattaatatttactgtggatacattgttatcttttataacaatcggtaaacacttctcaaagtgattctataccattctgaagtgtgatccttcagcctcaggagacttactactgtgtacctgcggcatttttgtattctatagagaaggaaaccgaagcccagagacggggggtaacctttttaggtcactctgttactagatggtaaagtacaaatctcctgattccaagctcttaaccacgggttctgtgtacacacacctcactgtaattccaaacgcctatgattgtcagcactcctttcccaaatgagaatatccctaaccataagaaaagcaaaattgtttcttttgccaagaacattctattcttattgaagttcctataaagtattaaacccatgaactcaaatgtcattaatttggggtaaacagtcatgtagctgtatacagcatttcaaccctaactagaatgctgaagaatctgcacttggagcagaccactgtggagcaggttagagagaatctcattttacatactggtctgagtcagggttcgttttatgaagttgctttgggtagaaacaggactctgacattcattgattggtgaaaaaaaggccagctgattatttaataccctttacacagtatgtacatcagattaaatgaaagggcagtaggaaaatacagaaatgacgttattcacctctctcagtcttggtaggactgaccagcatgttgctgaaattgtgcatagcaacaatgggaactctcacattccttcactgaccacataacccacaggaatccatatattatttatcacatcctttagtccaccagtatcttaactgaagatcctgagtctcaagaggtagcactttgccacaacaaacatgttaccctgcttattattggcatgtaaatagcaaagagagattttttctgacaatgaagagtgactaaaaattgcacctctaaggtcattagagctgtcagaaagcagttgttatactgggagggggttcgtagcagagcattaatgtgcacagcctgccccgggatctccttcagctgctgcattgatagttcacgccttctttccatatggaatagtggtcacagtattcattcatcacatccatggttttccttggaatctgaaggtcctccacatagctgttctatttctttttcatctcaccatgactaaagaagctaaggtgtgggcattataatctataagggaccccgagggaatgggctgtcactcacgtgttcctcccagcattgaacaaaaggtataaagcatgcggggtcatccacccattgttatcataaatccatctccgctgcatttcaaaggtctcaaggtttcagcagaacatgtaacatgaaattaatatgtacctttgaagagctggcatgttgtatcacacaggagaagggaaaacacccatcactacaggctgcagagccaaatgaggaagagtccaataaagaatgtggctgttctttaacccagaaatatgtcccttatcgtgatcctataggaggagaaaagcaggggtcacccaaatttatcatggacttttaagaggttctgaaatgttgctgtctaagtgactgtagaactgtccctgagagggtttatgattttagggaatgtgtccttatgcccagtcctagagtcagagaaaccaacaatagatgtctctgtgaataattacttcattcatgtgagtctcagtttatctgtaaaataggaataatgaagcctttctcatcatgttattgagaagatgaaatataatagtgaagattatcagtgacagctgtgactagagagtggccacttccccgctttgacgaggaattatttgacagccctaattagttctggttttgcagggaataaatagctgttggctgtgtcaagggtgtgatataaatgcttcttcaaagctctgaagccctgaggtctcataggatgcacctaaccaactgatggtctaccattagattcctggctctgtagggagactagtaagggaggggaggccattgtctgttttttttttttcttttttaatatgtttattttaattggaggtgaattactttataatattgtggtggtttatgccatacattgacatgaatccattgtttttcaggagcccctgtgacaagcacataggcagataaccttggtttagaaattgaaatttttggatttaaatctccacactgtcccaacctgaaagtgtttctctgactctgagatatagattctggttcagcagaactgaatgtagcctgagattctgcatttttcacaaacactcatgtgatgtcagtgctgctgacccatggaccacagtttgagtgataagatccatgactggatgaatcattttatttttctgtgcttcagtttctttacttttttttaagtagaggcagttaatgaaatttgctttatctttttccttggggacaaatatgacatactcggcgatctgattgatgaaggcttcaagaagcagtgtgtattcttggggcttcccaggcggctcagtggtaaataatctgcatcccagtacagaaggcacaagagatgcgggtgtagtccctgtttggggaagatcccctggaggaggaaatggcagcgcactccagtattcttaccggggggatcccatggacagaggagcctgatgggttatgttccatggggtctcaaagagttggacacaacttagcaactaaatagcaacaagccctgtattcgtggcacttaatactagcttttctggtgtattgttaagagagctacaggagaaacaataaagacaatcttttagagtttatgtctgtatcagtccactgagaataaactgagttatgttgtaaaatgtttaacaaggtgcccaacacttatctggtgcccctactgccccatgtgtctctctttagatgctgaccaaagatacttagtttttgctttctttgaataatatattttattttactatgtcttgcaccgaatctactaagaatttaggtttttctctctgaatctttcctcctcccacccctgctatcagtattcccagaaacaaaatatctactgggattttcagttctagttgtaagtgtggaggcttaatgatagaaaaatgcaaaatttttcaaatatctcttaagtggataaaagtaattattctattcccaaaatgaacaaataaggaatttagtttgcaaatgctattgtatgtaaggtagagttttaaactaattaaactatgtattaatagataaagctaaaatgtcttggaaattaaatcatgccttaaaacaatttcagtgactttaaaatatttgataacttctaactttccaaggtgctattagcagaa

SEQ ID NO: 33997 - DNA, 1127 bp, Bovine  19866881558283
  misc_feature (1)..(1): n is a, c, g, or t
ncagtgatctaaaacatggttatgttattgaaaaaatagcacggcctctaactgccaaagtttgtgttactatttttaatgcacaaatacatatttagccttaaggctaaatataagaaatataagaaaagacataaaatggagcagaaaataagttcacaggtggattagatccaatctctggttgatttcttttcccctcccccgcaaaacatatctagatccttggccccattcatctggccaattcagtttattctttacatctcacattaaatgtgatttgcttaaagaaagttccctcaacctctaaatcatattcttctttaaagttttctgtgatactcttttttcccatatagcactcatatttataattgcattatacttagaaatatttagtatctgtctcctcactagacgataaacattaaaaaggctcaacacaccagcaacgtgtctggctcagggtatgagctcaataactagttactgcatgcagtaactctaatacataaaagatgatggcagggaaagagagaaatagagtggagaggaaaagcatgtataacatgtgagtttaaaaggtttgcgataagatttgacatggactgtagaggaggtgaaccgttgctgaatgtgaagcctcatggacacacccagagcaggtgacacagaaaagattggaagcacggacgatcagggccaatatgtccattagacacagcagacactgtgcccagaacccactatattctaaggtacccacaaaatattttaaatgttagtttttatcagaagaaaaaatagatattataataatgattccaatgtatgctgatcttagcataaaaggcaatgtttagtattttttatagaggaaagagcccatgaaagaatacaaccctgaggatggtatttgttaaacagtaggtaggaatttgagctagaacctgaagaaggaatagaagagctaacattgaaattcagattggtgtcaggtcagggagaacctgggcttcccagggggcacgaatggtaaagaacccacctcccaatgcaggaggcgtaagagacatgggttcgatccctgggtcagaaagaccccctagaggaggacatggcaa

SEQ ID NO: 33998 - DNA, 1598 bp, Bovine  19866880445234
  misc_feature (1)..(1): n is a, c, g, or t
ngtaaattttgtacagcatatttagctttctgtatgcctttgtgaatttgtcatagaaatcctggatgtctatcagtaagagaattacatcttgaacataactggattaaatggatctgtgatacactccacatgaatactgcagagctctcttgagggaggagggttcaggatggggaacacatgtatacctgtggcggattcatttcgatatttggcaaaaccaatacaatattgtaaagtttaaaaataaaataaaatttaaaaaattaaaaaaaaagaaagaaaatacaatttccaatgccacttatatttgataaatggaagcccacggcatcgctcacagaactacttgattcaaatctgcaatatgttcatgctctgtactagcaagaacttgtatgatgtattaaggtcttattttatacactagtattgatttgttataattatacttgaagttcatgattatactggattttggagacacatatctaaacacatagatacacacaaatattgaaaacaacaaaaccaggaaatctagcatcagattggatattgaatggaatgaaagttgaacacaagtaagagcatcaagaaaaatcaaaataatttcacattatataaaaaataatgtgagaacaaacattaaaatgtgatggaatttttatctttttaattaaaaattactgtattgacaaaaaataaaaaataaattagtatttattaactactttttaattttttaagtataggttacttttgcccccagggcttacaaaacacaaagaataagaaatattttcaggtccctgggaaagactatgtgcttataaattgtgcatttctttaagcttatgaaactctgaatgtaaatattttaatatattctcttatttatttttaacaaagctgctgtttttgtggactctggactatacatccacaagtctgaggcagaaggcacaattttgtgatattctgctcaagttgtagttgaaagaaggaaagcagtaataaagagcaggttagaggaagaaccacatactgagaatggctagataagcttccaggggaaatattttaagcaaatggtacccaagacaggttacatgtttatttatgggacaaacttcttcatctcccattatgctctgaagtgaaagaatgctgatcatgcttcagtccctggaactatatgcatttaaattaaaaatatagaaaagtacagtatacactgagggtgggatctattgactgtgtcagcaatagcagcgttttcatttttccttttgtaatagaagtcattgtgtgtgttcgggatagattcttggtctttattaatctcagccatgaaagcatctgagattttaaaagctattgattttttaaaaagagactgtagttctgttctgtggtatcctcaacttctatttcaaatctgtcataaacgggtcttcattacagatggtccagcacttgctgatgcattttaggtaccttctttattccgttttgaaaaatttggatacttgtttaattttaaacaataaaaaatcattttgctttgactgatgactttctttccccactct

SEQ ID NO: 33999 - DNA, 2266 bp, Bovine  19866880460816
  misc_feature (1)..(1): n is a, c, g, or t
naaccatctcatcctctgtcatccccttctcctccttccctcaatctttcccagcatcagggtcttttcaaacaagtcagctcttcgcatcaggtggccaaaatattgtagcttcaatatcagtccttccagtgaatatccaggactgatctcctttaggatggactgactggatctccttgcagtccaagggactctcagagtcttctccaacaccacagttcaaaagcatcaattcttctgcgctcagctttctttatagtccaactctcacatccatacatgaccactggaaaaaccatagccttgactagatggacctttgttgataatgcattgggttctgccttcacccatgctccccaaaacttggttttataaaatttataacatgagtgtggttccctgccttcatgcagcatctaatcacatatacatatgggatgtaaaagaacatatgatgggtagtaaagatggaaccagtaacaaaaacctcatatgatcaaagaaatgaaattctctgtatactactctagagaaagaattgctttaacatggatagattttggatgggtggtaaaggatgatggatgatggtgaatacacaaaacaagtgaatttgtttgaagtggattattctcagaatttagtgagaaacaaggttgggatcagacaacaggaatccctacaaagcaaactcatgtgtgcatgctcagttgctaagtcatgtccaactcttttgcaaccccctggactgtagcccaccaggctcctctgtccatggtatttcccaggcaagtatactggagtgggttgccatttcctcctccaggggatcttctcgctccaggattaagctcacatctcctgcactgcaggcggatactttatcactcgctacctgggaagcgcaaaagcaagctcagatgaattttaatctctgtgggaagctagaaattgatttttgagtttcatgattagaaagggaaaataacagaagacaatagtgttatctagggaaactagagttggggacctagatctttatgaggtttcatggtataattcagttacagttagggaaacaaaattatcttttccagaatataagagataactcttttgtagttagaaaggtagtcttttttgatctaattattcatagataaggtgaaagcagaaaaaacaaaaacacaccatttaaagaatgaaattatattttaaaaatttatctttaggcctggatttttagaagtatttcattgtatgatcactttaaaaatatttttaaatcgaactagattatagtaagatcttagagtttttaacacaccaggattctaatgaaaatgacagtactaaaataggaatgagtgacagttagagaagttttgaatgacacataatttttgaagatctctgcatcctaattggagtgggagaaatcagaggaatgacatagatgttacttcaaaaaataaacttttttaacagtaatgttctatttcttactctgggtgctgatttattattatgtaaactgtgaatatatatttttcaaactttaaatctatggtgcattttaaaatttaacataatttaaaaattatgttagaaatatttcaaattggtctttttagaacatatttaccaacatatatttgtcaaatgatctgttctttatggggaaagtcatcattatgttccttgttctatagataggctatgctttggcagcaggttctccctttcttttactctgaatctagaagtgggactgcagttctccagctcccaggttagcacagtggtcctgtgaggtgggcagctgaagaaaacatctggacaataacagctgttacaattctacattttatccgggtcagtgtttttaattgttctgaattggtaacaaccagctgcctcagaagtttctctcctcattcctgagggcaatgggctggtttgtcagtcagagagttatcactgtttgaattttgtaaatgcaccattttttcttcaaaatgttgttagtccaaaacccctgtcaaaataccaacatcccccaaagaacctcaatggtttactttcattttctacacacagctgtctaaaatgccattttttaaattaagtacttaaagtggattatattgttaacatctctttagggcattttctatcacgataaacagtgctttagtgaatgttcctggcttccccttccctcctactcttctccccaaactaaccccaaaggcctgga

SEQ ID NO: 34000 - DNA, 784 bp, Bovine  19866880483996
  misc_feature (1)..(1): n is a, c, g, or t
ncttccctggcagtccagatggtaagattctgtgttttcacttcagggggcacaggttcaatccctgattggggaattaagattctgcaggccaagcacatagacaaaaataaaaataataaaagagaattatatttctgtattaaaaatgatagtgaccacagcatgaggagcctataatagtagtgataatatcaacagtagtgataatacaatagtagtgataatattcatctcttggttagttttaaagaagaaaacaccgtgaaagattagttttggatctaatatggtcactggctaaatactatgctagctaaagcaaatatttctgcaacaggccaaggttaaaggtgaacttaatattaatttgggtttttcttttaagtaagtggaaagtatttcctatcattaggtctaatttataaatcaccttaagaaatttttaaaaattcagagtggaaatacattctataatagttgaataaatgcacaattcacatgaagcactggtaataaaaatagattcctatgaaaataaatagctgttttaaaaagtttacctagagaagcccagcactgaagcccttaaataatccatttgccagattgattagagaccaccacaaattttatcttggtttcatagctccaggttaatttctttcagttaccagttcatctcagatcaatcattgctctgggtaggtcagagctgtctggaaaagagaaattctgcctcatagtttcagcactatgcttcctcaggctacacagattacgg

SEQ ID NO: 34001 - DNA, 1618 bp, Bovine  19866880514774
  misc_feature (1)..(1): n is a, c, g, or t
nttcagagagggtggtgggaccaggaaccagaaatctctccctggtgacgttggttgcatctgtgcagctatcagcatttcctcctacacctctatcctaacaaatacagtttttgatgtgggtgtaaacctaatttccctgtgcataatgttagtgcctctggagtgtgcagagctggctggaatctgtactaagtggtttgggaatcaggctttccttgtcattatttgcacagtctgtagtattcagctgccaacccatgccacattatttgtgtgatgcttggtgacagtctgtgttgacttttagctatgattcttgacataatttaatgagctagaatgccattttcccctggaagaaatatgcacatattttcaatgccaatgaaaagttgtttattttacacatatattatttttctgcatccaggattttgactcttgaaatgtattaacatgatacattcagtatataaaaatgtactatttcccacttgcatttaaaagaggtttggtcttcagcataattgagggaggaaaatgtacccccttgcttgtactaagcttgcttcttttctccccttcctaattagcttttaacaagctgtcaatcttccactctatacgttgcatttgtagggaaaggacaggatgtgttgcaagctcccgtgaaagtagactgcattccttaagggaggcagctccaggctgtcagggtgggtcttaacgccacaactttgagtcaaatacagtctgacttttcctggtgccataaaccaatgctgagcacttatatttatgtgtctgtgtcatctgtctccttctttagagatggcatcggcttcttctgcacagacccacttccatataacaggaaaaatctcagtcagtgttttatttccttcattaaattatttaaaataacatctactgttttagtggtagaaaggttagttgctcagtcttgtctgcttctttgtgactccatggaatgtagcccaccaggatcctctgtccatgggatttcccaggcaagaatactggaatgtgttgccatttcattctctaggggatagccccagtgcaaggattgaacccaggtctcttgtactcctggaagattctttaccatctgagccaccagggaagccgtggaacatttaatagtagaagtaacatgcattcagtctgaagaaaagtaaacactcccaacttacgttgactaaaccaaaatagcctgttattccaccacactgataattaatttaatattttgatgcatttcttttggggttcatgtaggatttgtgggttcatatctatatagaaatgtttaattttttgttattcacagaaaaggtcacattttacattattttgtaacatacatttttattagcaatagtttatgaacatttctcatgtcagtaactgttacagtatgatttttaatacactgtcatgtggcagtataggaatttacttaacctactgccccattaatggatatctaactcatttttaagcttttgctatgcataaattctctctttgcatttcctggatcatatctttggacagatttctagacaggaactaccaaatcaaaggctac

SEQ ID NO: 34002 - DNA, 1483 bp, Bovine  19866880580831
  misc_feature (1)..(1): n is a, c, g, or t
ntgcctgactctctccttgcgcagctgactgtagaaacaatgtattacactcccaccacccaggtgctctgctttgcaggaaagacttcaggcttcctaccagacagtacaattgctgaaacaactgtggagcaggaaacaatgattagagaaaagagggagggaggtaagggaagaatagaaaggagttaagcctattgattccagacataatttagaagcactaaatattaatatctttccctctaaaatgtaatgactcctatataataaatgaaaacaggagcaacaattcctgaaggctgtgcaacattattaaaaaaaaaaaatcactatcttaaatgcacttataactcaagcaccacctgctggttcagtgctagattttcccactcaacaattccaatttgatttgcattcaaatcagccaagaagacaattcaattttccataggaataaggcaagatcattatcaattttaaaaatcagataacccaaaattttccttgatttaaaacaactttctacctccatcttacatttaatcccaaattcacatttggtgaaatatttaaaatgtactattagaggaattgaaagataacttgttaatctgaaagatatggaacctatataacaaatgttaaaatttatgtacatttcagtgggtgcatcgatactctcattaattacttggttacaaatatctggctaatgtttatttttattgtaataaaattttatgataatatatgaaccttttaatatcttaatgaactgtaatatgtcacacagactaaataaaaatgtaacaataaaagaaactatcaaaagaaaaagtttatagaaatgactccctgtgaatagctagttatctttttcagtatttcagtaaccaaaaaaaaaaaaaaaaattatattcttggacaatggcctgagaattacgtcactgaatcaattttgcatttgttttaaaaacagtcacttttagcttctcacagaagattacactaaattaaaataaaaataagtattatcaatgtcactactcaaaaatagttggttatttcattaatcatcacgcatctctcccaaagtgtctctgttaaatttatctattaaagcagcagctacgtgcagcactttcaggcatggcctcaaagcctaactggtagcagtatcttagggctacattaactgtgtatcctaggcaaccaagtaatggctaaagcaccacagtgtttgtttaaaacgtgatgtggaaagcaatcagaagagcttcaattccggggaaattccttttcaatgtaagtctcacactgtattagagtggtgctatttgcaccattataattaagattgtgtcaccatattcattattttcaaggggtttgtaactgagctgtaaaaaattagtcatagtaattaaaagacggaaaacatctagttatgttaagatgtcctactggggcatttaaggtc

SEQ ID NO: 34003 - DNA, 1899 bp, Bovine  19866880584112
  misc_feature (1)..(1): n is a, c, g, or t
ntggaaaagagacagaagttggcatcattatttgcagatatttttaacctctagttatatattttaggccttccctggtggctcagtagtaaagaacccacctgccaacgcaggagacataatatatatattttagatatcagtaaaattgcaacaggaaaatgaattttgagtcaaagtcaatatattttaaattagaaatgttcttactatctgacagaaatcaaaggaacagtacaaaaaagaatgtggtagtttaaaagaacaaccatacctaatcataacatcctgcatattgatactaatcaaacatctaacactgactacccagtccaacttaagacacatcagaataaaatgtaacgttcagtgccatgcatttcacagcataccttacattaactgcaaaataccaaacaactcagcaaatttgtcttctcttgttcaagcaactttttagagtgcttagtttgaaaacaacaggtgttgttttgtattatagatggttctatcctgtcattttatgggaagattcctgaagaagtgctggtctggcagtgaggctgccctgactttgtgttaaaactatatagggcagcaggagatttgattcaagcctggtgttcccttagctctgaacaattcatcacagatggcaataaggagataaatgtctttcttcaagaatatctcagtctgtgttaattcgcatacctttgctgtgaaagcatattaacatacaaaagtcaggcttagaccaccccatttctgtgccagaactccagcatctgttgaagatttagctacacaaactcatttctgttgagtatgtaatgctcattcttgcacagaattgtggtgggccgcaattaggtcttttctgatcacattttggtcttaaacaactaggtctttcctggtcacattttggtgttaaaatgcagcatttttgacacctaaagtagagaacctgtggtgaggatttaaaagtctccaacaccatattttatacagcctaatcttcaatagttatttctaaatattcattacacacttacatgctcatcaataataaaaaagtacttgtttggttcctaacaaaataactctcattttcatgctcacaaatccttaactgtgttaaaaataaaagggctgctgtttcccactaatgtgctactttaacacaaatcgtagaggatgagaattttgcatgccatggcaagttttcaaattctaatgtttagctttcgaggttacaaaaacatcccattatacatgggctgacctgtacagggaattatagtatggaccctaaatagttttcagaggtcactgttataacaacagttgcccaagtgcaatgtacaaatatggctagtttaaataactgaaaatttaaacgtgtgtgtgtgtattagttgctcactcatgtccaactctttgcaaccacatggactgtgtagcccaccaggctcctctgtccatgggattctccaggcaagaatactggaatgggtagccattcccttttccaggggatcttcctgacccagggatggaacccgggccttctgcattgcaggcagattctttactgcctgagccaccagagaagctgtgtgtgtgtgtgtgtgtgagcgcacgccaaaatatagactctcaaatttgttgttaggaaatttttcctatttattggtgtttccttggtatatgccaaacccttagcttttaaacctttacacctcatttacaacaaccctataaactgggttcaacagttattccctttttactcacaaggtatcaagacttaaagaggttaagtgccttggccctggttctcagctcatcaatagcagatccaggagcccactggcatctaatttaaaggccatc

SEQ ID NO: 34004 - DNA, 1015 bp, Bovine  19866880667910
  misc_feature (1)..(1): n is a, c, g, or t
nccttctgaatataggaaaatatgttcatttgatcattattatagccctttgctatggattatcttaaattaaaaaaaaaatcagtgaccattaaattataagctctttgagggtagaaactgcctcttaatcacctttatatcctgctcttgtcacaagcgtctaacagggactggcatagggaagagaaagagggaagtggatgaatattatatgtcaccaccatgaagtgtaggaaatggctaagacaaagcaatcaagaaacatcaagaatacatgacacataaaaacttggtgaaattgttgggggagtatgcaatttccttatttctgtctcactgcagcaaaaatttgaaatggcagaccagtgttacagcttggttacagctcagttttatttggccaagcaaaggaaaatacatccttgaggcatgagggcaggccaacccaaaataagaaaggggctcaattttggcttctctttttgtatgttttttctattcctctgagcctatgtaaattgggctagccagaaaggctgtttgtttcacttgaggttctcactccagtccttggattttcttttgtttcatttttgccagattttcctttctttgtcttttagccaccaccattttggactcctttttcctattctaactatctaacaacgtgaaccaatatggtgaatcaaaaaagaaagtgtccttcctttgagagattgtgtctaggattcttcttgagggaggagtttttgttacagggagaatgtttcttccacaaggaaaagcagagctgtggacaatgaaaggagatgctccagggaaccctcaacctgatgctgaatttcttcatgttgttttaggtcaaaataacatctctttggaatcttggctttagaggaaattgatagaactgaaagcacatttgacatgttcattactcaaggaaattaatccattatggcaattactgtactcttttgcaaactaaagtctaaataccaaccgagga

SEQ ID NO: 34005 - DNA, 1197 bp, Bovine  19866880699563
  misc_feature (1)..(1): n is a, c, g, or t
ntctaaagattcagaaatgatttgattattgggaaatagattctacatgtttattcattaatatatttgaatggtgatgaaaaaatgttttgcttttaatgctggtcccttaaaagtgatttcttaatttcttagcaaagggtatataataatcatttctgcctttttgttcatcaagtgcctagtatttgataagtttactttaaaagggacttttagacatgttcaaaagaaaaacattactgctactaatagagatcatgtgttgtttgctttagtccttgtcattacagataagtagttttctgaacagagttataaaaaagagcagcttggtactggtgtttctgcctaaccaaaaagtcattacctccccctcataaataccctccttcattaaaaatgttacccttctttcttgacctaatacatagactatactgcatttttctctaaaaatgtctttcttttactgaatcaatgctaaaatatcacaaaaataatgcttcagtgaacatgaggtttttattcgtaactatactattaaaagaggatctaactttataacatgtaaaacatcatatatttaaagtgaaagtaacagctgaaaagggtaaagaaatctttaaaaataaaatcaacttttctgtggcagatgatggggatagacagaggaagaatgtgagaaacactggctacactcaaagcacagttaaatgattatgccagtttgtgaaaaccataccatacattatacggagaaaagtattaaaattattcaacaacaaccacaaaaagctatggaacaaaagagttaagtcatcactatggcggacagtcaggaaatggaattgctgttttctgtgggagtctttgttgctgcttttctaacacttcaatggttgaaaggaaatcaaactgtgagaacttactgccactccaatgagccctggggaatttgtcacaaatttggaacctgagtggcctccagcttcacagtttgggctcttagaagtgacagaaagcaaacagaccagcagagaaagtagagcattagttacctggaactgaacaccaacatattttaatttgctggacgaacttcaggctacctattcagttttacatcaagctaaatgatcaaataatttcctccaaaacatatgctatacttaggaaagttcaagcaactgccaa

SEQ ID NO: 34006 - DNA, 2010 bp, Bovine  19866880735795
  misc_feature (1)..(1): n is a, c, g, or t
nttttagtatatttgattaagtggaaacatgtgaacgtttactcatgcttctacatcttcctcccaagtagcatttccaaatgggtcttagtctttcccttctctctttgagaagatagaaaataaccatttgtttcaagctacaactcatgaactatttactaaataatctgttatgcactatttatgaattaactaatactttaatattttagcttttgattcaaaattaagagcagctgttaactagtaaaataataaagtatttaagaagtattcattctacttgccagatttagtcaactacatctgcctcaaaaatcttggaatgtttaatgtaataaaagaagtttttaaggagtctacagatataaatcaattgacatttaacagagttaccagtttgaaaactcagtacaaaagtgaaaaaacctagtgttaagactatggacttggattaatataatagatgaaagaaatgtctttgaaatttagtgagattatttttcttgtagctagaaatatagctttagtaattgaatttatattggcatctatatcataatacattcaaatgtatgaagcctcttctcggtttatagcctatagatcaatgttgtctaacagaactttctgtagtcatagaaatgttctgtatctgctctgattggtatgccagcccctagttacctgtggctattaagaactccaagatatagttaatatgactgaggaactatttaatttcacttaacttttattagtacaaattaaaatttaaataggcatctataattaactgctaccattttggacaatgaagctggaggatgaatactagtatcaccagaagaaagataaagtttatcttggattttcatacatgagtaaaaagtgtctttgttttcataaaatttgaatttagaagataatagctagaaattattacaaaaaatgaacttattcaaatggaatatgtcaagtatgactatttttaatttctggcactttcagaataagattctataaaatttattttaaccagctgtttgcatgattttttccttgaaattgtatcatcagtgtttcaaaattgaagtaaaagatattcagagcaatctgtagcatcaaagtttattattttatacagggtactcttgataatttttttccagaaatatatatacttaagagcatgttttttgtcattgaaactagtgtgtaccaaattttctctaaagagtatatatcgggggcggggggcacattctcccaggtattctagaattgttctgtaaaacatgacttaatcatttcaaattatttttattagtttctcttttgttgttgctctcagcttacaaattgtcatatggtttgtttttagagattttaaattgaccattataactgttgacttttcaaatcatttttaagactgtactgatgattcataatcttcatttcaaaaactaactgttgccaaaatgacagaactatcccagtgggagacaaaagtagatttcccttgggaatctcttgaaactcactgtctagggaacaaaaacattttcataaaattggttcatgagtaagccagtgtcatcaaaattgatatcttctttcttgcctttctttctgtactttggcctgccatggttttaagctgaatgcattatatggaagaatttgcaatttgtgattttctagcatattaacttgagagccaaaatcttatttgccttattgcatcattttacctagcattatttttgttgttgttgtttgtttgtgggaaatgagttcattggagcctttagtacaaaagtttttgctttaaaggctgttcttttactcatgattttcttaacagcagcttgtgttcccccccccccccaatttttaagatgaatatgtgtcacttattttacatactttttgttttttctctcacaaggactcatactttaagttttcaaccagttggctgtacatttcatccaggtgaga

SEQ ID NO: 34007 - DNA, 845 bp, Bovine  19866880785807
  misc_feature (1)..(1): n is a, c, g, or t
ntagcttaaatgacagaatctgtactgctattgaaattgctctcagatttagaatgaggtaaaagcaattcctttcaattagtaattcctcatatttgataaaaatgagtgatttcctcaacatagaaatgactatatgcctttaaaaccagttccacatatcaaaatgctactagagtgtccataaatttaatgaaaatggtaagtaatcttgaacattgccagatgatggtatctaagattgcagatgtatgctaattaattgcttaaggaaaatgtttggttttactccctggataccagaaacctataatcttttattgtaaggaaaaatgaaggttctctttaaatcccttcccagagcttatcttaagaagacactttctgtttttgaataggaaatagatgaaaaaatctgtctgtaggaagctacatttatgggtggtcaataacctaacctgaccacttcagtggaaacacaggctcctttcatgtgggaagagaccctcaaaccagcatgaaataagatgcatttttccactcatgcttcccatttttgtactggcctcagtggaattataccttcatataatattaggcattatataatatatatatatatcaaaaaagctctaattaattctctttgactagtgtttttgttgctgtttgcatcagatgcctgacagaggacaaattacaatttcactctgtatcgagaattccagcagacagaggcatctgattcagataaattaagcacacatttgaatgaaagtcttttattctagacatggctgacttcattgctagctgtgatgttcagcaatagattcagaggccga

SEQ ID NO: 34008 - DNA, 839 bp, Bovine  19866880795901
  misc_feature (1)..(1): n is a, c, g, or t
nataatagttgcacatgttagtttagaagttattggcactcaaacctgagcctgtgtttctccactagaataactttccttaggaaattccaattctggatgttcatctgatttcacatgcatgaatgcttcagtgctctcctaccagttaccgcttaaattcctattagccagcataactcaagcagaagaattcaatgctgtctctaaagatcacctaagttatagtttgagaagacattgtattgtcaccatcctcttccaaaatgctgtgcatttaaacttgttagaaatcagctcgtttgttaagtttgaacgaaggtataaggagccaaactatgactaccacttcacacttctgttcaatagacatttggaaacctaggtttaagttttagagaaaaaaaaaatgcaatactaccacagcctccacaatcagccctcagcatacattccaaaatgtaacatgtctcttctactttagggaggtgtatgttttgagcgtctatgcgattcctactcagatgatgaggataatgtaggcatagacaacatctcaatctccttaagtactggggacaaagcttaattaaagactctcaaaagttcagacctcagttaatccccccatattttatattcacgaatgtagttcacagtgaagagaaaacatcatgttaaacaggagagccattaccagactgaggggcaagacgtgatatacattacaaatcatagcatctattcatttaaacattataacctgactgtgtacagattcccttcaaatgttgcacatgctttcattggtcaattccatgaatacagaaagaggaagt

SEQ ID NO: 34009 - DNA, 1084 bp, Bovine  19866880818187
  misc_feature (1)..(1): n is a, c, g, or t
natccaaataatattttctagaaacaaataaagtgttaaaatgaaattctgaactaatgtctaattaatgagaagatcaaaaattttctaacttatctaaatcttactgtttcaacaatcctatttattgccacagatcactgatgtaaaattcatcaagaaactatctcttagttatgaatattattattttaaatatttgatattttataaataaaacattaaatgtgatgctagcctacttactttaattatttgttataccagggacagattaggtatacaaattaaataggataattttatgattatttttactatataagaataattttatttttataaatattattagttaaaccgtaatatagcaaaatcttcaagcacattgattattactttttatctgtattatcctaaattcttcttataatgtataatcttaaattctacctttgttcctctacttaaagaacatgaagtaattgatgttgcttattgaacaaacatcacctgccacttaaaatttattcttgccatccatttttagagcactgacttcattgttaagaaagagaagactgagagacaaaatacactcaatagggatataatatctttgacaagaaatatggaggttaaatattgtctttgtatgacaaccttaaggcagataaacaagaggaaacatatattagtagagaatgataggaaaaattatttttaggagcaatatgttatattattcatatcttcttagggaaaagatggcaagtttattggctcccctctgcccttatctctgccagcaagagccatctgtaaaaagatggaaacattggcacacaaaaaaattcacttctgtttcctaaaatcattgcctaataaaatctggggcatattttccaaggctctagtcttttccatttttcttatttttcaacaatcagagggatactgaggtacttcatttgggtaacttaaagtctaatttcaaaataaataagagattcataaaactaaaaaacaatagagtggacccaaatgaataatattcatatttataaatataaatatatgatca

SEQ ID NO: 34010 - DNA, 2871 bp, Bovine  19866880824875
  misc_feature (1)..(1): n is a, c, g, or t
nactgaatgttatgctttcttactcgatacctttgaatgcttcattctcaagggggaaaaatcacttggagccaatgaaaggcttttggaattacagaaagtaactgaggaatcttggacagccctttccataagataactccttttgaggttaaaaaaaaattatatcctggaactgaaggtaaaattatgaggttactggcattggagactgggtacctccttcccaaataactggcttttcagggagtctacttgttttctcatgccctaggaatcctatactatgtgaaacaacttcaaaggaaactagagctcgctaagtgaattatgtttacatccgatgagcaattttcgatgctcaagactgtgataggttgtgtggagcacatacaagaaaaataccacatgatctttgcctcaatggttacacataacaaataactaaagaaccatttaaaacacaaaataattaagcatcattggctattgtgggtacagaagggattaagagagctggagtatgtttctttaattcttcaagatttctaaacaacgagaaaggagaccactttaagaatatgttagggggttatgaaaggtcacctgaacactcaggaaacaaaagaaatttctagacagctctagactcagaacagtaaaattttttttccaaagcaaaataatttaattctttgtagtagctgttttgggaagaatttttttttttttttaaataaaccagtgggcaaacttagaatattccctatatatagttatatagcacatgcaggagcattctgaatagaacttctattagaaagatggaagatgttggcattaaactttatttttgatatgtgcttacatgattagaagactattcctataataagttgtagaagtggtttactactgagaatcttctaatgggaatatatttgaggtaaagtacatgtcccacatcacaagaaaggcaaagtatatgggtaaattccttctcaatacggtgaatgagttgagaatcaagtgaagttataatggccgaccttcaatgaatcagcttggtacaatgcgtaagatgcgcccaactggccacaggacaactagacaatagatttaaaaaaaatcagttttgaccaaaacctgacaattcactggggcaataaagctccatgacttgttcacagaaattaaataagagttaaaactcagtgaggattgtattcttcagattcacactgactgccacactctctctttattatcttattttagttattattctttaggaggttcatgcctcataacattctttgaaaaagaaacataattttccatatttgcaaatgtatttatgtcataaaattcattcaatatatttttattactaccagaggcattaacatcaggtatcatctctgccctgacttttttgcactaatactttctctttcaacctattacaatcccagtcctcatagtaccattctttggtaatgtttcatcacactgtcaagggtacttgtttattgctgaaatcactacccgattaatatgcccaaaaccactgctttagacttcttctatggctatttaattactcttttcacatgtttacttcagaggaagcaaaatgtgctaaaacatgcaaaatagcattagtgacatactggccttgaaaaacttaattattctaagtaaacacactacaaaattaagttcacccttcactatcaaccttagctaatatctaagtagttctgtttcctatttcctcatctgtgcttgtttataaatagcattttgtgcaatggcactgtctagatgcatggttgacccttgaacaatgctgatggtcaaaacaatcacataaagtgacaagctgtgcgcctatttctcaaaggggaggaatggggaaagctggtttggtgacttgctttgactccagaactacacgcttatattctaacaccttttagttgttgttgctcagtctttcagtcatgtctgactctttgagaccctgtggactgcagcacaccacatttccctgtccttcactgtctaccagagtttgttcaagctcatgtccattagtgaggccatccaaccatctcatcctctgtcacccccttctcctcctcccttcaatccttcccaggatcagggtcttttccagtgagtcagctcttctcatcaggtgaccaaagtactggagattcagtttcagcattagtctttccaatgaatattcagggttgatttcctttgggattgactagtttgatctccttgctgttgaagggactctgagaagtcttattcttctaacacttaaaataactcaattattccaggacatcagagagatgagaacttccacctagtgtctccagcctgtcatctttcgcccacactaggctgcctagtttctgtgaacaatgggctaaacttcacccaccccacttacctgttagtttggagtcaaaactgaactgtttgtatcacgtcaagtttctctgcaatcagtaaacatccacagtgtccttccatgttttgttagagaaaataaaatacatttccatagaatgaggagcttggctagaagtaatactgaaatttagcactggggatatactcttgtgggtgagatgataaaacacagacaaggttatctactgagataatgcagtagctctgcctcagtggattctcagtccttccactttctgcaacttaagcttcttgtgtctcagtttattaatcaataaaatgaggataataatagtatctaattcacacagatattatgagcattaagtcttgtcatattgtaaaggcttaaaagatatctacatacaaaaatca

SEQ ID NO: 34011 - DNA, 2020 bp, Bovine  19866880869337
  misc_feature (1)..(1): n is a, c, g, or t
ntggctggttccatctattatgagaatataaaatctacatagggcatgagtgtacacacacacacacacacacacacacacacacactttctataaaagtgattcaggaaaaaaatctggtaaaaccagaaactagaatttgaatactctaactggtttgtctgagattttatttaatttttgtatatgtatttttgaatgtttttaaccaattgttagtgttaaaagcattcttttagtaactagggtgaaaaaattattagaatttataaactctaatgaaatattgaattataccatgagggaaggtggtaactaatacgattttcagtctccaaagacatatatcagtccccatggatggtgtaaagacttcagcaatgttattctgagcttgttaaaaattcttaaacatattttcaagggtaacacctcatggaaaatattgaactagttgccaaaacttgtcatagacatagattatgttgttcaaaattatcactaatttcctgaagattattggatcactacattaatattaaccctttaaagggagtagtttcctcttttatgttatttttatgttttttccaagcatttattattttcacttgcaactggcacaagaatttctacaagcagggtcatctaagtaagtgtcagcaaactgcagcccataggtcaaatccagcatgctgcttatttttatacagcccttgagctaagaatgctttttacatttttatgtggttgaacaaaatcaaatgaaagatccttcgagacatatagaaactatgaaattcaaatttcagtgtccataattgaacttctattggaacacagacctgttgattcatctaattactgcttatgactgttatcatgctacagtggcagcactgattagtggaaacagagaccctgtggccctcaaaactgaagcaattaatatctggaccactgcagttaaaaaatgtgccaaatcctgatctaaagcaataatttttaagtcttccaaaattatttttaatgtgggagacatctgtttccttttttccccaaaattgtgagcctcctttaatttatttttatcaggtctctctcaaggcctagcatattcattgtatcaataaaattggtaatgtcaaccatcaagatgattaaagacttaattacaagaaatattttctttaaagaatattttatgaacagaggccctgtgttgaaaggatggtcctggatatctcattttttaaagaaaaaagtattttaatctttttctgtgtctactcaaatgctagctgggctctctgttgtctgaaggcaaaaatcagatctagaattctatgtaacagctctaacaaaatagcctgagtgttgcattttttaatctttcaaatacttattctgggtttgtagtttataaatccagtctctgcatctgctttctccttaagggcaccatgtttcatcctaagcatggccatataggtgtctacctcctacacttccttataagtaccgtgcatttcatgtttattacagtgtgtttaatttgcattatttcaggttcctacactatgagtttatacatttcaggttaataagcactataaaagtacttctctcatttattctagcattataagggtagtgacatctaagcagtgtgacaccatggtgagtctgtttggatgactggaattacaatggcggattggcagcctgtggacattattactgaagttttactgttgcattttcacatattttaaattaaaattctcagctgaaagggtgccataagattgaagaaactacctttaaaatgaagcaaccttgtgtaacctttcatgaatcagtgtatgggattctgtcattcttttgagggtttacaagatatatgccgtgtttgctgtaccaccattgttttagcattataacatggaaaggaagactctgttgccttagtttttaccctaacattggtgcttttgcttcagcattcactgtcatatgt

SEQ ID NO: 34012 - DNA, 1675 bp, Bovine  19866880883657
  misc_feature (1)..(1): n is a, c, g, or t
naaaaagagaaatattttagggctgtgctttgaccgaatgcaatattctgcagggatttgaaaggctttttctctataaatattttaaatgatttttcagattattcagataacttgaacatccaacaaaatagcacatcaggttaaagagaatcttgggagatattattagcctacaatgctccaaactgggaaacgagagatcaacaaatgcatttgctacttttggttatttaggccattgcatctgatcaacagctcaaagaacacatagtgtacaatattactactgtgtccataaagcttacagtgctttactgacatcacctatcaacttttcaagcatctatgtgttatgtggaacaagtggtcctgtatcaccctgttttttcacagaactagacttggaggtgaggctccggtaggagaataggtcctgagcaggagaaataaacagaaaagaggccatgcctacctatctccactcttctcttcttcagtctatacattatccacttcaaaataaatactcaatgatgaaggattcaatatttaatttccttataattttttcccaaggttatttaattcaactctcattacaggtgcaaccaattccttttctatctgtagctgaaaattgctgtagcacacagaatctgaccatattttaatgaagtcttttatttgtgcaggggttcctactgccatgtgaaggagctctcagattttccattagaggccacattttggatgggtttataacttgaaagtaaaccttttcgtcaggttgaaatagggcaaaaaaggttttagccttaagagtactttgttatttcatagtaataaatcaattttctttcaagatcagagtgcaataacaattttcctccaatgctatctctgtgtatttcttcaggtttatatagatgaccacctttcacacatttatatctccagaaagcatttgtctggggtcagggagaagggttcaagagtaagacagttgaacattttgtgcacgatgctaatgcaatatccataaacgtcagtgagattttgcactgaggagcatctcacatctctgtatccaaggcacaggctccatctctgatccaggcagccttttcacaatgcattctgttgatcactcaagaaacagacaagcatgtgtgggtggttctgaacaaacctctcaccattctctgaaaatctaaaggctaggtcctaggaatgagggtcagttttggggtctgaacacatgaaagacagtttcctgtgtgaatggtaatactatcacttttaaaagggaatttcctctcacagtccaggttaacacagaatgctaaaggggacagcttggttgcagatttctactctatacacgttatagctaagtggagtaactgaaaatgattacttcgtcaccagaaaaatgatactgagcccaaataaactcatacaattttacttaaacacatacagacacatgctcatgcacacatacacaaaaacaatgaacattttatttttggcaaaatctcctgatttctgcaattcaacacgctctttcttatctctatgagactgaagaattcaaatttttttttttgaatcattcagaattggagttagtgatggtgcttttcaaagtgtaaatttatacaccatatct

SEQ ID NO: 34013 - DNA, 1306 bp, Bovine  19866880917484
  misc_feature (1)..(1): n is a, c, g, or t
naaatatggagtaaagtaagtatacaaatgttaatgactgaatttaatggtagatttaggagtgcttgctgtaaagttctttcaactttattgatgtttgaaattttttataaaatttatcaaaaaagttgaaattttctgatgttatttcatcttctggtaaaggggaagtcataatttccttcctaaagaatttttctgagataaaaggagacagtgacatctcaggtacatattttgcaaatctgttttcccacaatgtggattctctgtttttgtttagtcactaaatcgcatctgactctttgggaccccatggactatagcctaccaggttcctctgtttatgggatttcccaggcaagaatactggagtgggttcccatttcctgctccagggatcatccagactcgtggatcaaacccatttctcttacattggcaggcggagaattcccaccaagccaccagggaaggctgcactgtggattacctgtccattttcctcagaggtgtccttcaaggagcgtaagttttccattttaatgcagctgatcaattattctttttataatgcatgaatgtgttgcccagcacaaagctgacctactgtgtgtcatgtgtgttggttctcttatcctttacttcaccaacatcctctttcagggtcacaggaggccccttcagaggaggctagaatctgcttatattttcccacctaacttccatttctcactcctcctggacggagttggctgtcacttgctcagagtttcttttgaagggtgtccttgacttctccaaggaataatagacctccctccccatctttcccctcaccatacacagacctaatcagaagtagatccacagtggacattcagcctttttagcctcctgcatcttttctctgaaaagaaaagagtaggcaaaaaagaaagaggacagaggaatgtagcaggctggatgtcaaattagagcctatcatgaagagtggggagctggagtcaactgctatggaaagtcaaggagaattaggacagagaaaaatgcctttgacttgtgagaactgtgaatactgacctcaaaaacatcattttcaggaaagtggttggaacatccgaggattggctttatttctattctcagcttatcagtagctcaacttcaacaaactttttgcctaccgttgtggcgacatgaaggtcctgcctattttactggagtttctcacattcttaagcagaaaatggttacctcttaatgttccttatcttcctaagcacaggcagtcacaggcctgtta

SEQ ID NO: 34014 - DNA, 2401 bp, Bovine  19866881007047
  misc_feature (1)..(1): n is a, c, g, or t
natggaaactgagtttccccatgccccagggaagccagtgataatagaaagataattcagtgaagtaattgaaggtctaataaatgctacttttcttaatttgaattaggaggttttaattattccatcctaagatgcataatttccctaacatttcatttggaagaatttcaatatacagcaaagtaaaaagaatacagtaagcattcatataacaactatgagttcagttcagttcagttcagtcgctcagtcatttccgattctttgcgaccccatgaatcgcagcacaccaggcctccctgtccatcaccaactcccagagttcacccagactcatgtccatcaagtcagtgatgccatccagccttctcatcctctgtcgtccccttctcctcctgcccccaatccctcccaggatcagagtcttttccaatgagtcaactctttgcatgaggtggccaaagtactggagtttcagctgtagcatcattccttccaaagaaatcccagggctgatctccttcagaatggactggttggatctccttgcagtccaagggactctcaagagtcttctccaacaccacagttcaaaagcatcaattcttcggcgctcagccttcttcccctaacctattatttattacatttgcttgatcacatatgtgccatctatccacctctaaggtgcaaatttcaagaaataatttttgtatttttataattgctgctgctgctgctaagtcacttcagtcatgtccgactctgtgtgaccctacagacagcagcccaccgggctcccccgtccctgggattctccaggccagaacactggagtgggttgccatttccttccccagtgcatgaaagtgaaaagtgaaagtgaagtcgctcagtctgtctgactctcatcgagcccatggactacagcctaccaggctcctccgtccaatggcagtttttatgaaattggatcacatttcacaaccaactaccaacatatatcttaaatatgatagtgctatttttccttcaaggattgtttctaacttggtgataactcctacaatcaaaaagatattttatagttgagaaaatatagtcatagttttgacaaaaagatgaattacaattcagtctccctattaagttttttaaaaagagatagttcacattatttaaatatttgaagtcgactttaagtaagatatcaagactgaagctcatcattctagtataaaaacatgaatcatgattgaattatagaagatagacttttatggcatatcatgagtggaacaaagattacaggaaaaatttgaagcattaaatgtcaggaacagtattttctgagaagttattaagaggctgacatcactctctcttaatttagatcagataatcctttccaatcactttttcctttgaatattgatgaacccaaccatcatctcaaccttacttcagttatctgtgttcatctgtattctgaattcttagagaacaaagaatataagaatacaatttatgtgcttagtctcttttgagtcttcctcccttatcctttgtttttttactccataccatcttcaagagtagaaagagtatgttgtttttgttttaagtaaaacctagagagaatggactatgaaaagatagatggaattttcctgtaacctatttattaacaactcttctttaggaaagactattattaaataaattgactatagctgtaaagtaagtgcctgtacaatcttagaaaaatatatgaaaaatgcaaaaggagagaactttaaaaaactgtgatttggaatttgttttagtactcagttgtttgaaattaagtaatcagccttttcatgtaattatttcttcccatatcccttcccacacaaaagtactaaattaaaaaaaaaaatcttctaaaacgtgtgaaaaatgtttttgctttgtgaaatagtgcattgaatggtaacttactaaaaatttagcagaagtatcatctttttgtattcactgtactgcaaaataaaaaatagtatttttttccccagaaactgtttgttcctctgcagaatgaatggttcttgagctttttgttgttgtttttcacaatacatagttgttgttatgtccctgtcctaagactctgtctaccgactctctttctttcttcttgtcagaaaccctgttaccagtatcttttcattttatttgctgtggttacaaaggaaaaaaattgagatcagggtatgagctggttgcaaaataagaaaaagtactccaagggtttgagagtttttaaagaatgaattacacaggcacccgcactagtatatgaactttccgaatctattttttaaatattcaaagacttaagacatccatattttaa

SEQ ID NO: 34015 - DNA, 974 bp, Bovine  19866881013922
  misc_feature (1)..(1): n is a, c, g, or t
ngaagatggcatgcagctcccctaaggcctgcatctgttattgggcaggatatatggcagcttgctgtgtttactaattgggttggctagttactttgttccctctttctatttttcagaaatcctcccaaagaagtaatttccctatttgactcaaattcttaaaagtgagcagcatgatcactttagaaatgcaaacattcatttgcctaaaatctcaaaatgaatttgatttttttctctgtcttttcctgggactacttttcttcctcttctagcaggtcagcatcaaaaagcaattggggcattctatcatgttctcatcttaccagatattctggccactgctctagatcccacatcctgtattctcagtctttctttgaggtttatgtgattttaatgatcgaggtgtatgagtctgagggaagagcctccccaatcccatctgtacttctcacagcaagacaagtgactatgctgctccaaggttctttgggtccattccacttccatgcagataaacgcagcacttgatgtgaacagttaaatagctggaaaaacaggatgggtctgtgtaattggccttgtatactttctcaatcttggcttgtcagtgagaattatactcacacaggctgtggcagtgggtggccttttcctgagtgaagtgttatgtaccctattcatttctcttttggaaatctagagctatgtccagctctgaaatgacagtagtagaggaatttcactgcagaatattaatcatcttttgcctcctctttggttaaaaaaaaaaaaagaaaagggtatttttttcagaggctttctctgccttgatgaggttaataatttatttgaaaacaccataatggcataaatagctttttttgtaccttcattttgataaaaagaaagaaaaggagggcatattcgtttccatgatcaattttgctaaaatttcacaagctcat

SEQ ID NO: 34016 - DNA, 2520 bp, Bovine  19866881024728
  misc_feature (1)..(1): n is a, c, g, or t
ngcatgcatgcatgcattatatattaatacctgttgatttccttaggtaagataatagcattaaacaattaaatgtctatagtttgtaggtatgttttcagaagtatttaataattgatgtgggacaatgtcagaaattttctttaaaatagcaccccccccccaaactgttgtaatttgctaattttttttattattaatggaactctgtttgaaaaaaaaaaggagtagatagatgttccatttatgaattagagtttagcaaaaaataaaaaaagcctgttattccatttgatcaagaactttattttcgtttgcctcaaagtatattttgaaagtcttataaaagccctcatggcattagagcacagaggccaaaatattgtgttttaaaaagagtctgacctaggtttcaagtctacattttttactagcttcttgacttgtgggtaagttgtttatctatcctaaatctcaactttctcatttgagaaatgacagtattactatgtatactaatcttatagcatcatatgagaattaaacaaaatactgtattttgcttaacacaatgcttgatacagaacaaacactcaagatgacaggtatttagtagcattagtcagcattggttttaggttataaaaaaactagatatgaaagtgatttttcctactttatggaaatagattattggagatgtttattatagagtatttacgttttggggggcactcagttcattgtagctttggttaaaagcacatcttttccttcctagcatgagtttctgaaaggaaagtaagcatttctggtttgaacatgatgaagctcagaaattctggggttgttaaactggatgtttatgcttgagcagacatcactcgttgaactggggtggttggtagtgggagaagagggctgaggttggataggaagagaaagaaaagagaaaagaataaaagaaagatttaaagaactaaagaaagaaatgttggtgccagtcagttaaaaatggcagaatataggagaaaatgttctaattttcataataatggaaatcttcaaactagatgagtcattcattattagaaataggaatatatacaatagaaatatatttctacattatatatttaacatatgcatagataagagatgaaagagaaaattagaaaatagctataaaaattaacagctatgcctttgctgcctattatctgaaattaaggcagcttgaaatttctcttacgttaccacttagagaaagatgttgtagatttatgtatatatgtaatatacacacatatattcatatttaaggagccagttatttgacacactaatcgatgtctataggtcatagcatttttctgaggtataatatcagttcagttcagtcgctcagttgtgtccgactctgcaaccccatgaattgcagtacgccaggcctccctgtccatcaccatctcccagagttcactcaaactcacgtccatcgagtcggtgatgccatccagccatcttatcctctgtcgtccccttctcctcctgcccccaatccctcccagcatcagagtcttttccaatgagtcaactcttcgcatgaggtggccgaagtactagagtttcaatatagtatctgaaccaaaaagtgctccagttactgttagaaaaattactctgggttaagtttctcattttgaatgtccactgggtaagagttctagacttcctgcatataacgctgtactcctcagctaatgttacaggctccagagttctgggatgactaaaatagtattcagatagctttaggataatttaaagttttaatattatctggtctctgtcctcttgatctttctgacctaaaatcttggagttattttcaacaccattctctcaacctcacattccaacacatacaagatccttgcattatacccatttctcctctgaagttactcaagaaaacagtcacatatttattctcatactgacaggttttttccatttctagatttccttataacataggggaggcaggacatgctgccgaggcataaatgcccatgagagagagtgaattcttttgcaggggtctgttgtatattctccaagggtgagggtaccagagacagggttgaaatcttgtttaaagctaaccttctccagcaggtttgtaaattcaaaagcaggggaggatgagtcttaagtacataatcagctcttccctcagggaacaagagttgcaaagaggcaattcccataatattgacagggagaaatatgtcagaggaactaaagaattactcctgagacccattacatttgaggatgatggcatctgtctaatgatctatagcttatctgctatgcatgtattttccttcagatgatcattggctgtgtatattgcaaatgcctctccatgtgagagaaaaagcagaaaggaaaccttgggagatgttcttttgtgaaaggggacttgctcttaggcacatggaagaagtaagc

SEQ ID NO: 34017 - DNA, 730 bp, Bovine  19866881036933
  misc_feature (1)..(1): n is a, c, g, or t
nctgagcacaaatgaaatttttatatgagactccttattcatcattaggactaaacagcatgtatagttcatacaggtagctctgggtttttcattactacaacatttctgtgaagtactcattctagctctgaaagtgattttcagatcatttattcatgtcttcacaactatagaagccacactagtaatgtcagtggttaattgaaatcatggatcatgtcttagtttgaaaatgtctctacagcttttgtctataataaaaccaactaaggttttggattggagaaaatcataatataaattaaaagtgtttctctccttaataaaaatatatttaagatagtgtttcagtatggcttaattttacttttgttgttgttgtctcactttgcacggcaatgaagcctgaaatacttcagggaaagaaaaaaataaaaaagaaagagaaagaagtgaatctttctaattcacgggctctggtagcatcttcctaataactaacaccatgaaaatggtattatgctctcaaagagcttacaataaaattgtatttaaaaacaaaacaaaacactcttttctttgtttgttttgtcaaaaaatatgcatttgagcctctttttattttctccacctctgagacacatgtaactgtaacctagcaaaattatttttgggttttcttgttatgctattgctttgtatcagtagcaggccgcattcagtatat

SEQ ID NO: 34018 - DNA, 1392 bp, Bovine  19866881073096
  misc_feature (1)..(1): n is a, c, g, or t
ncaaaaaccattcaaatcaaaacacaggctcaggatatactctgacatgtgatcaaatcttattttctacttaaagtccaaaattctcccaagagccaactaaatagcaatacttttggataccacacccaagaaaacttggcttaccttgttactgttagacaaagtattaactacaactaaaaccctacagtctttactcttgcagtccccctggtacatcagctgtgttctagttgtggtataacacacgcaaagtgtgctgaaacaaatattttgataatttattcttcacgaattaattcacttaaatactttttctaaggcccaacacatattttaggaagtcaccagaaaatatcggctctagaggtaaggttccaaaacacccctaaaaatgtttcactaacaaagtttagtactttatggtgtaagggcagataaacattagggtatgatgtctcttagaggaacaaaggagaccactaaagtttaaatcttaaatgtagcagagccagagcaaatatttaacactggaaaaattatccattatcaaccccaacactgcctgccattatacagatgaagttcttcattttttaactggtgaatcttttggcctgaaatccaatcatttagaatacacatttaaagaagatacaaagatcaaagtcacgtctttatcagttccaaataaatttttaaaaatgggcgaaacttgtactagcataacagcacaagttactctatgagatcttatgtgagtataaccaatcataggcaacatgatgtatggccaaaagactttttaaaataaaatcactgtatataactatgcagatcttcaatccttgaaaacactattaccataatttggcatctaattttgaattttcagttggaaaactagtcactgcatcaagattttcaatttaataaatttagaaaaatataagaataataaacattaaaaacaatttagctataaacagtgccataattaaagttacatgcattaaagatagtgaagattctcacattcaaatcttgtctaacaaaccaatgacaacactaggatatttaagattaatttgagaagattattattaacatctctttatataccttctaacatggagagttttcattggtgtgaggtcattcacccctatgtagtgaaattataagaacatctgaaccaatgcatgattatacatgatgggtacttgaactgatgtgtatttgaacaatgctacagaaatattttacacctacattgctagagtgtatctattatattatccaccatattccaaattcaaaactgcacactagaaaaagatcaagtctcactttgctttgctaacacatccccttccccaaaacacacaa

SEQ ID NO: 34019 - DNA, 1483 bp, Bovine  19866881094872
  misc_feature (1)..(1): n is a, c, g, or t
nccacagagtccataagactgttcccatacatcggtgtctcttttgctgtctcgtacacagggttattgttatcatctttctaaattccatatatatgcgttagtatactgtattggtgtttttcaaatggtaaacttgatcaaatattccttttattgccttctagaaagctcatgctccaatttttgcctatacctagcaaacatttcagacttcagagtgcccgtttagaaccccagggtgctgcatggtttcaaattatttttccttccaaaatttttccttcacatacatttcatcaactatctttgtctgaaggaaataacttgtaaattatatctatttttgactatcttgaatattttggaagaataaaactgaaaaaattaacatttttcaataaaaatatttagctgtaccaacaacacagtgatagggatagaacctggtacaaggcctccagactctcagtggcacactctgtcttctctggctgttctttatatttacttgatacatactgtgtacttgtgtgtgtaggtatatgtgtatgcttaagatttattcatctcttatccctcctatcagattgtaaaatcccaaaggatgggaattgtctataaatttttttttacaatcttctcaagcaaatataatagtatgtgcatatggtatcaacacaataactgaatttggacaattctcaatctatcactaaatcctaactcatatctcaattctcagttaccatctcacttatatatagaactgtctatctgaccttggctaaaactgtaatcctttacttgatagaatagatatgtaatcttggggtttactgtaaaatgaatttctgttaatggaatcttgacttctcactaacttgagggaaatgaaaaacatttgcacttcataaaaatatacaagtgtacctcatagatattgtgggttcagttccagaccactgtaataaagtcaatatcaaaataagcaagctatatgaatttttttgtttttcattgcatataaaaattatgtttatacttcattgtagtctattaaggatgcaatagtattatgtctaaatatatatatatatacgctttaattaatacatattttattgctaaaatgtctgaccatcatctgagccttcaacaagcttttaatccttttgctcatggaaggtcttgcctggatgtttataactgctgactgatcaggtggtaattgctggaggttggagtggctatggcaatttcttaaaataagacaacaatgaagtttgctctgttgattgacttttcctttcacaaacaatgtctctgtatcatgtaatgctgtttgatagcattttatccacagtaaaacttcttccaaaactggagtcaatccttttaaactctgccactgctttatcaatataatttatgtagtaatattctaaagcctttgttgtcattttaacaatcttcacaacat

SEQ ID NO: 34020 - DNA, 1283 bp, Bovine  19866881109424
  misc_feature (1)..(1): n is a, c, g, or t
nagaaactattttgcacttattatagagatggagggtactgctgaatagttttggtggaatcaaaagcaggaggatgcaagctatcaaaaagatcaccttaatcatagatctttatatgtgaaaataattttaaatttagatgtgaaaaacaacagacaattaaaaaataaactcacagatggtatacaacttttagaaatactgtaataacacctcatttatctaacaccatcggggatgagctgtttcacataagtgaattttcctattaaatagaacttacagatttaagtactagcactttttaattttaaacaagtttatgtggaaacttcaaaaatggattagacaattccttgcctttttatatttataacatatgttgtgaattcaaaaataatgtatgatcattatataacattttaaaatagacatatagaggataaaataaaaatctgtttttaatctcatcatgtagagataattaatattatgatgttggtttatttcatttttatcttatctgcattcatgtttttaaagagttgaattattttgtatctagcatatgtacataaatttatttgtaagcattttcttgcattattaactgttcttggaacacatgatttttaatgggtgcatactatttcggcaaatggatatattacaattattttaaatatatgcatgctgttttcagttcagttcagttcagccgctcagtcatgtctgactctttgagacaccatgaacagcagcacgccaggcctccctgtccatcaccaactcccggagtccacccaaacccatgtccatcgagtcgatgatgccatccaaccatctcatcctctgtcgtccccttctcctcctgccctcaatctttcccagcgtcagggtcttttccaatgagtcaactctttgcatcaggtggccaaagtattggagtttcagcttcaacatcagtccttccaatgaacatccaggactaatctcctttaggatggactggttggatctccttgcagtccaaggaactctcaagagtcttctccaacaccacagttcaaaagcatcaattcttcggcactcagctatcttcacggtccaactctcacatccatacatgaccacaggaaaaaccatagccttgactagatggaccctttgttggcaaagtaatgtctctgcttttgaatatgctatgtagggttggtcataactttccttccaaggagtaagtgtctattaatttcattgctgcagttgtcatctacagtga

SEQ ID NO: 34021 - DNA, 1016 bp, Bovine  19866881167736
  misc_feature (1)..(1): n is a, c, g, or t
ncagaaattatctatagccaaggaagtattgccaaatttagtgctttagatattcctgcgtagaaatttgctgcttaaaattcttcaaaaaatggcatagattactgtaaggaataaattttttccacagtaatcatgcaatacacatatgtatttccaaactatcctcacaccttctggcagaagtaggtcagttaaaattagtgatgggagaataatattttattaatgtttaaaatatatatgtgcaagactatatgtgcaagccatatagtcaagtagtttttgattagtattcatctacttatttaggaattcttcaacaaatatttatgagtatttacctattgtgtttcaggcaatttcatgggctctgggaaatggcatgaaagaagcaagatgaaatacataaatctctttattagtgctataacatagcactcttaatgctcttttccaaattctgtaaaagtgagattcatctgcagtggaatgggaatgatgtccaattcatgtgcttttatctaatttaactgaaataggtactttccagtataaatgctttaccttgccataaaatttcattacagaaggtgtcaaaacgatgtacaagcaaatggagttaaagaagtgaagttttcataattctaaaaagtcaactgtgaaaataaaaactgcctctctgcctaattccccatgcacatcctgcttttacatgaataatgatataaaagattctgagctcattcacctgacaaaggaggcataaaaaataccggtaaatatattcttatctgccttgttaccatttgccatctgtagttgttactgaattctacagtcacttcactacagatgcaaagaaatcttagctacaactctcttccctcaaaatcacagtcagtgtcatggtattggattagtaacagttgagagaatgtggcttcctttgaacaccagaacagtgtcggaccaagttcaaaaatctgcggaagagttaccgaaaagtgagaaat

SEQ ID NO: 34022 - DNA, 1288 bp, Bovine  19866881422312
  misc_feature (1)..(1): n is a, c, g, or t
nctgtatgtagagagaatatgagcagtttcccattgctgtttaatacttgtctgagcttccacaatgtgcctggtgctaactggggcacctcaattattctccatctgtgctcactaccaaagctgccagccatcatactgctcgggccctgacgcctgtggcagagagcctggcagggtaaatggtgcaatctagtatttcttcctgggtagccttgctagttaacctagtaaagggatctctttgtgcccagtattgacttagaccatgaaataaagccatgggttagcatggactcaaaggcaactttgcatagaagagatactatgttggaattccacataagagtattttcagtgccaatgggacaggatggcttaagagcaaaattgctataaatgaaggtgttctaggggagtgtggggcaagtttagtaatcaaacctgtggatagattataaaatgcatcagcctctactcccagttttgttgttgttgtttagtcactgtgtcatgtcagactctgtgaccccatggactgtagcctgccaggctcctctgtccatgggatttaccagacaagcatactggagtgggttgccatttccttctccaggagatcgttcctacctagggatcaagcctgcatctcctgcttggaaggtagattctttaccactgaagctcctgtgaagccattcccaatgttcagttcaattcagttcagttgttcagttgtgtctgactcacttcctattaaatagtgtgctatatcaaatcagatagacttttctgcaaaaaccctgggaaaatcatactttttctttaacctaacagccatgctgcaatcttgagactacagttggtgaaaattaaaacctatgacttctggcaatatttgaatcaagtcatatgccttctgacttatgatgaccccaagttgtttcatgagaatccatgaagtggcaagctctgtgcagtaagctctacatggattattattcctaattctttcaataactatgcaaattagttgttattcctatctgacaggaagaaactaaggcacagaggagttaagtaactgtgctaagtttgcatggctataaagcgtctaagctggagatttgaacctggctgtatatgacagtataactcacattcttgtacacactgtgtgtaaggactcaaagccctcatggatttagaattgatttctgtgacttctgaattataatctttgtcctctttaaaactgctgatgagtgtgtgagtggagaaaaaatta

SEQ ID NO: 34023 - DNA, 3611 bp, Bovine  19866881452110
  misc_feature (1)..(1): n is a, c, g, or t
nctttttgctgtgaaaattcgagaaatttcttttctgttatccttagcagttttcagaaacatcagatgacttagtgtcattaggtaatcatatttttctttcaccttattttgttgttcttcctttcctagtttttctttttaaatacacttctcaagcacaaagttataagaaaataagccacataattatcctgatttctttagattccgttttgagtcttaatctagattcttatataagagaatattagaatcatctataaaataatatatgaattgtttcttttgtttcatacagtctgatgctgcactattcaaaatggcatatatagttattgagctcttgaaatgaaattggacacctccatgtcccagattagattttggatactttgtatgaaaaattataaaatatctcaagcatttttggtagtgttacatgttgaaatgatattgtttaaaatatattgagctaaacaaaataaattattgaatttaatttcacctgattctacctttttaaaaatgtatgttagcaagtgtaaaatagtatgttgtacatgttatgtttctattagatagcattgattattctcaaaatacttctaattttttaattaattgcattatgtttctattgctgctgtaacaagttaccttaaaatttggtgacttaaacaacgaaatgtattaatttttagttcaggaaatcatctaaagtgtcttggcaaggactgtgctctttgagagactctagagaggaatccacttctttgccttttgtacttctagaggccacctgcattccttggcttttggccttttcctccattttttaagccaatggtgtaacatcttcaactctctcagtttatctccttatgattgttattacatctctgactcttctgcctccttcttataaggatcctttgaatacatcaggcctatctcaagatccttaatcatacctgtactcccctatgtcacataaagttaacacattcacagattacagagtttaggatgtgggcatctttggaggaccattgttttacttactatgttaactacatttaatgtcatgcttccttggttggtttgttgattacaatttttacagtttggtttaggaatgatgatacattaatataagctccaaatgtaaacagcagcaagtctgaagtggcatggtggaatggattctcatctatctatgccatagactgcatgcagtgtgaccttagttatatcagtcatttgtcttcttgggttttttctatttagcaaaaggagatttttggagtctatgcaaggactataaaattgtaattctttgggtcacagttcaaatgtactctacttcttttaatgattggtttgaatcctggtaaaattaatttcagctatatgatgttttctatgtctttatcagacttgtgaatcctgaggatatgaattatgtattggtttaatgtattaaagatagccaagaataatacttgcttcattgtccgatatgtaaactttctgttttccaaaactaactgtcttatagtctattaactttgtgatttataagaaattttgctttgaacgtttgtgacgttatcttctctgcataatctacttaagcaactactttttaaaagctattttttctctttccttctctccctctcttctagtaaacttcgatatagaggcccagatttaatttttaaaataacaaaacatttatgagcttgctaatttctagggagggttgggaaatttttagtgaaaaagcaaagtgctaaagctgaaggtcgtgatttttataatggatggttaaatggttgaacaacttcttatacattggatgtaatgtggttttatcattctatttgattgcatcattttattgtttgtttccaggtatcagaaatgattttattcacatacactcaagaaacaagctctaactctgaatacatgtgattttaggaaaactcatctttttgaaacattcatgacataatttctaatttgatgtaagtaatcaaaaattaattaaagaaacagatttatgtgctcacggattctgagagggagggacagatagacagagagagagggagagaaagagagagagacacaaacacacagaagcacacagacacacacaccaagagacagaatatccatttccgtataagatgtagcttaaaggtctcttttatttaatgttttatttaatgttccctaaatattttgggacacgtagatgatgctcattagatcactaattgaacaatgatgaaaatccaggcttgtgtttacttttaattgtgttattagcataaaatcctatttagagaagaaagagtaaccaacccatgtctttgaagtcaatgagatggtgatgccattgggatagaactgaattttttcttttccagcttgaactatagaacattaattttcatgtgacttttccataattaagtcaaattttacaatacattttacaaatactggaaacatagactcaaataagctaatattatacaataaactttaatggatgatttacaataggatggtttcctggttttatttatttggtactaagggcatgcttaaggaatacttttaatgcttattataagatacattctagactacactgcagtgtactaaaattaatcatgatatgatagagtctaatgcagctaaactactgctatgacgattatgagaagatcagcataaataatattcaatcttacaaatatataaaaatgtacaattttaaataaataagatactccataaaataataatgtattgagctagtgacagctgaaatctttgaaccttaaaatgtattgttaagtaaagaataattgtaccaattaaatgtaaatatcaattgtttgttgttgtttgatcactcagtcgtgttctactcttttgctaccgaggctgccaggctcctctgtctatgggatttcctaggcaagaatgctggagtgggttgccatttccttttccaggggatctttctgacccagggattgaacccatgtctcctgcattccaggtggatgctttaccactgagccaccagggaagcctaaatatcaattataaagtttttttttttgttttttttttaagagctccttcaaaaagaaacaaattcttaattattagcataacacatggtttggaaatttttagtaattcagatgataaaaatttgttttgaaattttggatgcatttctgacttaagcccctgagctttgaacacgtgtttcattatgtcaaaccagctttaatgaagaagccctatttctctgtgtaacagtctcatcctaaaatatctagtcttgatcattccttccttggtttccattacaggtcttcccaccaagaaatatcaagatgcatctggtaaattaaatttagcattggagcagatgtgttctcccaatacatacctgaaatattcagtatcagtcaagtgttttaagtagtcttttctaattaagcaggattgtgtgaacagactattctctgtagaaagaacctcttcgtaaacagccacctttgcagtagtta

SEQ ID NO: 34024 - DNA, 1090 bp, Bovine  19866881494893
  misc_feature (1)..(1): n is a, c, g, or t
ntgggaagccccatagaatttgtacgtgctagtaatttattggatataaataacgaggaaaaagggttcaggaagcaccatatttctggcttgggcaactatatggttattataccattccctgagataaaaggagtacatggaaataattgggtttggagaaatcttgaaacaagtttgagatatattgagtttgaaacactgtggaacatccaaaaagaggcatgtaatagtaagaaaaatagattaaaaaatatgtttgacctagatatatagatttggaaattttcagtatattggtggcaaattaagtcatagagttgatgatgcaatccataaagagactacagaatgaaaagggaaacagtccataatagaaaactgagaaaccttaacactgaagacatgggagaccaagaagtccctaaggttaggagaaaaaagcaggaaggagtattacagtagaatcagggaaagacagtgctgtaacacagagggagaaaggaatcaagagtatggcatgatactgacaagtcagtatatggtgaagagtatgttatctgttagatttagctgtaagataatcattgatgactctgcaaaatttttattgtcagagatgaagcctcagaggtaaggtaaaggcagagaaagaaacaaatgtgtacctcagaagacttataactctaagaaagtgtgtgaggactagcttactttgaagccctgtcatttaagaatagagagatgttaggtagataaacagattaagtaaaatttgaaactttctcacaagagtaaccataaaataaaaatgcatatgagttagaaatcactgaatcatctctctggacacattaatatgatcaaccaggacagctgggtcatgttatcaaatctctgcattattcttcaactgacagtgaagttataataaatgttcaatatcatctgtttgaaaatacctgtacttatacacataagttgagcagtactcacaaatctgcaaacaaaaaattgttctgcatcctaaatgaagaagaaaataaatatcttaccaaattccttaacaaaatgagtaatgctctttaaa

SEQ ID NO: 34025 - DNA, 2336 bp, Bovine  19866881546840
  misc_feature (1)..(1): n is a, c, g, or t
nttacatattagcgtcactaagtaattgagataaactactagatctaggaaagctagaagaaaaaatgttaggcataaaagcactggagcttgtaatagcttaaataattatttctcaaaaattagcacattttcattgtttagaggattactctcaataaattctgtgtgtatattataacaatttgcttctttctagaggtgagttagggtgagtttaaagagcttgttttttaatttactatctctcttatagttaagtttaatgaggttcattgatattggcatgtgaaatgcaataaaacatattgtgatctcagacaaggtatatgaaaacaataaatcatcaatatttagcaacaatgtaaaatattttgtttgcaaggtgtttcatgtaaattttctattctagttttcaatactccctgataatgtaatgatacccattctacagatgatgaagaacaatttaagatggtaagaaaactgccagtttcaatgaaatgaatacagccctaatttataatcaagtatctgaaccaattatagattctttaagctgcatcactatcaaaatgattgctttttcccctaagtatttacataacatacatattaattgagagctttatatattatttataaaaatttagcaattttaaaatcttaaatatagtaacacatatatgctgaagttgcatgaaaatctgcataccacattcatgctcagtcacttcagttctgtccaactgtttgtgatctatggactatagcctgctaggctcttctgtccatggggttctgcaggcaagatactggagggctgcccagccctcttccaggggatattcccaacccaggaatcgaacccatctctcctgtgtctcctaattgcaggcaggttctttacccactaagtcacctgggagcttcctgcataccattcacagaacttaaataaaaggataccaaagaaatatgacctatattaaggaattaactacattacttttttcccatttttttcctgcattgggaaaaaaagaaagaaaaaggaaaatcacaaaaaagcacaataaagtaatagcaaatttcaaattttagacttagaatgatcatatggattactggaagggagaatgaaggctaatactcagtttgttgtagcaagactgcattctctcctcctctgtctttcagggtttggctcatttttgagcctatgtttttttaatggcagcccatggataagcaacacaacctgcgctacctgagggagttggaactgcagaatctaaggcaccacctcagttccactcaaccagaatctgtgttttagtaaagtcctgagtgaactatgtggtgatccatgtggtgatcaatggacacgggtttgggtggactccaggagtcggtgatggacagggaggctgcagtttatggggtcgcaaagagtcggacacgactcagcaactgaactgaactgatgtggcctttaatattcactgcaactgttaccaacaatcagggaaaagaagaaagaaactgagtatcaaccccagtggtttcaagtgcctagattaatactccagggacttaaaggtttaatactaagaggcctctgggttaataaactgctcacccattgacttgacagatgaaaaacgatataatccatcagaaataatctgcatcttcaggtgaactgattgttcagtagtggagccggaacaaggtgagtcttaaaatgagattgtaaggtctaggatgccagggattattcctggcacagaacacacacacacacacacacacacacgcataaacacagaatctcttttgaaaaaaaattgttacaggaaagaaaatctgcaatgcttttatttggggaagtcctatggtaaagtttgatcccctagggacaatttatccacagaagaatccagaaggaaacacaagatcaacagcttcctaaccttgataatgagtcaagcccagggttaaaatgaagtttgcgttactttttgagataccaaatgccagtgtctgggccttttctgtatcttaactgagccttcctgactcccttcagtcaaatattccttgtgttgaatcattccgtaaggacttcttgactcagtaactagctaatataataagatgcatatgctagttgtttcctaaaaatgaataacattcattttgagagaaaatgtcctaatccaaatgtgtgcctgtaatggaagaatgatccattttcctgttccactgataggaagaggcacttagtgatgcgttacatatgggactcttaagacaaagggactcttaagaca

SEQ ID NO: 34026 - DNA, 712 bp, Bovine  19866881987201
  misc_feature (1)..(1): n is a, c, g, or t
ntatgtgcatgtctcaaatttagcatactaaaaataagtgttagttttattatgatggtaaaattatgatattttcccccaaatttttcttaagttgatttctcctataaagaaagagaaagcagatgaatcaaaaacataagctgatttattaaaactgattgctattactcttagatcttgatttccatgcaatttgaaaatgatcatcactattctgaacacacagaagaagcttagtaaatgcttagtgccttgatgtgattattaataccgtagctcagacatgacaaggaaagcgactagaggtggtgaattgttttacagcagacattctatttttattttaactattgacctacttcttgaggttgagagagataatgtataactcagtctcattttaacttagagtaaggaagaaaaagtgatgattatcttgtttatttacagaaggattataaagtatcatgctagacttttctttctagaatatgtaattttggatgccatataaaagtacactgctttcaagtgtgatgaaatgagaaatagaagtgtgccacctttttaattatgagttaatggtggtattttcagaaattcggtaagtagctcagtttaaaaatggacaaagtgtaggaagttattttgggaacaaaatgtcattaccaaaggtgtactttttcatatattgaactaataaatagtt

SEQ ID NO: 34027 - DNA, 1842 bp, Bovine  19866880360161
  misc_feature (1)..(1): n is a, c, g, or t
ntagtaaaggctatggtttttccagtagtcatgtatggatgtgagagttggattataaagaaagctgagcaccaaagaattgatgcttttgaactgtggtgctggagaagactcttgagtgtcccctggagtataaggagatccaacctgtccatccaaaatgaaatcagtccggaatactcattggaaggactgatgctgaagctgaagctccaatactttggccacctgatgcaaagaactgactcattagaaaagaccctgatgctgggaaaattgaaggcaggaggagaaagggacgacagaggatgagatggctggatggcatcactgactcagtggacatgagtttaagtaaactctgggaactggtgatggacagggaggcctggcgtgctgcagtccatgggtggcaaagagtcggacacgactgagcgactgaactgacctgaaatgaactatgctcatgaacacttgcttctgatttttcctaaatatttatgaataacagagtctctcattcgacagcaatgttcttggcacagctcttcttccagatgcagcatccagtatggtcttgaattaaggatcaagtggcatcctgagtgctgcttccctcaaccatctgctagctttgtggggttttaacaaaccaaatgtcattttaaatgtttccagtgctcctaaccacaataaaataactgttaagtaaaattaacttaaggcttagcaaactagaaacacacacaaaaaagagataataatgaaagctcattcctctttaagagagaaggaggtggaactgatatcttttgcatggtcagagtctatctgagatacagtcagtccctttaggccagaaactgctttacaaattaaatgtgaggacaggtccattaaaagtgagtaagcatgggatcttagggtttatagtaaacttcacctcaggcccaccagagttcagagattccttctaggttattttccatttcatccttcatacccatttttcggaaaacaggcccatgggaaagagaggatccaaactctataaatcttagtccagggtgccctaagattacttgattttaattgctcaccctgactgtagtttgacatctgttccagtgttccttccaggaagcaagtcacagatgcaagaaggctgaaccatccagttgctcagtcttgcgtgtctaattacttcccacccaaggtcaacatgacaatcagatactcaaaatgaaacctattaaggagaaaaaatattttaacctcagattagtactttttaatattgggggtgtaatataccattcatccctactttgttttaaaaaattattttaattctcttgtaacttttcttccttccagtgtagtaagactttatagcaatttgtaactctatttcaattcagcattgctaaccaaacattgttattttattcatgcctataacaaactgtgatactgttaaaattctccgttttggtgataaaatttttaaatgtggaggatctaggaattctgagtagctttttaaaaatattttctctgtcttttctgtgactctaaccttcattcaattcttctcttcttcaatttttctatttcaaagagataacttttgaggacgttttggttctaaatattgtacaattctataaaaataacttctatcacatctatttggaaaattttaaatattaattattcagaaattttgtaagattggcagtggaaaaagagcaagcaattggctaggaggaaaccataaatttggatttctagtggtatcctcaaattccgttacatatccaggcaatactttgtaaccat

SEQ ID NO: 34028 - DNA, 1127 bp, Bovine  19866880477217
  misc_feature (1)..(1): n is a, c, g, or t
ngtgttcttgcctggagaatcccgagacgggggagcccggtgggctgcggtctctggggtcgcacagagtcggacacgactgaagcgacttagcagcagcagcagcagcagcggtaagccatgcattgctgaggctaccagtatctggtacatagtagatgctcaataaatgtttggaaggagtgtttataagctggtttaacaatacatgtcaaaagaatatacttaaaattacaaggactggtttagaaatctatttcatttccatcatagtaagatgtgataggattggactctatgattctgcttcatgctagtatttgtatttgtaggggatgtattagaggcaatttaaactgttaattctctatttctgaagagtaaaaatttttgtccactataattagaaccttgaggacaagtgaaacagccagaaatttttttctatcagcccttaaagaatttctttggtcctggaattattgtcaaaaaatcattaatcctataattcgttagagcaagaaattctatattatctcaaatgaatggtatttttcttcctctcaccacgtcctttatattcatctcattttcatgtcactagatcaagaaaactaaaggcactctgcagaaaaggctctcaggatatctcacaaacaggatcttatgaaaaccaaataaactggaacagaagaaagaggcacagatataagaggttctaaaaccttctgaagttttcttgaagtcccagggtttactttgatatccataacataacataagccaagaaatacagctttgtgaccactgcctcattgttatttcacaacactaggaagcataatctatgtgttgataatttatctttgaagtataaattattcagtattttcagggtgaaagtcatatggtttagagtcacaagaaaattgcatcagcgtcctatctttataatgaatgactaggtttattattccattgacctatggagacatgttagagaattaatgtactgtactgtatgtgttatatacgaggcttgacacatataaatattctgaaaaattactcatttagttggctggatcatttaacagatttagcagaaataataatccttttagcaa

SEQ ID NO: 34029 - DNA, 1618 bp, Bovine  19866880632387
  misc_feature (1)..(1): n is a, c, g, or t
nacctgaatttgaagccaatctcccggtctgagatattaaaaaacagtccacacagcatttctttacactaaaatcaactagtccatcttcattctaaatgcatcttttacccccaaatcattcagtaacaccacaggtggtcatttgaaaaatattggctcactgagttatgcaaatctttcaaatgttgacttcatagaccctccaaaagggggcacgagacccccaggattctagggactacatttttgatagttattgctctataagaacaaatcttttgcttctttagttcaactagaatttcccagttagttggacagtaactaccacacagtaggtactccataaatatttgttggataaagaatgaatggatggatgaatgaattatccctgcagacatttggttgaaatttctttaccactctatctttgagaataaaatgtacctgcagtttaagtattcatttcctatctccaaactgatgagctctaaatcatgcatgttttaacactcccaataaaaacagtagagaagacttttaagatttaagttatcaagctaaataatggattaattgcaatttacaaacctctgataaaaacacttactggacatttaatagctaacaactatctgagaccatattaagataatgtattttgtcctccttttaaaatattttttgcatgaaaagtatgtgtatctatcacacagtcaattatctcccacagcatgagaccattcccaacatacgcacaggagagtaataacagagtatttggtttgttttaaagcaataggtacactagaatattctaccttatcgaaatacctttaatgtcccagtgttaatgtctttaagactgtgaactagcaagagtgtgtgaatgctccagtatattgtactgattcaatgactcagaatgttaaatgcattggataatctttctttttattttgttttcctcccaaatgtagggggatgggggaagctatggggattgtttcttttcttagcctgagcacccctgtggagaggatccaagcgtgaagtttcctttgaagtgaatggaatctccccactcagatcagttctgaggatacacagaggagaacaagaaactggccgaatgaaaacagacactagcatttaaatgaggctaggcttaaaagaaaatgtatgggtcaaaaaatgcccagatttgaaaattaagacgcaatttttcagcaatcctaggtcaaaccatcttgtaggtctttcttaagtctaacacaaaggaaacaacagtagcaaatattcaaaaaaacataatgattaggttagcaatagggaaacatatcgaaactgcacagatgccaagtatataatactgtggatataatagaagtctggcaacatccatggattgtatgtgccctatatcctgattttcagtatgtctttaataccagcaggttggtaaagtaaaaaacagaataaaaataaccattacaaaataatattccagataagaagtcaagcataagtcttgctgatgtgagtaaatccaatgcaggaaatataatcttctttgaatgtaaaatgtatctgccatctataaaaccaaaat

SEQ ID NO: 34030 - DNA, 893 bp, Bovine  19866880756788
  misc_feature (1)..(1): n is a, c, g, or t
ntgtataaatgatgtggcgtaggactgcaaagactgtgattgtataaaagcctgtgtcaatactgaatttgaaactaaccttgacaatgacctaaaattgccagcctgggtaccctgagcaatctcggccatagtctgctttcgcataagagctgcgaattattatttagtatggataattcttaaaggcatatgaaaacagcccatggaataaactgtatatgtttcaagagaaaatggaaattacaaagggaaaattgagtggattaaaatgtgtgacttttcatagcaatggcccaaaagatatgggaaaggtggaaggtggacaccatgtactttatatggcttttaacgtgtaacgatattagatctgatattattaatgaaaatacttgcatttttaccaatctgcatatatttaaatagtcttcaaatctacatgctgaaacatcacaattttttcttctctctcctacccaactgacacatctccatcaataaccacttagaaaaataggcaaggcaatctcaaaaagaattactgcgcttcattatgtaaaatgaaaatggagcttttaaaacacactctgtctgacattcagttctgtatgctgctacagcaggtcaaaagccattagccacctgctgaaaatacatcctaggaaataaaatgcccttcaaaattatttcacatacggtatttccaaagtaaaatgggtgaggtcatattctaaatgtctaaaaatgtgatatctcaaaaagaaacacacttaccatgtcagaaattaatttgaacacagatttaataatggccatataatttagaacattcacattagagaaacaaagtaccgtgtctactagagagaaaagagtacacagaatatcctaca

SEQ ID NO: 34031 - DNA, 829 bp, Bovine  19866880799740
  misc_feature (1)..(1): n is a, c, g, or t
nttccaggctcatctgagagccttttaaattgtcataaaaaatctccacaaaagattccaatgtgtttattgtaaaaaaaaataaaatctgtgtataaatagacccatgaagttcaaacttatgttgtccaaaagtcagctataacttgtatatattgttgataaaatgtgagtccatgaaaaaaaacattacatatgtagagttaatcattacatactaatagattctttttcttcaaactcaatttttaaaaaaattgatgcagagggcatacaggagcatgcagaatgttggttagattcttttttaaaaaatatattttttttcaagtaagtctgaatatatacaaatgtctgaaaattgtgtaattgaaattaactttttattttatctatttccaaaaactttgttctctgaaatttcttatgtggaaaaagataggcttttccttctcattcatttgatgtgttgtcatactaaattggtatcagtaaaatgggaatgatggttgaaacggaagttgttcagagattccaaccaaatgggtctcttctagatttgtttgatttatttatgttgatttctatatttaatttaaatgtaccaattaatgcttgaaatagatggggaaacagtggaaacagtgtcagactttattttttttggactccaaaatcactgcagatggtgactgcagccatgacattaaaagacgcatactccttggaagaaaagttatgaccaacctagatagcatattgaaaagcagagacattactttgccaacaaacatccgtctagtcaaggctctggtttttccagtggtca

SEQ ID NO: 34032 - DNA, 3327 bp, Bovine  19866880923066
  misc_feature (1)..(1): n is a, c, g, or t
nctccttaaatttaatatggtgactagaactgtacttttactttgattttaggtcatcattttgaacatactctagttaagtcctatgtggctgatatgtagggttggtggtctttctagaaattggcctcagacttttcttttatgtcatctaacaatctgggatttttgtcttggaaccagtaaaaagccattgcaagattttaagcaagaccatgagaaaatcaaatttatatcttagaaatggtcattatggcagtcatttggagtttgggattttaggggttgagataagagacaacatattgtaaaataaaacattaagatactctgactgaaattcacagtgtatacatgtatatagtgtatatggttcaagaatagcagataaaagaaatgaaaaattccaattgcaaatatatgaagccattagtaatcatacagttatgttcactatgttcaacttaagaaatcaagttggaaaatttacttgtccaactttgaagtgtgaagagatggagacatttacatggaaagttaaacaatttttaaataaagcacatgatgaatttggagtggcattagaatcttggacttggctgcagtaaagtaggcaaaatattatgaagaggggactacactgatggcaggggagatggagagaagagaatgtacttgagagttcaagaaccattcaagaggaggaatccagctggattcatttctcaactatatgtgagaattgaaggacagagaaatgtcaagaatgcctcctggcttgggcagctaggtatctgataatactcattaggaagagaaggactagaaaatgagaaacagagatggggcagggaggggggaagtgaaagtcactcagtcgtgtctgactctttgtgaccccatggactattcagcccatggaattttccaggccagaatactggagtaggtagcctttcccttctccaggggatcttcccaacccagggatcgaacccaggtctccctcattgcaggcggattcttcaccaactgagccaccagggaagtccagggatagaggagatgaagtttagttgggtatttgttgagctggaggtgactgttggacactggaatggagatacccgtgaagcagtaagatgctcagatccagaactcagggaagaaagttgaactggaaggtaattccgggagtcattagcttccaggtgactgctgcagccctcaatttagatgaaatcacttatcttataaggtggcatgagaaaagcagaaggccaggaatgcaacacagagaaacataagcagcaatcttgtttaggaaggccgtaaggacagtagaaagtaaaagaaagttaagttgctcagtcatgtccaactctttgccaccctgtggactgtagcccaccaggctcctctgtccatgggattctccaggtaagaaatactggtgtaggttgccatttccttttccaggggatcttcccaacccagggatcaaacccaggtctcccgcattgcaggcagacactttaacctctgagccaccagggaagctactatctagggcaggagagacagagctattggagcctagctttgcccctactggtttgggtgagttatcctctcaagcttggtttcttatatataaaatgagggtagataatgtttcctctgagggttgttaaaacggttatcaggataattagaaataatataatgttcctaggccagtgccaggataatgtagctttcatcaacatcctcttcttcactgtggtcacttctcaccaagcttgtcagaactaggtgagcagaccaatagcttctgagtgaagacaaagatgctgaccagaagaaactcagagtttggggtttcaacattagcacatccttttggatactcagaaaaccatttttgccagttattattttctaactactttaggatcgttaaaattgctgcaaacattctaacactttcatctacattgtctacatagatgtcataaaaacagagcatcaaatattaggcaaaaaagacaaaaaattactgcagattgtcataggataagtatcaaagataatgggaaagctgttcagaagctttatgaagagaatcaggaccctgttcttgggcatgacctctggaccttgtgaatttactgctgagcacgtaagtcacgactcaacttagtggtcgacagccttctcccccgctcccctcaccctttatacagtctgtgacttcgtgaacctggcacgttgtgtctctcagaagagaaaattaggcaaaatgtgcagtttcttctatcatattaagacaaaggctggtggaagtactattatgtaactcactgaaatgaaaaactccaggacaaattaccaggcttatcaatcaaaagaaatatatccagcacgatgtacagaattttgaatgtttccctgtaagatatcagctttgccttaaagtctgataaagtcactttcgaaaaatataccagccaccgtggtaccctggcagtttgaggcaagcagtatttgtgcaaggtcagcacggtctgaggatacgtgggcatttcctcagagggcaagccattcaatctcgtttgcaagagggacgaaggcttatgaatgttttaggactttagtgatctgacttgagtgcattaaatcatacaagcttgctcttaactaaagaatatctgaagaacttgttgatgattcaggaatagacaacaaagtttcccttattttctaaccaactttgtaacttatccctgaatcaccagttagaaaataagacctttagaaagattaattgaactgggattattctgcttgaaacttgagaagctagtgaaaaatttagtagctgtctattcctatctctgttgcttttacaggttaagagtgacagatgcttatatgaaaaactcaagtgataaatgtatatgcacaaagggaaagtccctgtcattctccagcaacaaataggaatatagattcctccacacttttcccccgtgcatgcatcaatatattaataatactcttaattaatagcgatattcaagtccaaagcttctcggattggtgggagctgaggagaagggaaagagagaaaggagagctggagacaagtaaaatatttgatgaacatttccctctatgaccaaagaaacattgggttgcagtgaggaagaaaagttgtgtctgtaagaatatggagaatgtagattccttctctgttttctccattatcatgtttcagtgtgaaggggaagggcagagttcacaccaggggcaagtcccaagcta

SEQ ID NO: 34033 - DNA, 1315 bp, Bovine  19866880932032
  misc_feature (1)..(1): n is a, c, g, or t
ntctatctagaaactgtgtgaacatgtgtacaaataggttctcacaaatgactgattaatgaaagtcagatctgttcacttatctacaatttccattaaaattttagggagttgagaaaaagtggctttaaaaatctgtggtgcaaagatatccagtataacaagtgtgaaaatgaagtgctttttttacaaaaataaaattctgaactttagtcaatgacctgcttacccaaagtctaaaatacaaaataatttggaagataactatgttctttgtaatggaatctaatctctctctctttccttggaattattggtagaaagtttctccttatctcctgtgctgatgcctgaaaatattcctcccagtttacataaataaaagtctcaaaaataagatcagcagcaggtcttgacccctgacttgcagatttttaaaatagctctttgagtgcatgccttttcttgcataagagaaagattggctattttaatctgggtagctcgtcataggaccgaaagtgctgtactatgtactatgatctatgtactgcgtactttttctgttgttcagtcaccaagttgtgtccgactctttgtgaccctgtggacctcagcaagcccggcttccccgtccttcaccacgcccgtagaatttgcccaagttcatgtccattgaatcagtgatgccatccaaccatctcatcctctgttgccttcttctccatgtgccttcagtgtttcccagtatcagggtcttttccaatgagtcagttcttcgcatcaggtggccaaagtattagagtttcagcttcagcattaatctttccaatgaatattcaggactgatttcctttaggatggactggttgggttctttgcagtccaagggactctcaagagtctcctctaacaccacagttcaaaagcatcagttcttcaatgctctgccttatttatagtccaactctcacatccatacatgactagtggaaaaaccatagctttgactagatggacctttttgggcaaagcgatgtctgctttttggttagttaaaatatacttgttgaatgaacgaatgaatgatgggagattggcggatgcaagacaactcattttgtctaaaaagaatttaaattctctcatcttacttcctctaactgcatttataattccttttttaagaggcacatttcctatacagtttatgagtggttcaaacagatttcttctgttttctgtgctgctttcatctatcaaaaagaaagaaagaaaccagaaagaaaagcaagaagaaagaaaaagagggaaa

SEQ ID NO: 34034 - DNA, 807 bp, Bovine  19866881006815
  misc_feature (1)..(1): n is a, c, g, or t
ntatgctgataaaatgcaatacaatttacagagtcaaaccaaacccagcatattcacatatggtaattcctgtctgaatatttcttctatctttcaattagatacagggcattctggctgagctagtgctgaggctcatcaacactatttgtgtgcagtttgacaaacccctatctctccaggtcctaccccagaagtactttttcttttcttttctttatttgtgctctgtgtaggcaaagcctctttagctgtcatagaatccttaggggatgtgatcagcctcttgagagaaatgttcctttgtgtgaagaaatgatctgtcaggatgggctagactaacacttagtagtgttcagaccatcacatcaagaattttagcagcaaccatatgcattgagaagaagagaaaaggggatgagtgtaaaagaactgcattacgaggtctctagcccatctgctctttagctaaaaagaaactagatgaagaaccccacaaatgctttaaatttgtaattctcagacttcggcaagcacgagagtgaaaacttataaaccagcattctgagattctgattcggtaaattcacactgtggccagagatcttgaaatttagtaggctgccagttcatctgatactgcagatatatgggtcacaatttgagcagttctgctcgaaagcacagactgttagattttagtgtgcatcagaatcagttaggggtttgttaaaacacagactgctggggtctgcccccaaggattctgactcagaagtctggatgggggcccaagaattcacattc

SEQ ID NO: 34035 - DNA, 1535 bp, Bovine  19866881008126
  misc_feature (1)..(1): n is a, c, g, or t
natattagccagagtaagaaaatcaagactaagagagaatggatggctaatccttcaaacttaattccagatttaaatccatgagtgttttggaaagggattgtaaattttaatattgaacagagttataggaaacattggttctcaattcagaatgaagtcatcatagggtgagtgttcaggcataacacttgtctatatactaacacacagaaagcacatgagacatttatttagtgaatacatggatgtataaattaatcaatgaacatgctttaaaattcgcttgaaagattccccatgaggtatgaggaaatcacccctcctctctcaagcccagactctgtacctacgtacctcacttctacatgccagacatttgctgacagctctccatcagttattgcagtgccataattgggtaccacaggcctgctgcattgagggtaagtggaactctgtcgtgcctggcagggagctttgcctgggagctgacaactacatggaattgactgacaccttctgcaggtgaagaatcttacaatattatccaacttaccaaggcaatcaagagaagggatatggtcaatttaaaaaaataacaaagaaatttcccatatctggattcatgttttttagattcttctccactcatggtctgcctctaaaaagccattatgtaggaaaaactaatttcattttcatcatcaatgaaacaacccataccttgaagtaattttaagccaggtaaatttaggaaaagttaaccaaactaaaattagttgaatcagtcctggccattaaaggagtaacagatgttatagccaggctgtcctcacattttgccagaaaatcaagtcataaatttagacagattgcaagatgttcagcaatattccaaatggaatcattctgatcttaacaactaatactgcagaattgctgaggaggggctatgtatggagggaaaaaaaaaaaaagattgctttagagacgacaaagaattccagcatgagggtcttttcaaatgagtcgattctttgcagcaggtggtcaaagtattggagcttcagcttcagcatcagtccttccaatgaatattcaggactgatttcctttaggatggactgactggatctccttgcagtccaaggggctctcaagagtcccaggactttgtcctggaccctttccttctacttacatttcattagcacttgtgcgggtgctgtgcttagtcgctcagttcattagcacttcagatcagatcagatcagtcgctcagtcatgtccgactctttgtgaccccatgaattgcagcacgccaggcctccctgtccatcaccaactcccggagttcactcagactcacgtccatcaagtctgtgataccatccagccatctcatcctctgtcgtccccttctcctcctgcccccaatccctcccagcatcagagtcttttccaatgagtcaagtcttcgcatgaggtagccaaaatactggagtttcagctttagcatcattccttccaaa

SEQ ID NO: 34036 - DNA, 695 bp, Bovine  19866881128005
  misc_feature (1)..(1): n is a, c, g, or t
ntagattagaaataaatgtcattgatcatcgattttatacaatcaattaaacatttatataaaacagatctcaagtattctaactagcttaacctcttatccgcagaacacctctaaatcagtacttaatattgtttataacaaagcttctatggtgtccttagaaactctacaatcccctcaggaaatgattggccaaagggactttgagctaatgaggttaatttttgtggtttgttgcttgtgtatttccaagaccgctgtaaacacagtggaaatttttcagtggagttaaggggcttccaggcggctcagtggtaaagaatctgcctgccaaagcaggagtcatggcttcgatccctgggtcagtaatatccgctgaaggaggaaatggcaacccactccatttttcttgcttagaaaagtccatggacagacaacctgcgacagtctatggggtcgcaaaaattcaggatgcgattcagcacacacacagtggtgatcatagctgctgaaaaccctttataaaatattagatgctctaatttccagactcgaattacttttattctaaacgttattgttaatgtcaactcttcaaatacgatgattaatttgctttcctaactagattgttcataaacagcatgaatcagcaaaaaacaaaaatgaaaactgacagcattaatgcccta

SEQ ID NO: 34037 - DNA, 834 bp, Bovine  19866881182861
  misc_feature (1)..(1): n is a, c, g, or t
ncagtacttaccagtatgtggctcataccgttattatcctttttcttgtttccattatctctgacaagtgactctttactggaactctaaatgagagctgatttctaccaaaaaatttgcagtagcctgttgagttactattgaaatgcaacagactgtggctaaatctgctgtctttgtgtctgtgggaaatggagtttcctgaagctcataaagttaacattactcgcagtaagatgatttccccagagattatgcttcaatatggaatactctagatttatggcacagttccaatctaggttttggattctttctacagataccctcataaatttatgaatcaaaacacacatttagaaattaatggaagcatgaatctgaagataacaattccaaaagtcagcttggcttttattgtcgtgcagaaaaaataaattactctcaatgggaatttagtttaatttactgctcaaatattcaattgtaagcattaagtatactttaaatggattctttcaaaagtagttcataaaaaatttgttgggatattgctaagaaaaattgataaatcatatatgatacaaagtaaaatggtcactcactccctatttgagaaaaaaaaaataacaagaagctgatctattccttttcttgtgagcaaaagagaaacaaaaaaaaaattcttccaagaattgcaataacatagtttcaggaattcatatcttccaaagacagtaattgcacattttctttatttttgctcttgagacaatgggacaaatgtgaatcaagaactgggaaagagagatagtgatttgtattcatgttttc

SEQ ID NO: 34038 - DNA, 1605 bp, Bovine  19866881220325
  misc_feature (1)..(1): n is a, c, g, or t
natttagcagcagcagcagcaacacaaagcaattgatactgtatttagaacagaccagttttatctttcttcactaatgtttctttgaatcatacaacaatgaaagtaaaattgcaaaattttagaaagaagaggaatgagttgaccattgtactaagggttgaacatgtcttatttaagtctcgtaatgactctataaataagtgctatcccattgtatagataagaaaaatgagacgtaagaaggttcacacagctagtaagtgataaagctaggattaaacccaggctgtccatcttatcctttctcattttctactttagctgtcccttttggcttcctctttggctcaaagaaattggatgacatatcctagactgtcacgtgatagggtctcgaagtttatctcttgattttcagatgtattatgttttctccaataatacatttttgagttaaaaagccttttctataacacctgcccctcaaattacaacctaagtcacagagataactggaatcagctggtggtgttggtagggcacataggttaggatgctatcagcagcaagtaataggaaatcctgaatcagctggtttaaacaatgaataaaataccctgtaactcaaaacaagtaacctcaaaaatgagtggtgctgaaaatcagcctaaatacactgacattcctacagatatttatagtgctgaacttttatcaatgagcaactgaatgaaaggagttacataatctgttgttcaggctcggataagtcccccctaccaacccctctaacacctcagcccaccttcttgtgtgagagaatcactgaaggcaatattaagattcctgagataagattctgccatccttacagctggttgcatgttgctgttgtcgtgtagtcactaaatcaggtctgactcttttgcgactccatggactgtagcccgccaggctcctctgtccatggggattctccaggcaagaatactggagtgggttgttatttccttctccaggggatcttcctgacccagggatggaacctgggtctcctgtttggcagacggattctttaccactgagccacccaggaagcccagaaactagcttgcttagaaatttagccgggggcaaagtcctaaggagtataggcttctaatcttactagattcttattctctttttatgaaagggaaggatctctaaaataattttagcgagtccatataactttaaatactttttttttctaattttattttatttttaaactttacataattgtattagttttgccaaatatcaaaatgaatctgccacaggtatacattgtgttccccatcccgaaccctcctccctcctccctccccataccatccctctgggccgtcccagtgcaccagccccaagcatataactttaaatacttttaatttcaccagtaagagcccaattttaacatgcatcatgcttgtcaacaggctgctatttttatcactaaaagcccttttctggcattcagtatgttaattagccaagtgtaggttactgaggaagatacagctaacagaagttcttgtaagagcccttctggaattt

SEQ ID NO: 34039 - DNA, 773 bp, Bovine  19866880736398
  misc_feature (1)..(1): n is a, c, g, or t
nctgcctaggaaggcaaagaaaagtcataaatgtaatagcaccaaccaaaaatattttgccaggaatggtaagactaaaagggatgaatgggcttattagctcagtgaaactttggacatggtagcatgtgacaggagagatcgatttttaaaatactgtgttactaggttatcaaacacttatctgtcatcttttatactcaaaactagggccagggatcttctgagagatggaactcacctggaataattatagcagctgacaaatgcactcacgctgcccgtggtctacttgctttatttgctcaaacttttgatttttaggcaaactgccagattctcatggtaatatccgtgtcccagcggagactctggtgtgcacaaatctttattgtgacagctccctttggtgcttctgtggttcaatgaagtgaaaataatgatgagagatttcaagattttggaaagtagttttgactatttaaaaagtgactattttagtttctattttataggatttagagcttaaagtactgaaaaaaaattctggaaactctgacacccttaattttattttttcagattctgaataggaaatacttcctaattgaccaagttaaagagagacagacattgatgcacattttctttcaacagtaaaagaaagaaaacacaaaatagactcacctccttttaattacacatgaagttagtattagtctgaacagctaggaaaggagcaaaaaaagtgtgttcattccttcaaaagctgc

SEQ ID NO: 34040 - DNA, 1276 bp, Bovine  19866880943814
  misc_feature (1)..(1): n is a, c, g, or t
ntccccaacacacatacacgtacactcttcattcttcttaaatagttattctttaaggaaaactgaaatgtgacacacctatgggccatccaattacttattgaataaccccaccaaataccaattatgtgccaggcttaatgccagagcttcgaggaatgcagaaataactcattataaagctgatctcaatatcttatcatgacattgaaggctctgaaaaagacacatatgcacccaggtaacttaaagggttagaaagactatactgaagcttggaaacatctgagctatcacagaagggatggccagccatctttccaagacttcgggagagtgtgacaaggatgtcactgggcatgtacaaggatggaggcaaaacctaagaaacttttctgctcattttttgtttttcaaaatttgggctgaagggagctaattctttggcttgaaatggtgtaccagtgaggtgccagaagccttaggttcagggtgcttcaaacttgtacacagtttgtagctacttacgaaatgattccctcacaacatttacccctcatttagaactgctcatagagcactacaggtcaaatacatatggcagtgaaaactgtggaatgatgctacaacactgagagcacatttgtaaatgcaggcatatggttataatggcattatttttaatccaaatgctatataacatgcctcatttaggatttggttcatgcctggcatgaatcaatgggaaaagctatttgtgaattatccaagtgtaacaggtggtctggcaactcattttagggagtttctcagtctcactgccaccaggggggtgacctctgggtggactttcaaggccacctggatttcctaacatctgtagcaaagggttatttcaactggtattttagaaagcattcaaaattgctgtttgagaggagaggaggaaaaaaaaaaacactatggaaaacaatggacagagtcagtgaacagttaaacaaggaatgtgtatgtgtggttgtgtacataagtatacacatggtatgctctcagtgacctcagttttatagtaaaaagagaattctaatgtacatgattgatttttgaggcagcctttgaaaaaagcccaaggcactacaccactgtgcatcatatatgtgcagtggtccctaccctttctggcaccagggcctggtttcgtggaagacaagttttctacagactgggggtgggggggttttgggatgatattcaagcacatcatatttattatgca

SEQ ID NO: 34041 - DNA, 1115 bp, Bovine  19866881753897
  misc_feature (1)..(1): n is a, c, g, or t
ntgggaacagttaatgtctgtttcatggtgttcgggacctcagctgggataatttgattgtgtagagccagccaggcaactctctctccatacagcttttccatttggctagcttgggcttcctcagaacatggttgccctgaggttctaaaagtgcaaggcagaaattattagtccttttataggctagacccacaactagcacagaacactactggtcaactaagtgactaaggccagcctagactcaagtgggagggcaatcagattccatctcttaggagtagaaaagaatctgcagccatattcagtcttgcatagaaatatatcaccaaaagtgaggcactggagagccgaaccttcccccagaagtgggacctgaaggtctcatacatcgacccagaaaaagagccagggttaggcagttattcaacactagcaaagcttgttgcctttctttcttgataaaaacaaatacaattagaaatttctgtattcctacggggcacctgctcctttctaagtaaagacaggcattatggaagcttgaaagaagcagtgatcacactgaactgaaagatgcaaatgggtgatttgctatggctctacaatccatgccgctgggttgcaggcatttgaacattttgaagtaaatgctctcaattggcttccaaatgccagcttcttgttttcatcacacggtggcccagcttcacgtgctggactggctgctaggtgccgctttggcagtctctgtgcaccctctgacaggtggatgggttactttcacagagccagaggcctcacagctgctaatagtaattatacttgtcagcaatgtattcccctcaggaaactcctgctgcttcattagggctaattgccaataggcagtgcaatttcctagaagaggaggggacataaacccacagggagttgacagaacagctgtgtgagctcagagaagccagatgtggccatgtgccattaaagtgtagctgagggctgctgaatgcattcaacccagttgaggaacacaagaatttggtgagggaggccaaactcctctccagcttgactctcctacctgctttcgtggaaaatatgaacacagg

SEQ ID NO: 34042 - DNA, 2108 bp, Bovine  19866880197959
  misc_feature (1)..(1): n is a, c, g, or t
ncaacaacacaagagaagactctatacatggacatcactagatggtgaacaccgaaaatcggattgattatgttctttgcaaccaaagatggagaagctctatacagtcaacaaaaaccaagaccaggagctgactgtggctcagatcatgaactccttattaccaaattcagacttaaattgaagaaagtagggaaaaccactagaccattcaggtatgacctaaatcaaatcccttatgattatacagtggaagtgagaaatagatttaagggcctagatctgatagatagagtccgactcttagtcctgtgctaaaccagatgaattctttctcgttccttcagtccgtctttgctttagccttcttcagtttcccataggtttccttgatagaattgtaaatattaattttttcaaaattattaaatatattcaaattattgtcttctggtagctcatgaagtgtgaggacagtgaaaaagcatgttggaagtctgctgctgtgttgtataaaaacattggcttgagaaacttctgatatggtctcttaccattttttataatttcgaaaaacttcaaggaaatttagttttaaatctgagtttattgctttcgtttttgtgacgtaattgaattttcccaaatgaatgaaagtgaaaatttagccattcttgaataaattataatgactagatcagcactgttcagttggaatattgtttgtgccacatgtgtaatttaaaattttgtagaaggtatatgagaagaaatcagggtagaattagttttaataatatattttatttaacttcatatgtacaaaatctctttcaacatataattgacctaacaattgttaatgatattttacgttgttttgtgcttcaaaatcagaaatatcacgtgttttatactttgagcacatttcagtttggactagatacatttcaagagatacatgtggctagtggccactacattatatgacatataggtctaggtaaataaaatgtaatattacaacaatagtgggctttagctgtgtgtgatagaacgtcagtagttatcgctggtttaaagcttgtctttatgttgtagcagtcacttatgtggatggtgaaaatttacccatatttgcaatctctgtcccataaatgatttcaccagttattcatttttcattcccaaagacttgtaagttttcataggcctaaaatatgctcttagatgattgagagagtaaaccgaatttagtatacatttgttctcttcacattgataaaatctgtaggtgtgacatgagcaagtttgtattttgagaagctcctcttggttcactgtgaagagattggagaaggtgtgacaaggcggagagatagtgggaaggctattgcaatttacagcccctgatgggagggtgtgtgggtgggagataagatagaaagaagggggcttatagtagtagcttgagggtgattgaagaaatggttttgtttttctttgcttgtgtgcattttaaagatgattgagacttaaagtgtagatgtgaggtgtcctgttgagaagaagaagatgaacatatgagagaaaaggataactgatagggtaatccagagaaaagatgggaagagatgaaacttgtatataaagatatatttttttttttgcataggttttgtcaagttgccttaaactttacaactgtgggaaatatctgtcactaagaaaatcaaaggataaattaaagactagagttgtattctcctccatctccttagaagggagagaaaaggtgaaattagaattaaaataagaagtgagagagagctgacttgtggttgccaagggggtgggggttgggagagggatggagtgggagattggggttagcagatgtaagctgttgtatttgttgttcagtcgctaagttgtgtccagctctttatgactctggattgcagcacagccagattcccctgtccttcagcatctgctcgagtctgctcagattcgtgtctgttgagttggtgctgctagctaaccatctcatcctctgccacccccttctctttcgcttccagtcttctccagcatcagggtttttt

SEQ ID NO: 34043 - DNA, 1575 bp, Bovine  19866880346127
  misc_feature (1)..(1): n is a, c, g, or t
ncagtggtccagaaggacaaaactgctaccagatgtcttctctgggaaggggcctgaggctggggggcatcacatgaattttggctttatttgtactacttgtattttttaaaaataaaaatatacttggtgttagaattaaactgtttgtaaatgaatggaaattgacgatgtagagaaagaacatgtacgctactccttgacaaagtttaaagatgaagagaaagctggccagaatgaggcagaattaaaggaaggaatttttaggatgtgggaaaattgagcactgctaacttcagtcaagttacagttttgtataaagcattatgaaggcgcggggggtggggaataacttctagaatacttccacttattaggtcaagatttcaacaatgctttgccagcaacgactttcccactacagttaaatatgcatgaaatgatagaatttctctttctgtttttccaccgcatgtttctttaatttgtgtttctttggtgtgtgtacagctttttgtaactaaagtgctgatgccattatggaaactgtccgtcttcagagctggaaagacctgagaatagaagctgactttgacttgtgtttggtctggcatggctgcggacactgcaggagtgtatttgtttttcattaatttgtttgtaatttttctccatgatctatggaacatttatttcccctgaagcaaatgtcataggtttctcttggttctggtggggtaatgaattgttgagaataagaaatttttcttatatgctatttgattgtggaaggagacattttgtgaccttttgctgttttacaatgataatgaatttcctggcaaacgtggaaactttgggcttctttattaaaataatgaggtttgaggaataactttgacctggacctttgtagaattaatcaaatatggattttggaaaaatagatgagttcagtctttactgagacactttaatgcattcctgtcaccaaggcagtacacagatccatatcacataaaaacatcaaacaattaaatacagacccaagtcccagcacagagcttcaggcatgttgtgtgaggaggttaaggctcagggcctgtcagcctgatcacagtgttactctgtttcctgtgttcgttgttcctttttttttttttaattgcaagagtaacagtacaacttgtaaaaaaattttggcttatactgaacaggatgaaaaagataaaagtcatctgcaatctcactctcaaaagctaatggcccatcataacattttggcatattccttctagtcctattttaatgcccatatttttgtatgcaattgaggtaataatgaacacaaaattttctactctgcattttttctcttatatactgcataaaatattttgtgtccatctctaaacatttagaaaaaaattttattggagtatagttgctttacaatgtggcattagtttgtgctgtacagcgaaagtacatcagttatacatattaatatatccactctattttaaatttccttcccaggtcaccacagagcattgagtcaagttacctgtgcta

SEQ ID NO: 34044 - DNA, 3553 bp, Bovine  19866880350776
  misc_feature (1)..(1): n is a, c, g, or t
ntggttgagatggtacaggctatttgttgcctacactagatgttttcttttttttaaaaacctcagtatcaaggtaactcagctgataaagactccacctgcaatgctggggagaccctggtttgattcctgggttgggaagatctcctggagaagggatcagctacccactcctatattcttgggcttccctggtggctcagatgataaagaagccgcctgcaatgcatgagacctgggttcagtcgctggattgggaagatcccctggaggagggcatggcaacccattccagtattcttgtctggagaatctccatggacagaggagcctggcaggctacatacagtccatggggtcacaaagaatcagacatgactgagcgactaagcacagcacacagaacatcaagctgtgaaattgaatttcttactgctcttactacttctgcctctaattgcccttatctcttctagactgtcttactttagcttaaatcttctatagaccaatgaatacaaatgtatctaaaattatatgttatatataaggttgtggatctaaaataataggctctgagtgagagtttatgtttctctacttaggggtagtggggaatcagtcttaatgccaagacttttcagtgttgccttttctactgaggctttaaacttccttctggtttcacagagtattccgaatgattaagtctgcctgaagactacatcccttttgagaattccttgatatttacagttttacttttttttaaatcaggcaaaagaatggaccccagcaggaaaagcaaagaaagagaatcctgataagaaattttattccgaatctgaggaggaagaggactcttctgagagcagcagtgacagtggtgagtctttaattcattggaaagccttgttcaccgtggcttataggccgtgctccctgcagaacgcggaggcccagagcgtaacattcagccagcaggtttaggtgaagtgtacacgattgaaacaattcctttcatttacatgtcaaagtaattttgatacgtaagttttcaaagtaatttctaaccgctttttatttgacattgcctcttagacccataactaaaaaatgacagaattgaaaaaagagctcatgcttttctgaattctaacccacactgcctgggatgttcattaacgtgttgaaaaacataaatttacatttggcaaggctttgttttcagtatttgacaaattagtctgtggtgtgttattttctgaagtaataagctgaaaaatggggaaaattacttcaatccaaacagctaatgctaaaaatatggaatttcaggaatgacatagaccattgagaaagatatgttgtgtagttaagagtgtctcacagatatttgtctccatcccatttattcacaagctcatgttctatttagagtctaacctttttcagtatgtatttgaaatattccagtaacattatggcttttcatggcattatctgaacatgtatagtagggatattaagagttcccttttagctaccagaagaaggagaaaacttttcttattagaagataccagtttttttcccaatgaacacgtcttcttgaagataaacaaatttcctcaaagatttttctaacttgaaaatttaaataaatggtacctgaaatgaactggatccagatttggtttgaactcccatataaacatgaaaagtaacttacatgctataagttttttttattattgtttatagcataagccagttatctaagttaacatgtatgtgtgcttaactttgacttcacaacaaattcaagacacccttaatcaacagttttgttttctaaagtttgggtaaaggtaaattttgctctttgtaaaaagtcacaatgggacttggcttgatggctcagtggatgagactccacctgccactgcaggggacatgggctcgatccctggtctgggaagaccccacatgtctcggacccggtataaggtcacgcgccacaagggctgagcctccgtgccgcagctactgaagctggtgcgccacggcaagaagcccttgtgccgcaatgaaggggagcccctcctcggcacagctcgagaagacccgtgcaaggcagcagaggtctaacacagccaaaaataaacaaacaaaatgatagatttttttcttttcttatgaaatgataaagaagaaaattttaaaagctcaaggcgatgagtgccttaccatgtggtagtactgttgtgttgtaatcacctttacgcatttcaaatcatttactcttcacaacagctctgatggagctttgctgaaaaaaaaaaaaagccaagacccagagaggttgaataactgctcagtcttacaccttggtatgtgtcagggccaggatttgaacatgggcgttccagcttgaaaactcatgcttatcactctaggctattccaaaagaatacaggcattcctagctttttgctgtgtgatacataaattaatcttcatagagtagatactactatttacctattagaatactattttaactagaggttatgttcttccctggggacacttcatcagatagatcataggccaagatggttggatggcatcatcaactcaagggacgtgagtttttgcacactctgggagatagtgaaggacagggaagcctggcatgcgacagcctatggggtcacaaagagttggatacaactgagtgagtgaacaacagcaacatattcctccctgaggacacgtcatcagatagatcataggctaggaaaacagtgtgtcctcttatccaggatacaactctgtacatgtcatcgtttcagctaccaaaaagttatgcttcctgtttaaaatacacaaaaacatgctgtatatggggcttccctggtggctcagaggttaaagcgtctgcctgcaatgcgggagacccgggttcgatccctgggtggggaagatctcctggagaaggaaatggcaccccactccagtactcttgcctggagaattccatggacggaggagcctggtaggctatagtccacggggtcgcaaagagtcggacacgactgagcgacttcactttacttcttcagtgagccctagtatgccataatttatacagaaaagttttaactttgtagttcctcagtctaactttatcatttctttgacttatggaaaactcttacactagctaaagtaagtactttttgattagtgattttgctttgttgcctttgaattaaggaaattttgaagatgatttgaacagcttttttccctctcaaaatttgttcctaagatcaataatcccttctatttctttaaataaaatttcccattataagtagaggaaataaaatatttctttattcttatatcatcctcattgttcgttcggtcagtcatgtcggactctttgcaaccccatggactgcagcacgccaggcttccctgcccttcaccatctcccggagcttgctcaaactcacgtctattgagtcggtgatgccatcca

SEQ ID NO: 34045 - DNA, 2792 bp, Bovine  19866880363941
  misc_feature (1)..(1): n is a, c, g, or t
nacagttagaactggacatggaacaacagattggttccaaataggaaaaggagtacgtcgaggctgtgtattgtcaccctgcttatttaacttatatgcagagtacatcatgagagatgctgggctggaagaagcacaagctggaatcaagattgctgggagaaatatcaataacctcagatatgcagatgacatcacccttatggcagaaaatgaagaggagctaaagagcctcttgatgaaagtgaaagaggagactgaaaaagtcggcttaaagctcaacattcagaaaacaaagatcatggcatctggtcctataacttcatgggaagtagatggggaaatggtggaaacagtgtcagactttatttttttggtctccaaaatcactgcagatggtgattgcagccatgcaattaggagacactccttggaaggaaagttatgaccaacctagatagcatattcaaaagcagagacattactttgccaacaaaggtccatctagtcaagggtatggtttttccagtggtcatgtatagatgcgagacttggactgtgaagaaagctgaccactgaagaattgatgcttttgaactgtagcgttggagaagactcttgagagtcccttggactgcaaggagatccaaccagtccatcctaaaggagatcagtcctgggtgttcattggaaggactgatgctaaagctgaaactcccatagtttggccacctcatgtgaagaactgactcattggaaaagatcctgatgctgggaaagactgaaggtaggaagagaaggggacgacagaggatgagatggttggatagcatcaccaactcaatggacatgggtgtgagtaaactctgggagttggtgatggacagggaggcctggcatgctgtagcccatgggatcgcaaagagtcggacatgactgagtgactgaactgaactgaataagctggtagcttaaaaacaatgacaacaccttttgttgcagaattcagatcctgactctgtaaacatggaaagaatacaatcacagatacaagactacagcctagataagctacatgaataatatgtaaaacaatggaacattaataatcctatttttccctctttcttggcaagagttccccttagaaatgcactgatgtagctataacttcttccaagtgaaagtctcttttgagaaaagcatcagtgtcaaatacagccaagtcacacagtccagtcatgaactgcatataaaaaaggatacattgcaatttgttatctaggaatttccccaatgttttgaattaagcatatggtatagtttagctgtatgtgcaatattatcttcattaaactgttgattacatttgcaaaatgtaaatctataaataatgactgatgatgttaatggaaaatgattttccagtaatcacacaagttcatgaaatgccctgattttattatagcaggtgtttttattagggcaaatgtttgggctccaggctgataggaatgaaacagagccatctaatcagcgtctttaagctaggcgcctaggggactgttcagagttctttcttcctgcacagtgctcacaacctgccctagcagacgatgatggtcacgggtaagtgccgtgacaggaagatttatgcaaagacaaagagctgtaacgtacccactggtatggcgcgtgtgctcaggcatgtccgactctgtgatcccatggactgtagccccccaggctcctttgtccatgggatttttcaggcatgaatactggagtgggttgccatttcctcttccagaggatattcctgactcagggattgatccaggatctcctgcattggcaggtggattctttactaccgagccgctcaggaatgaagagtggaggttgttccggccaagttcgtttgaataatagtagctagaatttagagagcatttattgtgtgcttcacaccagtgcaaatgttttgcgtgtactatctcatttaatcttctacattatgacagacacaaccttggcacagagcagttgagtgacttaccagatcatgtgtttgggccagtgacggaactgggtttggaactcaggaaaactcctgaattccccactcagagccagtatgctaaattgtctcctccatcaaatgtagacatggactcagtatctttttaaatatattacatttccattcattcagcttatttttaaggatccattaacaaacatctctgtttacttcaagtgcctctattaacaaaagaattaataatttttctccatcttcttctcttaaagacttatatacaatggtatacagttgtctctgatgccatttcatttagaacagttcagtcactcagtcatgtccaactctttgagaccccgtgaactgcagcacgccaggcctctctgtccatcaccaactcctggagtccacccaaacccatgtccattgagtcggtgatgccatccaaccatctcatcctctgtcattcccttctcctcctgcccccaatctcaatctttcccagcatcaggatcttttccaatgagtcagctcttcacatcaggtggccaaagtattggggtttcagcttcaacatcagtccttccaatgaacacccaggactgatctcctttaggatggactggttggatctcacagttcaagggactctcaagagagtcccattctcaagactctcaataccacagttcaaaagcatcaattcttcagcattcagctttctttatagtccaactggcacacccat

SEQ ID NO: 34046 - DNA, 1839 bp, Bovine  19866880390357
  misc_feature (1)..(1): n is a, c, g, or t
nttattaccatcatcatcttctccttcttcatcaagcgtgactagtaagtaccaggggctgtactcagcgcttcgcgtattaacccatttaaccctctgaggagcttctatttccccattttaaagatggagaagggagctacagaaggatgagctggttgaatggcatcactgtctcgacatgagcttgagcaaactcaagataatgaaggacagcgaaagcctggtgtgctgcagttcatgaggtcacaaagagtctgacacaatttagtgactgaacaacaagaaggatggaaagacaaggcacagaatgtttaagaaacgtgccacagcttgcaagaggaacaggcagagttcaaacccaggcaggctggctcaggggtccatgtgtgggctctgtgctaggctgcttcctagcacactcccagcagccctaggatgtagacggttgtccctgttttacaactcaggacactggctcagagaggcaaagtgacttgcccagcgtcacacagctgggattcaaacccaggtcaggaacataacccagtattcagaaggcagtcaataatgaatgaatgaatgggtgatgactccataacccaagatttttagcccttgtgattctgaaacgatcattcctccctccagcatgaccctctaagcttcatccctatgtggaaaagcttgaccctggcctttctgtgctgtgtgagctcagactggactggctctcaccctctctgctgatgtagataacatggttttagtccacattaactgtgtgtactatgtgccaagcccagcattaagtgctttgacatataataccctaggaggtaggaacactatgatacttttttccgggtgaggaatggtaggctcagagaggggtagtcacttacttgagatcatagtgaaagtgttagtcgctcagtcatgtctgactctttgccaccccatggactgtagtccaccacgctcctctgtccatgggattctccaggcaagaatactggagtgggttgccatgccctgctccaggggatcttctcaacccagggattgaatccaggtctcccgcattgcaggcagattctttaccgtctgggccaccagctggctcccccacaatcaagtagtgaaccaaagaaataaaatatgtcatttgccttaaataatctgtggatggaaggaaaaattcccttagccacgtgctcattgaatggggaagttagccttatgaccagtatattcccattgccatcaagactcagcctactctgtgtctggagacagaaaagaactgttaacagttgtaggggaagacattttgcacagcatccttgcaaattttctgcatctgattccatgggaatcattttacaactctataggttgtaggtaacatataggttgtagataaccagccagctataggcgatgaaaactaattgtgtgtgttagttgtaccgtcctgtttctttgccaccccatagcctgccaggctcctcggtccaatggaattctccaggcaagaatactgagagtgggttgccatttccatctccagaggatcttccagatccggggattgaactagagtctcctgcattgcagggagattctttaccatctgagccacacatgcaaatgaattctatccagtggagctgcaccctcaccgccaccaccatagaaagaagttttgcctccacttacacgtgtcatattccggatgtgttccttggattgtcctttgaactggtattaacgcttcaccagttttctcattaagagttaaataagatatttaacatgtattcatttttatatatg

SEQ ID NO: 34047 - DNA, 1501 bp, Bovine  19866880667057
  misc_feature (1)..(1): n is a, c, g, or t
ntatgaataaaatgtattattccatgtgtttaaaatataatcacatcttaccttttattgaattcagctttttttaaatgcactatctttttcatttatttgttctagtaacatgaatttcttgaataaatcatttgagtaggcaagtatgaaaataaattcatcaaagtaataattgtcctccatccaagatttattgttaaagaataaccatatttttgaaaaagaataaacgtgctttaaacattggctagtatttgtctgtctctaaatattcttaattatagaaaaacctattttaaacctgaatttatatttaaaatttatgtctctatgtagtatataacatgggattttatttttcaaaaattcacataaaatctttgagatttttaggtttattaatctggcctcttataaacttactactcagtgagttggatatcttctcatttcctgcttatatttaaattacaaaatgatcctaagattttattcaaaataaaagagctttagaaacagagtttttcaaaataaccaagcaagaaattaagagttgtcaagtgggtacaagtgagttattctaatgaagttttgtgaaagttgaaaagttgcagactttagtaccttttcagcgttggacattagaatcccacagaggtgccccaggccagaggttcagtttatttcttctctgtcacttccagtgatcagattaaatcacttagtagtggaaaatattttactgtagaacatcattatgaaatttcaaagtaatgcagtgatccaagactcgagaaattcagattttattcacattgtcgatagttttttgtctgtgtgttttgcttatatagtttattttctatatattgtaatgcctttcctgtctgtaacaggcagattataggattgtttgttttaatatgtattctccaccttggagccaccataacttttttttttttttttaatttctttctgagtgatttgaaacatagcatgcaattacacgtgcaccagttttctaacaaaggacaacactgtaattgtagaaaagttctccttgcaccgtcttgtggcttccactctaaattatgagtaatggaggcagatggtggatgttttaccttaatttagcatgacagtatgttagtgctaaaaattcatataccttaaatctgcagcccagctaaagctatacttttactctctcaaccttttctttcatttggacaatgtattttagagatattgagcgtgaaaatgggaccttggggtaccttgaatatatggctttgaaaacagttcattttatggagatcctgatgggtatagtgttctccttgttggaagataatatctttatgccttcagtttcctcatctataaagtagaaatgctttatacctactctgcttctttcagtgctattataaaaaaatcagatgtgaaagatcaatgtaaagccctatataaatataaaacatcagtgttaaca

SEQ ID NO: 34048 - DNA, 1604 bp, Bovine  19866880709254
  misc_feature (1)..(1): n is a, c, g, or t
ntacttgcttaataatgggtttttttcattcggttagaggagaagaagttatttcctaacaaaatgatttttttccgctacccataaagcttggaatccatgaggactccactaaccggcgacgcctttctgagctgctgcgctatcacacgtcccagtctggagacgagatgacttctctctcagaatatgtgtctcgcatgaaggagacgcagaagtccatctattacatcactggtgcgttggaacctgggtctgatcaaagcctttttttagaggtgtggggagaacactcaagggtcctggggaactggcaggatgaggcattttggccctggagtcacactgagtaatcctacaggtgagagcaaagagcaggttgccaactcggcatttgtggagcgcgtgcggaagcggggctttgaggtggtgtacatgacagagcccatcgatgagtactgtgtacagcagctcaaggagtttgatgggaagagtctagtctctgtgaccaaggagggcctggagctgcccgaggatgaggaggagaagaagaagatggaggagagcaaggcaaagtttgagaacctctgcaaactcatgaaggagatcctggataagaaggtggagaaggtaagccattatgaaactaagttaccttgttagagatgccttcagagtggtttccttccatctttggctgctacagttagtggtttaggcagcctaatttgtttagtgccctcctactttttattccaaggttggtatttctatagagcttagcaaagatgaggcatcttttctccaaaaagtggacagaagcatctttgccttgaggtggtaattggaaatataatgagtttttctgactgccctcaggtgacgatctccaacaggcttgtgtcgtcaccctgctgcatcgtgaccagcacctacggctggaccgccaacatggagcgcatcatgaaagcccaggcgcttcgggacaactcgaccatgggctacatgatggccaaaaagcacctggagatcaaccctgaccaccccatcgtggagaccctgcggcagaaggcagaggcggacaaaaacgacaaggccgtcaaggacctggtggtgctgctgttcgaaactgcactgctctcctctggcttctcgcttgaggatccccagacccactccaaccgcatctaccgcatgataaagctcggcctgggtgagtgcccttgtgctctcaagcagcaaggtgtgtcgggcgcgtttgaacgcttttggggcatatctcaagtggtttctttcctgctcttaggcattgatgaagatgaggtgacggcagaggagcccagtgctgctgttcctgatgagattcccccccttgagggtgacgaggacgcctctcgcatggaagaagtagattaggagtttctacctgcagactgctccctctgtatagtgtccccatggctcctgcagcagcagccccagtggccctggcccacatggtttcctctgctgatgtctagtggttttatttctgtccttctaaggcaggatacatggacctcaagccctctctctctccacgtttgacatggggtttgaatgtt

SEQ ID NO: 34049 - DNA, 1832 bp, Bovine  19866880714305
  misc_feature (1)..(1): n is a, c, g, or t
nacttcactttcacttttcactttcatgcattggagaaggaaatggcaccccactccagtgttcttgcctggagaatcccaggaatggcggagcctggtgggctgccatctatggggtcgcacagagtcggacacgactgaagcgacttagcagcagtagcagcagcaacatactatagtatttaagggttaaataagacatgacatcatggaattgcttcaaaataattgagtgttatggtggtggagtgaatgtaggttacagattgcactgttcaatactatagccactagccatatgtgggtaattaaaattaattaaaatttaaaatttgaaatgacagttcctcagtcatattagcatattttcacattagtagtaggaaatctctttcgtgcataagttcttttggctagagcaggtgtagatgaaacaaggttgacccttgtgttgataagttttgaagctgagtgatgagagattcattttattattctctccacatttgtatacatttgaaattttccatgaaatgaggaaacaaagaaaaaccatgcatgacctttgtggagaaaattacaaaagatctaaaagaagaactgaagatatacttttcatgaatggagaggctccatatgatatcagttcagttcagttgctcggtcgtgtccgactctttgcgaccccatggactgcaggacaccaggcctccctgtccatcaccaactcccggagttcactcaaactctaatcctaaccttggatgctttgtataggcattgagagttgtgaaccaatgccctggagcaaaggtcagctgacttttcctataaattgatagataagtaaatattttcagctttatggggaatagcagcccagtccaatattcttgcctggagaatttcatggacagaggagcctggagatactgagtgactaacacacttgtttcaactgctcttctgcaattatagcacaggagcagcagcgatgataaataaacaaatgggctaggctagacagatctggcccaggagtttgcagatctctgatagattcaagattctagaccagtgggttttcctttatgaaatcagttttattcagattttctggtaactgaagaaaatctgtaaatataagaggacttcctggatatacgttaaatgaattaatagatgtaaaaccttttataatatttaaagccttttctatattactattaaggagagtgtgattattttgtttgcaatgattcgatgttatctgcttctactattaggttcctgtggctagagcaagtattctttggctaattggagaaaactgtgaacgagttcctaaaattgcccctgatgttttgaggaagacggctaaaagcttcaccagcgaagatgatcttgtgaaactgcagattttaaatcttggagcaaaattgtatttaaccaactccaaacaggtaagagactaatccttagtctacctttgtggaatctactttcttctttgctctgatcaagcagctctgtccatttatacattagtctgtccattcaacaattacccagtgcctgtttctttaaggttttactttagatggtagtggtgtaaagagatgatgtcctggtctagttgaggagaaaaacataaaaaaatgaaatagtacatgataagtactataatagtgtattgtgacacagtggaattccagaggagaaagttattgaaagtctgaaataggaggaggagagaggtcagacagagtttcataaaggataagattcctgactaagggcttttaaagagtggtttactatatagaataagg

SEQ ID NO: 34050 - DNA, 2289 bp, Bovine  19866880736446
  misc_feature (1)..(1): n is a, c, g, or t
natttaaaaaagaaaatttaatccatccatgatctcattgacagtaccaagtaaaattgaaaatcactttaaattaatgtcagctcagcagcttcatctccaggctgttgggttggagtgctgaatttttaaatatcatttgaatcatttcatatgatcgtaacaaaacaagacattttattagatcattaataagaatacttaccagaagtaagtgcccctggatggatgtaaatcagccttctggggccatttataactgatgagagaattgcactgcttgactttaataattcacccaggaacagagaataaacagcagcaaacattaattttattggacagtttcatatggtttatgttttgaaataaaagggatatgacttgactcctgcctgaaaccaaagcacttagaaaggactccctcgtgctgttggcatctccatgtggggaacttgttctcagatgcctttgttaatcagttgggcacccttcttgccataaataagaagccaaaatataaacactttaagtagtgactacagctttgtgttctatcatgtcctttggcatatggctatgaaatcctttctaaccaatcatcttacttgtctacaacagaagccacagtatctgagaaaggaaggagcctgtatatgactgtgatttttccaaaccaagtacgggttctttaactgctggctccatgtctgcagctaagggtagagagggcctcgttttcagctggcagcccaaagactggagtggaggctgctctgctgtgattccaagaatgagaggcactctggacctggaaatgaaagggcagaggaagtaataacgcttcgagaacagggtgccagtcgagcccacgccctttgaccatggcccttggacaaatgtgctcagatatgaccttctcttctgcctctgcactcggcagctcttataactgacagggtatctccctttcccatccatctgtaggacttgggagagccacatgcttcagggggagaaggtgatacaaggtggtcatgcacttcaaaggcttgactctggggactgatggtggtcatctgcagatcctccccagctctgcccctgactctctgaagctagagcagccaaggatgccgagtgtgctcacataccattagccaagagcctaggccagagtccgtggcccccggcttcctgtctatagtgtttttgtccccacctatgactttaccatttgacaagcttcagtctacagtcactgatattaaaaggtgatttttttgtgtgtggctgtgtggagacagctctccaagagcagaaaaatgaatgttgaccaaatatgataatagtaataattcctaccacctattgaatatttaaaattataccttgctttacatgcacatatttttaatcctataacaccctttgaggtagatcctttgaacactctcacttcattgctgaaagacacagagctacaggtacagacagggtgatagtattgaaagagatcttttgtgccctttttatatctgtttgtatcctttatgctatagacctcttcttacacggagaaaattggtgtttgatggtgaaactacttacccccaggccaggtgggccctaaggaagatctaaatggggaaaggagtgccctcgctgacctcataggtggccacgctgatgtgggctttgggggtggggaggccggatcccgctccaggaagtctactgcacctgccctgcgtactttccttttgccaaccactgtttaagcttatgatttgcgtagttgccttcacaacaagcctatgtggtaggttctattagtaccctcgctttacagacccaggaactgagatacagcaccacctctgggcccaaggtcactgcccagcaagtgctagaactgggagtcaagtccagacagtctggctccagacggaataatcgttccccgaggtggctttctggatgagctcattggctggaagggtggggcagtgggtttggtagcagtcttgggagagtgactgttgagtccacgctcatcctgtacgtgagcctgagagacctccccccaggtcctgcccacgttttctgcggggacccagagtggtcagccaccctgctcgtgcaggcctggcactttctctgccctgtctgggtgtcatctcacaaggccggaggtcatcagagccgtgggaaacgtttgctgtgaggaagcctgttagctccaaacacttcagagaaacgtgtcagcacccaggggtgctccttttt

SEQ ID NO: 34051 - DNA, 749 bp, Bovine  19866880748189
  misc_feature (1)..(1): n is a, c, g, or t
ncgttgaggcatgtgtcagagacttctgtgatgctggttgcacatctgcctatagtttgaatagtggctgctgcaaactgtttatcctggcttttcacataggtctaaaaaacattgtctcaattagtttacacactggtactatcaagcaaagaaaaatatccctataataagaagctttgtcacaatcaaattctagaatacacaatcttctcatctataggaacaaaagaaagtccaccttttgacttaattcagttctgttttttcacttaaagaatgtgactgtagtacaggcacattttcaagtcaggttcattcacctgtggccacagtagcttataactccaaaacaggtagtgggggagcagtcacccaagatagcaattagtttaagtgcaaggttgaaagaaatgatgagacctctctttttgaaggtttcagttcatttaaccagcagcatctatgaatctatgaaaaaagggtggccttttcagagatactaaacctaaatattgagagaagtggagaaaaaggagcaatacgctaccgataaacattttactttaaaaaaggttatctgaatggtggtaaaactacaacagccacagtgagaagcatttcaataaagactttataaatatacctaatttgcaataaaataaaacatcacacttttgaaaaagattttcttgaaaaaaatgttttaaaaatacaatgtaaaccacatatttatacaaacttaagaa

SEQ ID NO: 34052 - DNA, 1403 bp, Bovine  19866880796262
  misc_feature (1)..(1): n is a, c, g, or t
ngagcagggatccctgggggctgccttcggggctgccctctccagccctgttctctctttctcattgccacttcaggttgtggtgtgcttataaaaaggactggtgattgcatccctcttttctctgtgtcgccaagagtggggaatggccttgcatcatgtcagcgtgtcaggctggatgttctgcttgtacagatgggggacccagaagccttggtgggactggcaaagcctccctcacaagaggccaactactgaatgggaggtggtaagtttaggaaaaggttgtttctgaatgcgtttggctagaggagagccatttttcaaattatgacttaacaccccgatctgtcccttgatgcggctaagtcatctaccatcttataaagatgcctgtagttgcctcgaaggcacaggactgaagagctgacttgcagagttcggtttcttgtgccatctcagggctcagcctttcccatgtggtcacagaggccagactggccttggtacctttcccaccttccctttcagaccttgcaagcccttcctggctctgtgactcagcatagtcactctagtccccagtcatccttgtctcctatgagttctctaccagctccagtccgtccttgtcaccatcttggctgagaagcacttaagttacaacaattcatgggggcaggcagaggcgcttgcttagcccagggtttggtctttaagctccatagttataaggtgccatagggaacaacagttgttataacacaatggtgactaatgaacttacccaccactcttaaaaggtgtcatgcaaatacctcaaccctaattaaaccagcctgcttacgatgcaaccgccgcctcctcttagtcagtaatcctccagctgatttccagtgtgctaaaaatgccaaataagatgcagatcaaattcactttcataaagttggagggtaaatccactaacaaaggagctggcagaactggagcccattaacagcggagggaaaattgacaaggatactgacatagactcttcaaaagaagatgatttgaatatcaaagatgggagaaaggccctagcaaactgatgaaactctgaaatatttttgcaaaaatattcctctttatcttcctgtcattgaatttaaaatggaagacatactgcattatataattttatcaaacagttcatgcccaagaaacacaactcactcttttggttagtctaagaattagtgcacaattacacaagtatattttatgaaatagatcacatttttgtaatttttggttttgttcaaagatgaagttctaatcaaacctatttcctttactatttactgtgacattttagataagggtggtgagagcaatgatatgaggtgaaaggcagaaaagaa

SEQ ID NO: 34053 - DNA, 1649 bp, Bovine  19866880805825
  misc_feature (1)..(1): n is a, c, g, or t
ntctgccttcccacccccctttatttttaactcatgctgttttattgttataggcaatttgtaccactcagcatgacagtgtaaactgaatcaagattaatttacatgcaaaagaacacttaggagagcagcatggtaagcaaatgtattgtctcgattgctgaggtggaaaaagaacctggaaagaaaaaaaggtgctctaattaaggggcatcaaatatgattgcttgtggtggttaagggccagaaaatagtaaatgtctgaccatttaaagaattagcatcttgctagctaggaacccataagatggaggcataaatcataataaaattaagtaaccattcgaggtttcttaaaccagagatttttttcctaaatgaaaatatatcaggtattcttaaattaacgaaaaagaaaaatatgccaagatatcattaaaagtttcttctacaaaaacattctttaaccactatacagcctgctcatacctaatgaaggtcgtcaggtaataggaagaatattttaaaattctcaagactgcagaatatgctgcctcattaaaatttacattttggtgaggcagtggacagcacttaggttaatcagctgtaacggactgctgaaatgtaaataaaataagaaaagaagatctaaaaaattttctgaatgttttagatttccaatttaattcttaagaagaaagcaaataagaagggaaatttggaataaccactttccttgggtctcatacaattaaaactgcttcaagaaacgaaattacatgtttaaaaataaaacatctcactttatagtactgaaatcatcccacagctagatcatgaactaattctgcaaggatcaaaattcataataatgaaacaaacacaccttctggttaaggctcataatatgaatactctggataacttcaaaatatagactaaaccgatcttttgtttagtacttggaccaccaaccttacagaaatgcacgtttggtcatggaactgtaaacgcaacaactgagctaagggacagatcatgctatataccagaaacaaaacgtttcgctttaaaaaatattaatctgatacgtacaacctgacagaagtattcttaattaacattatacacatttttcaaatatgcacatctgtagtataaaaatagaaccatattcctttttctggtttataatttcttcagttaaatcctagttaatacagttaatacatttcttgagtcttgaaatctatgccctgtgaaatgagatattaagtgtataaattcattttatttaaagtagaaaaaccagttaaagctagcatgtaatgacacacatagacatttcttaaatttaccggcattgataaaaatctgaggaaactgatttttattctgatttagaatttccagttaatgagtcatttctaggtatcttctgcaaaataagctaagctcttcctagagtgatgtaagaaacaaatacatgtgtaaagttgagaattgagacctctattaccaaagcagctgaaatctagaactaaaacgatgctattgaaaagactctttaaacctgtggtaaatttgccagcatcaagtcccatatcaaagaatgaattcaggaagacagaaagaatgatacagaa

SEQ ID NO: 34054 - DNA, 934 bp, Bovine  19866880847643
  misc_feature (1)..(1): n is a, c, g, or t
ngaaacgataacgttggttgtctcttgataggcggttgaccctgggacagggagaggaggaaaactaactttcacaatatatccttcacatctaaattttaaactctgagcatgtattatctgttcctagtaatattattattaacaatttggtagtaacataatttatatttaaacaaaaagtaaaatgccttttaagttaggacagagtgccaagaataaatatgccccatgaacagggctgtaaagcccacaggccgtgcactgaggaaatcacgtagatgcttttgctgtacttctttatttctctggttttcagagtcttgggttcttgtcatggttctaatgggctaaaagctacgctcagaagtcatgaagtctctgttcaacgcttgtctcaacctgtttggtttcagggcctctgaatatgataaatattgcgtctaaaggctgaacagttttaaacatgtttctctaaaggtttaaccgttggggtagacataagaatggcaagaggcctttcttcagagagaaaaactgaagtttactaaccaagtgtggtaaaatgtggtaggtgttactcattgcccattactaccttgaatagttcagaaggagatagacttaaaaatcggaaagaatagacaaactttgtcattttagatgtttagctattaaactattttcaaaatatatttagttttgagaattgatttgggatgggatttgtttctaccatatctaagtgagggcgtcaagtgaagtgaaagtcgctcagtcatgtccaatgtttctaatgggctaaaagctacgctcagaagtcatgaagtctctgttcaacgcttgtttcaacatgtttggtttcagtgcctctgaatatgataaatattgcgtctaaaggctgaacagttttaaacatgtttctctaaaggtt

SEQ ID NO: 34055 - DNA, 3335 bp, Bovine  19866880889545
  misc_feature (1)..(1): n is a, c, g, or t
ntctgtattttcctcttctgccttgctctctcctcagaacgaagattaaatccctgatcatcactgcagtttcattagcccctgtttatgaggcctcaaccgtagggtcttcaagagaggaccgggttcttcctgaagttgggctgggttccacggatgcttggatccatgtttttgggtcctttctggatcccagttgtacctagcaagcagcccggctcaccttgaatcacaagggcatgcattttctgtagtctaaacatgttaatgattaaacacacaggattagatattgtttggtgagtgtgcagcccatttgaggatttttaccagttaacaagcacaagagaactatatatcagactctttggaggaatgagtgcttgggagacagccctcctgagccccgggttgccccaggaggagcgggctctgtgttcggacaggacctgtggtggggcggaatcagccttgagtcaggcaggcctgggctccaggccccacctcccactgccaggatccatgaccccaggcacgttaccgatctcaccaggccttagcttccttatctgtgaaatggagataatcatatgctcactggggtagaattgttttaataataaaggaggtagctttctgtaggcagatctggaacccagtaagcagcggttatcgccactgttgctaatacaacaggaacaagtttgactttaagggaatccaagaactctggaagtttctcccaggttgttggcctcctgtgcacttgtgtagctggcgttttaaggccctttccactcacctctgagtttcctggcgctccttgtcttgcttgtccagcttctgtaaaccggcctctcccagggcctcctttgctttaaggatcaaaggagttctagagaattttgacatgaggtaaaattaatggtcatttaaaagctgagttcatcctatggtcggatttgttatggggtgtgtgttcctcgggcctgagacccttgctcagtggcaatgtgtgggacagctaagggtctccctccaggaggggaaatcttcattggaaacgggttgcagaatgtgaaagtttataaaaagtgtttatgtttgtcctgggagaagggtaacacatcacaggccattaacaggcctggctcacactgcagtgtgcaccaacccagcaatgtaatttatttcactgagggaattgtggtttttcgtgccctggataggtgtcactgaaaccttgttttaagaggaaaatagcaattaatgttagaaacaagaactactagccttacaaatttgtggtggaagagacccaataaaaatgactatcagaagtttcccaaaggtgaacatcagcgtttataaacagtgttttctccctggtaaactgacagctcttgctttgtaagtataaaccaaagtaggactgccccaaacagagcagggcatgtgcgaatgttcctgcagggaagaaagtcggcccaggctgtgggccgggcaggcaggcatctgtgttggcttagggacaggtggcagagggccggctgtgtttggtcagattaggccacgtctgtgtcatcgctgctattgttcccctgctgggagatgacagatgggagaggccgtcctgaaagagcggctgttaatctataactcggggtttgcttgtacccatgcataaacatttcagctcattattttcagaaacaaaagaccagagcatatgggagccctttggttctgattcatttaaagtttgttttttggtttgtctgtctgtagtgttgctgatgtaactgggtgatctaaattaaaagtgactcttaaaaattaagtgaaaaaatgatttcaagatgagaactatgattttccgactttgaagagaactctttccttaaaatgacactttccagtggagcatggcatctgtgcatttagctgatagaaattcaagcttcccatgcacagtgcaaaaataggggagagagaagtgacgatgaaaatgctgcagaactgctaacagtctgctctgttagagtgggtgctttagagcagtggtccccagcctccgggatctaagacctgatgatctgaggtggagctgatttaataataatagagatgagctgcacaataaatgcagtgcacttgagtcatccctagaccatcacccctgcccaccgccagtccagggaaaaaattgtcttccacgaaactggtccctggtgccgagaagactggggattgctgctttatatgtagcaggatttctcagccttgcctccgcgggcacctttgtgctgagtcatttcttggttgtgaggctgtcctgtgtgttgcaggctgttcagcaccatcccgggtttctgccgactagaggctatcagaactcacttcctctggttgtaaagatccaaaccatctccagacatggccccttgtcctctgtgagccgggggcaggaagcaggcaaaggctagatccttttggctgacagtcgatgccttggagtgagagtgttagagattcttttccctctgttgttaccgaagtgatctgggttccaggtcctctgatgcatcatctcgccttactgggtatgattgggttaaaagaaaataaaaagtgaggcctaatgagtgtaaattgcaaagggtaacttggagaaactgagtttacagcattagcgattatgtctcaagggagagcgacctcagtgaaatctcctagaagtttctgaagtccaaaaccttataaagaaaagcgattggtccttttacagaaatccttgccttgtcagttcagaactgacactatttcttggtaatagtgggggctcgtggccaatttctaaccccaggtctgttgattgcatctgggtaatgtcactgggctgtttccctgctgtttttgaccaattttctgaaaagcagtcattctggttcctttttctcaggctcaacatccccaaacaggcagttctgaaaggatatgttcaaggctcagtgccaaccacctttgtgagaatctttgaattatttttttatacaagttctgccttgttggtgggaacactgctattcaagtcctgagctggcatgtaaggggtctgccctgtgcagaatggcaggtgccccagaggacagtcccggctaaacccagccttccagccacccccactgacatgtgaatgaagccatatgggaccctccagactagcacatccacccactgcctaaggaccccgttgccatgtggaatagaagcatcacatcagctactccttccccagattccggtacacaaaatgtagacactatcaaagtcgt

SEQ ID NO: 34056 - DNA, 1789 bp, Bovine  19866880913739
  misc_feature (1)..(1): n is a, c, g, or t
naggactgatgctgaagctccatactttggcccctgatacgaagaactgactctttggaaaagactccaataatgggaaaaatcgagggcaggaggacaagggggcaacagaggatgagatggttggatggcatcaccgtccacggtatcacaatgggcatgagtttgagtaaactctgggaggtagtgaaggacagggaagccaggctgcaaagagtcggacacgactgagtgactgaacaacaactacacaggcaaggctatacgtcagttcaccaaatgtgattcttctggacagggaattctcaacaccaccctagttatcaaaacccagagcttctaggacatggcagatgctttgttattactttcgccaagccaccaaattgaccttgcttcttttaaaattagtagatctctcctggattcaacatttgcctcttacagacaccagctttttctacctcagttttttcatcatggcctttgtggtaggttgacgctataaaacatatgcctggcatgtgagacacaaaattcttttttggaaaactttttgtatggacctgaagagactgtttcattgtttaatccatttttgacttcctgcaagtttaaatgtggaatcaagtggaaaatgacttcaaaacagataagagattacatgaatctttccatactccatgtagtcataaagatatattaaccctatcagatatgaaataccatgctcgtgatttattttttattttctgatttgtgtatggtaaaattcacttatttggtgtgtagtgctattcattttgacaagtgaagtcatatatgcagcaccacaattaaatgtgaaaattaataaagggaagactcactaaaatggagttggaaccagaaggggaagttctcacacagtaccacttccgggtcaattacaggaagaactgtcaattacagaccacaatagaataatcaccagcaggaaacaaccatcaaagacagaccttaagaggaaaagatgtacactgtatctcttacaagaaatcaatgatcgcaacaactcagccaatgaaagaccacaaacatcttaaactctcccttttctccagcagactttcattcaaaacaacccttcccaacttctttgtctttataaaataatgttcctctcctttgttggatgtgtctattcttttgctatagcttgcttgtcttgaatttgcagttctttgctattctggagtaactcattttttgctggtaaaagaacttttaaggtcaacacagatacagaaaactccatcaacccagaatccctccctagtgctgtctctccagagtcaaaccctccaccccactcttaatccctgacaaccactgactgcttctccatcttcaaagctctgcttttctagaatgtcatataggaagaatcatacagtgtgtaaccttttgtaactttttgcagctacccgggagatagtaaaggatggggaagcctgttgtgctgtagtccatggggttgcagagagtctgacacaactcagggactgaacacagataacgtaaccttttgagtctggcttcttgcagaagtacaatgcattcaagactcatgcatgttagtgcatgtataatggttcattatattgctaagtaatagtcaactgtaccgatgtcctataattttgtgtatctctttactagttgaaggacatttgagttttttccagtttctagcaattaacaataaagctgctattaatatgtgggtataggtttttgtataaacatg

SEQ ID NO: 34057 - DNA, 1382 bp, Bovine  19866880981234
  misc_feature (1)..(1): n is a, c, g, or t
naactgcagatgagggacaacgtttcactgctgcacgacactggccaagacttcttttctttttgacgtgtgtgcatacacactggctttatccggacttaggaatccagcgaggccccgcggaggaacatatgtttttgacattggcttctactactctgcaggctgcttgtctttttattttaactctttgggggcctctggctagaccttgaatttcctggtgcagtatgacagaggagagagggcttgagggagttaaagctatgtgctgcccttgaaagaacttgcaaaagctttctatcttaaaacaaacaaacaaaaaaacctcacttggatcaagcttttgacaaaaagtccaccagttaggtgaacagcatggtcccgaaggcagcgacatttggtgccaagaatactggactggaagactcctaaggctggcagtcagcaggcttctgggtccaagattccgcactgaggaccagacgcccttctcctcttattcttcttctaatacacgatattagcttctgcttacaccttcttccagagagcattcaacttagtaaaaatattcctctgacaagaacaacctttgggtaaaatgggaggcagtttcatttatttgagggtaactaaaaaaaaaaaaaaaatcatccttgtctatgttctaaaggaagaagaatgccatttagaagattcagttaaaaaaaaaaaaaaaatacgacttccctagtggtccaagggttgggggttctcctgtcaatgcaagggacatgggttcgatccctggtccaggaacattccacatgccatggggcaactaaatttgtgtgccacaactaccgagcccatgcgctgcaactactgaagcctgaatgtcgagagcccaagctccccagcaggagaaaccaccacaatgagaagccggttcactgcagccagagttcagttcagctcagttcagtcgctcagtcgtgtccaactctttgcgactccatgaattgcagcatgccaggcctccctgtccatcaccatctcccggagttcactcagactcacgtccatcaagtcggtgatgtcatccagccacctcatcctctgttgtccccttctcctcctgcccccaatccctcccagcatcacagtcttttccaatgagtcacctcttcacatgaagtggccaaagtactggactttcagctttagcatcattccttccaaagaacacccagggctgatctcctttagaatggactggttggatttccttgcagtccaagggactctcaagagtcttctccaacactacagttcaaaagcatccattctttggcgctcagctttcttaactgtccaactctcacatccatacataacta

SEQ ID NO: 34058 - DNA, 2564 bp, Bovine  19866880990244
  misc_feature (1)..(1): n is a, c, g, or t
ngatttcctttaggattgacaggtttgatctccttgcagtccaagggactctcaagagtcttctccagcaccacagttcgaaagcatcaattctttggtgctcagccttctttatggtccaactttcacatccatacatgacttctggaaaaaaaccatagctttaactatacggacctttgttggcgaagtgtacaagagatcatttagggtttagcttttgttgaaggaggacatagacacagcccctcacttacctgcttgacagctgttggtgggtcccagctgccaacagccacgtacagactccttagcctgcctcctgcagcctctgtcatttccctcagcaccactgcagcatcctctgccatctttctttgcttctctgacccttcttgagggcccaggtcacattctcctgctccatgaagccctccccgaccctccggacttgagtcccttgagtttttcttgagcatattaagacactgagatcttgcttcttcctcctgcagttatttctgtttatggtttcccaatccagagccatacattccatggagggcaagatttcatcatatagctctcttgaggccctttgtataaggagatgtacacatccccaaagaaggcatgctgataagttaggcatttaggttggttatcatctgctcatttaatcagaagacatctagcaagagcagtaataccatacattatttcaaagcactttcatgtctttctgggcatatttgggaagtagcaacacaggacggctttctgtcattcaacctgaaatgatatattgagcaggaaaaaaaaaaaaagttaggtggaatgcatgaggccaaccagctgtcagtgagatttcccatcatcacatggagtaccagcagctagaaggcaccctggcagtcagttcagctacccactttataatccagatggagaaactgaggcagcaggtcacacacatgtaataaatgtgtctgcaggtccaggcttcatgtataagatacaatctactgacctcagaggtctctgttttctgttctgcatgattttgtgaaaaaagtacaatcacctcactcaaatacccagcatgttgatggaggattatacatttaaatgaggctggggaagcagatctacttgtgacactaaccttgctgtttcacatgtaacctgattctgtggatgatggcagcttctctttgcaaggcttgttaagaaactgtgtttgtgcctcgtggtaattatctctggggagggtggtggaacaagggagcggggtgtggctaaggcagagtagcctactggacatgtagagtcccagagtatcagaaagacctggatttgagttccagctttgacttatttcttgtgagctggtagataagttctctgtgtcctctgttccatcacctataaattgaggacagttacagctgtcgcctgtaatatgttcaaaaaatatatactgactgttgggattggaggtgtagtgtccctactttttatgttctatatttctgcagtttcaatttttagtaatgagcacacattgtttccttaaccaggaataaagccataaaaattattttttaaaaccagcttagaggattcttgtgagattgtaatatctggaaaactgctgggttcttagcgagtggaagtggaggctgtaccagagttcttggtccctatgcccacctgtcctgggtcagagaagctgctgctgctgctgctgctaagtcacttcagtcatgtccaactctgtgcgaccccataggtggcagcccaccaggctcccccgtccctgggattctccaggcaagaacactggagtggcttgccatttccttctccaatgcatgaaagtgaaaagtccaagtgaagtcgctcagtcgtgtccgactcttagtgacctcatggactgcagcctaccaggctcctccatccatggaattttccagcaagagtactggagtggggtgccattgccttctccgacagaagctagcatgtgacagcatttttcctcagctgttagtcctgataccctgaccgtctgagttgccattctttttctatatcaaatatgagagctcattttacagcttgtcacagaattagcagaattttgtgtcttctcttgctgccaatgtttgtctgcagagggctgtcaaattttccttggtgtgggctggtatgagccctcaatcacagaacctaaatactgataactcttctcctttttaattttcaaaggcttttagtctttctccttgactttggggagtactaaagtgtgtttggaaatgtggcctttctgatgctgaaggccgtcccacaagcctcgtttcccgcccaccccacttcacacagggcatctcaagtaacatacatcaaaccttcgctgttaacacttggtgctggcgtactggctttcatcctgagaaaataaataaaccaaaccaaacccacagcactttaaaaacactaattaatcctcaccacaggcctagactacacagaaatggcaaatcccactgccccaattt

SEQ ID NO: 34059 - DNA, 1861 bp, Bovine  19866881141863
  misc_feature (1)..(1): n is a, c, g, or t
ngagttctgggatcccttctatagcaccctgtacttacctctactatgatattttcacacccaataatactggctgcctcctcagcaagactctgagctcctgaggacagaggctgtgtgccacagtttgcacagtcttagtaagtatttgacgggtttgaaccacggctctgccaccaactggttctaaaataaacaagttgcctaatctagaagtgcttcagttttatcatctctaaaatgaagaaaacatccaccttttaaatttgttataatattagatgagccaaagaacatttgatacctcaataaatgttaggcctcttccaatcttgttgaatggaatctaatcaaatcttttatggaaaaccaactttagatcaaaccctttcagtttttgaagaccctagctttatttctttgtattttctttaaaaatcatttactttgcatttaggcttgagtgctccacttaaaacaccaaataggcaattgttcttcactatagtctagagagatgagctgttatgaaaccttggtattctaattgttgctaatgcggttaagcatgaaagtacctctgcttaactgcggagtacagcactttgctgtacacctgaaactaacacaccggtgttaatcaactatgctccaatttttaaaaaagtacatttgacaaagccacaagctcatgtccctgttttcctgtgaatcaaaagactcaaagactgaaaagtacaattttctttaatattgaatctattaaaagtcattaaacacacacaatgaatgctattttcattttgaaacatctagtttggatcagatgctaattaacctaattattggcctggctcatgagtcatattttaattattttctccaggttttaatgtatccacacttttcttctggttaatagattcccttttctagttgtatcagactttatcaagaaggaatgcttaattgattagcagttttggttagaaaaatgctagatgaattttttgttttaaatatgccaagagtaaagaataaaaaactatatgaatatgagaatattcatttctagccaataataacagactggaattgctacactcatagtttaatattttgctaataaagagataggaaaactgtggttattataaacttacatggagtgttataaaattctgccaagaggaaaaggaatcaacaatgggaagcctggttttgaggtttggtgttaactcactttgtcactttgggcaataaccttaactttgggtctcaattttcttatataaaaaatgaccttgcactaagttttctgcctgcttaaatcctgtatggttctaattgtgtgacaatgaaatgaatgatggtataatttgttttgatggggtggtgggctggtcagatccattccctcaatggaacaaacccagtatgtgattttatcagtttaactgttaagacaaacatagatgcacatggtatttgacaaatgaccagagaaagctagttcgttataaggaccataggttagtcataattaattaacctcttccaacaacacaagagaagaatctacacatggtacatcaccagatggtcaacaccgaaatcagattgattatattctttgcagcaaagatggagaagctctatacagtcagcaaaaataagactgggagttgactgtagctcagatcacgaacaccttattgtcaaattcagatttaaattgaagaaagtatggaaaaccatagaccattcaggtatgacctaaatcaaatcccttacaattatacaatgggaagtgagaaatagatttaagggactagatctgatagacagagtgcctgatgaa

SEQ ID NO: 34060 - DNA, 900 bp, Bovine  19866881166524
  misc_feature (1)..(1): n is a, c, g, or t
ngtttccttttgaacttgaacaatcttggggttacattttgaaaattggtgtaaccttggaaagccgagttaagtgatcacgcagttggtatgaaacacttaattaccttttgcagcaattttgctgagagtgaaaattaaatccttcaacactttgccattatgtaactaagacaattgatttttctaaataatgttatattaaaaagattatgatccaaatattagagtcaggggctgtgaaggaagacggtcataaggtatttaagtgttagcactttttaagatctcccattatcaacaatattatcatgtgttaaaatgtcattaaaattttgagtaattggggctaataccttggattgtctgagtctgttttccccactgctgtcagagagtggcctctgcagacacgatggccctttccctgggagcctgctgcccgctcagttgatgagcttgtagcccagctcagtcgtggctgacagcactgattggggcgcagtacgctctctgctccttttattacagacagtaattaaagcagctcgccctgccacttccataacaaacacagcataatgccctaattatgactttattaatttaagtcaggatttaatgattttaaaagtgatttatattgtttttcctgttcagaacaaatgaaatctgtaggttaaattaatacaggcttttcatcatgcaaagttaaaaagctagttaccagtaaattcttttcattagattaacatctgaaactctaagcagtaaggtaaacaataattacccatcaaaattgagtgatgcataataaaataacacttttacctttaaaatcttatcttaaaggctagaagctaagtatagtcagaatcattcacttgttgcagcaagcca

SEQ ID NO: 34061 - DNA, 743 bp, Bovine  19866881271475
  misc_feature (1)..(1): n is a, c, g, or t
ntggttgaatctgcagatatggaggaaccagagacagagagggctgactatcaactatacgcaaattcccaattgcatggaggaccggtgcccctacctccctcattgttcaagggtcaatgtcttacatgggctattcaaagtgagctgaatgtggtctgtgcacctatacaaaacgtaaattacaataatgctacatatttaaaatacaacagtacctgctcactacttccaaccacagaacaatctcaggtgaatagaagctcagaatctaaatcggagacacacacgagagaattcaacctgtggcagtttggtgactagtaactgtaacgctgctgaagagattcaaactgtagaaagtcaaagcagagaccaataatagattgctctgtgatcaaagaaacctgtactcacgccaacgtcacatgtacactctgaccatttaaattaattttttaatttgttttattaaaatgaatctctgctcttgaaggttggcttcataataaggccaacaggatccctggggagagaaatgaggaatgaggttctacaccaacgctgttcaggacacattccttcaatcctttttgtttattctattccctgcacttatgaactccctgaatccctctacttaaaccatagcactaaaccactaggattaaaggcatggtgaattttctcaagaatgtacttaactttacatctgatcaatgtgtttacagattcatacatta

SEQ ID NO: 34062 - DNA, 1165 bp, Bovine  19866881302890
  misc_feature (1)..(1): n is a, c, g, or t
ntgtcctaggggtttctttcttgattgaatttggatcagaaagcccactcacttaacagtcatcctagttccttgaaatcattataaaagtttacaaataaccctgtaagttaaaaagtgaatttgaatggataaggggactgttagagcataaagttagttttcattcttctgtttaaaattcatcgtactaaatagctagcagatatgcctgaattaacaagcattcactctttcagccatcgtttctacttaaatatacaaaaaaaaaaagaagaagatcatcagctacttctgttttgctcaggacataagcagtgtcagcatagtctagtcctttagttttcttttaagtgtttttaatgccagcattcagggttatccaacagaagcagaaaaattctagcctttctccaccccaactgtgaccctcccttttgagctaatgatagatttactttgcagttattatagtcctgataaaatccttatcatggcttcctcatggttctccctgatctgggagtgctgccccacccaccagagcactcctctgtggcgagtcccattccttttggccctggtctttcttaatgtctctgtgtttcctgattccaactttaatgacatttccatgaggccagtaggagtacctttgtgtctcctcccaacccaccctcccaccctgctttccctgcctgttccctgcacaccttggactgtcagatcttggacaaggacgcctgcctggccttacctctttagagcttcagtgcttagttcaatacaagttagcagtggctaatcaccatgataaacaatgcacagtaacaggagttgtccagtttgggaagcccacaataggcgactcctttttaaatgcttttgtttcagcagatgtttaatgagcattatttcccaaaaaagggtggggtgtaatgagataagaacagaggaaaaatccaaaaatcaaatattctggatcctggggaaaataagagctatttttgcagtactgaggcagtttcaccgagtacctcagccattcattgcttctgttctttgaagcctctgggcccttggcttcttggcaggtgggttagggtgatggggtgggtggtgtgtctgagcgcatcacccacctacgcagagggccttagaaggg

SEQ ID NO: 34063 - DNA, 1104 bp, Bovine  19866881371966
  misc_feature (1)..(1): n is a, c, g, or t
nccagccacccaccatccccacttctccagggagtcgcggcccccacctctgcagccatccatcacccccacttctccagggagtcgcggcccccacctcccagccgtccaccacccccacttctccagggagtcgcggcccccacctcccagccgtccaccacccccacttctccagggagtcgcggcccccacctcccagccgcccaccacccccacttctccagggagtctcagcccccacctccgcagccatccatcacccccacttctccagggagtcgcggcccccacctcccagccgcccaccacccccacttctccagggagtcgcggcccccacctcccagccgtccaccaccccccacttcagcccagatccatcccggtggcagtgactcacaggacagactctaaatcagctgctttgaaagaaatcatctacaggacttctccactggccagcagtgaagatgggggagagaaaactttgggggaactagagagagggcagcgagcacctctcaagtatttattgacgacaaactgtgaacactcagaccggaggcccaaggctgttttctctgacgtttcccattcctcccgaatggcccctgagagcaggcctgagacgcaagagccactaggggaggttccagagcccccacggacaagccgcctttaccgccatgtggagaacattcctgcactcatggcagggccagtcacaaagtccctgggaaaggaggcaggggtcctggccataaactcccgcagggtcaccagcctagcacctgataaatcagttactaaaacaggtcctggccttctggggactggggatcgagtaacactcaaaagggggaaaacataaaaactaaaccgtgctgcaaaccccagaggaaaagagaacttacagttcaagacgtgcacggcaggaaaatggaaataattaaagagagctgctgagaacacgcaaacttcctgaagtgagggcagtcactgccttgtgtccaccaagccgaccgacggcaagaactagagccaccaagcttaaatttaacttaagaaaacagaaaaatagcagctcccccgcattaaaaa

SEQ ID NO: 34064 - DNA, 861 bp, Bovine  19866881419621
  misc_feature (1)..(1): n is a, c, g, or t
ncatgttaaagctaacatcaggtaggtgtatatgttattagtgaatggcagagttaaaatacttgaatatcttatcaccagtatcacatatgctaatgtttaaaatttggtagatattttcttgatcagattatacacatcatattgaaacaatataatgagacttgaaagaatgagaataagtttgcaaaatctggtttaattcatatctggggagggtggggagcatgtggtgaaaatacataatgcacaggaacctaatcaatgctagacaaataatgtattagtttacaataggatgaccagaaattcgaaggctctgattgagtccgtcagcggtaacacagttttatatttggctcaagtggctgctgaatagtatcaagtggtgccaagttcctccagagcaccgcatgacccccagccttggaaggcgcttcaccacagtctcagaagaaaccccagtcgtgcccttcttgtgctgccccggtacaaatgcaggcctgggatttccaggggccatatgttattgcacagagaggtctggtctaagcagacccttatggctaagaaggtgtgagattagcccttaaatagtggtctagcattaacgtggtctatccaagcaggttaagaaatagctccttagtgattatgtaccaacgactagttatcacgctaacagaaaaggcaacacggcagcttcacatttcacacgaaagcctggcatcacctgggcctggccggccagcctaacctttcacatacgtctagtgattaattcagacccagggaaaggtgatttcataccagtcttttcttcacataggtctgtgtagcattagaattgttctgggttaa

SEQ ID NO: 34065 - DNA, 824 bp, Bovine  19866882085463
  misc_feature (1)..(1): n is a, c, g, or t
nctacaccatcagctacgccaactccagaaagttatgagctgaaaaataaatcaagatttagataaaatttaacactcactgcactgttacctgctggctcctatgccccttgccatttgaaaacataaacagtgctgatgaaaattctctaagttgaaggctttgtcttatcaaaaccacatagttaaactgtaaatatgaagcccacaagaggggtaagaacactagaggggagcctttccctattttgctagaatcttctaatcaaggacatctattgtatttatctaggatagattagaggcaacatctggctagcttagaaattttctacagattcctttctatctttctatagattgtgataaatcttaaagtttaaaaatactcattcttaacaaaaagtgtgctgttgtataaaatgtaccctaaaattctggtagaaatacttcactttccataatatttaaccaccgagatacaaccttttagtttaataaacaagtattataaaaaattctagtgttttaaaacacacagttctactctaaataaatttatactatggcacttgaaaaatctatcaaagtacagatttttaaacatcctcaattatttttacattaaccgcttttatttcacctctaaagttcttaatcacaaggaatcagtaaattcctttaaacatttagcttaaggaaaaaatgaaagaatcacagtgcaatgatgagtgacagcacagaaattctaataagggaaaactgcacaaaaatgcaacagattctgtacagaaacagtgtagatttttaccaataaaaagcaa

SEQ ID NO: 34066 - DNA, 764 bp, Bovine  19866882121730
  misc_feature (1)..(1): n is a, c, g, or t
nttccctttcctgcctcaatgctgcactgttgaactggcagttagactaaaaccaacccaaatgtttgaaaaggcatcaggactcagcagctaaaagaacgctgttttctaaaaacaaatccatatatggcaggcatgcttaatctgttctttcataaactctaaacccaagatttcaaattaagacctgccagacaatctccaatcaacagaagtcctttcctttgttcatccctatgcaaaaaaactcccaaaagaaaaaaatccaatttggattcaaaacctggtgctacacttaataagaacctatattctgacacatagggaaccactcacttggttccaaaaatgcaaataaccgagaagtcataacgatggataagtgagaaacacaaccagcaaactccttgctcagcctgccctctcttctctgccactttgtggggtgacacgccagcaagaccatctgaaggtggctcccctaggtgacgacacagagagcactccccttggtggagctggtgtcgggatgtgggttcccgggaccaaccatcacagcgtcctccagcctctcacgtctccacctctctcccgccctcctcctccgtgcttccctccattcctctcttccccactctgccattcccttggcaaatgccaatctcctttctcaggttttctttgcagccgtcctgattaaggattggttctcaggatattctgcacaaaaatcacaaagccaggaggggatggtggcaagaatt

SEQ ID NO: 34067 - DNA, 1685 bp, Bovine  19866880599173
  misc_feature (1)..(1): n is a, c, g, or t
ncaggttgaccgcaaaagctgtggccgtgctgctgcccatcctgggaacctcgtgggtctttggcgtgcttgctgtcaacaacccaggccatggtcttccagtacatgtttgccatactcaactccttacaggtgagggcccaatgggattgtcagcctgggagctgtcagctttgtgaatagatgagtgggtgcaggttgccatggcaacaggaaggagacactctgatctgttccctccacaggggttcaccttttgagcccgtagggtgggagcatcccagaggacagaggcatggatggggcacacactggggtctctgagcaaacagggcctggaggaccccatttacaacagggttgcctcatctttcagggaagtacctgtgggagatacatccagcttgaatggaagatgatcagcatgtgggtggctcctaaaagggagccgggcatggaggggtggtgaagagggaggtacctcaggttctgagttctcatctgccctctacatggaaggacagaaaaggtaacggcctgaaaaccggagatctgagatgcccagagtccgagtccccagacccacaagcccctgctggaaggacagaggcgaatgctcattgccatccatagcctacacagccgagctgtgggctgaatcccggccaatgtcactgcggcccagctcagcccttaccgtgatgtccttgctgcctctgggtcttcacgaccagcagctgtgttgcacttttaatctgtaataagcccctatacacagctttcttctggttgttatggtgacaggggataggttgtcgtggcagcagcccttacacaccataggtcctgggttcctcatttatcctctgtgtcctggtctccgcttccataaaacgggaacagtaataagacccacttcatggggctgcttttagcactcaatgagatgaagtgtttgcctagtgctgacacagaggagaagtctctagatgtttggggacatcctcgtcttggatctgttttcgttgtcatcatcatacttggtctgccggtgaggacacaagggctgtttagctggtaggctcgtgccctcccacctgtcctccccagcaagtttgctcctcttccaggttaagccaatctgggcatgtacctgtctctgtatcttggccatggtgtctgcctgcatctatgttaggttacaggacacccttccatccgcatggtttcatggtgaagcatcacagcctgctcacatcctctccaacaacaagccatgctgatgccactctagagtccatgggtgacattggaaggaaccctcagaaagtgtttgtaacaaaaatgcaagaggctctaattctgcgttttcttccctttccttcccagggatttttcatcttcctctttcactgtcttctgaattcagaggtatgtctgctccacttcctgccaacatgaagctggtttttcatttctgcaagggcacagagagcaggaaaggtgtggcctcatctggctggtttctgggactgtaacgctgaatgagcccttggtttctgtaacaaggttgtgtgcaggcggctgcttcacatcagtccctcctccctcattcccggttgctaagcaacatacacaaatcctccctcactgatgtcacccaggggctgctggctgcatggagg

SEQ ID NO: 34068 - DNA, 1273 bp, Bovine  19866880736513
  misc_feature (1)..(1): n is a, c, g, or t
ncctgtttacatggaagtccgaggagggcctgaaagtctacgtcaacgggaccctgaggacctcagacccaagtggaaaagcgtctcctgcctacggggagtccaatgacaacctcgtgctggacctgaccaagaactacgagaacagagcttttgacgagttcatcatctgggaacgggctctgacaccggatgagatcgccatgtacttcacagctgccattggtcagtgagaggggaggggctgcaggccgggtgtgacgtaaacactggggggcggggactttcctatctaccgcccctttacccgcagcaggtagttctctgctctctcctgctgggctgttggtactgcagggtgaatgcgtcctgatcagttttttctagaaccccttctccctaagatggaggaattcataatttaccagaaacacactgaagcgaatattctcacgctggtcaccagggaatttttgaagtttgtgatagatggttatggaaagttttgggaagcaagtgttcccggtccatttgatgcacaaatatttgccacatcccttccgcgtgtcaaactcacccatggaccctcagagagcacccctgcccacctccgttcctgctcggcacagagcggtggttcagatcagggacctggtgggccggcagacctggtttcaaagtctcatgcaaccacgatgagccgtgggacttggtaagtcactttgttaaaaaaaattgagctaaaattcatgtagtgtgaatgtcacctttttacagtacacgattcagtggtacttactatgtccacatgttgtgcaaccatcctccccagagaaacccagcccccatgagctgtcctccccatttcctcctcccctgcccctggcaatcactaacttaccttctctgtggatttacctatcctggatagtccgtataaatggagtcatataatatgtgaccttttgtggctcaagtgatgtcactagggaatctgttttggactttgccttcttttgttttcttgtggtgccagaatggctgccattccctccaggagcacattcctcccccccacccccctatccccacgaaaccttagcaggaaacaaggagcttcttttttttgtcatccactacaacccggctggccatcactgttgttggcccacactgaccacgaaccaattactgtgggtggggatgtggaatatgctgattggcttaagcctggctcacagtccaccccactgaaatggcagtgaggtcaggg

SEQ ID NO: 34069 - DNA, 931 bp, Bovine  19866881037554
  misc_feature (1)..(1): n is a, c, g, or t
nccagtctctcttgactcttatttgactcactctgggaggaaaggtcttccaagagccaaccaccaaggaggaagctgggtgggagaggagccaggagagacagacagagagaagggctgacaggtggatgtaagctcagaggagagaacctgtccaagaccctgagacctgggccaggaggcagagcttaggaagattcagcctcaacatcaggaaaataaaagcatctgtgctgtttttactaattctccaaaagcaccacggatctggcatctacttgtgataactgccttgtttttttttaaatgttcatgaaaatgttcatttttagcatggataattttaaaccattttcaaatcgacctttcctggcaatgagtagatatgatttgcttccatgaagacacccacaggctgtctaaatctggcatcgccgctgagtagggatggatctgtaatcacagatgctctgtgaccccggtttcttagtttcctggaccgagctcctcccttccatcctctcccacccacaggcacaaacacaacttcctgctgagtgttgggagcccctgcccgttcccactgctctgcagacctacccacatcatacaggaaatcagatttagtccttggtattttaaggatcagggtttcccaggtggcgctagtggtaaagactctgcctcccaatgcaggagatacaagagatgcgggttcaatccctggctggggaagatcccctggaggagggcatggcagcccactccagtattcttgcctggagaatcccatggacagaggagactggtgggccacagcccatgggatcgcatagtccgacatgactgaagtgacttagcacacacacacccatgtaaaggatgcagaggaggaagctctgcttggggccatccagggcaggccaccagc

SEQ ID NO: 34070 - DNA, 1990 bp, Bovine  19866881343407
  misc_feature (1)..(1): n is a, c, g, or t
nacgttggtaatactgactgaattggaaattgtgtgattcagttcaattcaaaacatgtaccgactgactccagagagttgaccatttgaggggaggaaaattttgtgaaagttgtcttgtgccatttgattgattgcatgcttgtgttgtgataggcattgttttgaaatacactgtatagtttaagttgaggctcttaatttgaagacagtaagcaacagatagttgttgctacagcttcagtatttaagcgtttatgtttgggcatatgttttggtgattgtcaataattatttcttgtgcactccattaaaaagatagtgaaccatttgatgggcttccttggtggcttagtggtgaacaactctcctgccaatgcaggagacacaagttggatccctgggtcaggaaagaaatgtcaaatcagtccagttttcttgcctgggaattcccatggacagaggatcctggtgggctagtccatggggttgcaaaagagtcagacatgacttagagactaagacaacaggacccatttgatactgagccagaggagctaggctttctattttataaaatgctgttataagaccagctgatttctctttaattgtactaggttttgcagagtatttttttttttttaatgcttgattttagatttaagaagacaaaggagacaaatgcttgttatactgagcaaaaaagatgcacagaaaatactcatctaacactcttgctcacttgatgaaaattgttgggaatcttcccatgtcttttgcttttacttgagtacatataaatgcaagggtcttcttgcctccccccatccccaaattcgttagttaaaaatccataatatattatgcttactagctttatcatggctgtgtttttcaaaggatagatttctagatactcagaatatgggacatgaattctgaagtggtggtttatcattgatcgactttagatacattctgaggctgagacaagtttatgaagtattgcagatgaaaagaataaataaatatggtaagcatttttctttatgtggtaaatttgtaggcatgtactcatcactgtaaatgtttctttcagctcagtgtgccattataatgtttgacgtaacatcaagagttacttacaagaatgtgcctaactggcatagagatctggtacgagtgtgtgagaacatcccaattgtgttgtgtggcaacaaagtggatattaaggacagaaaggttaaggcaaagtcaattgtcttccaccgaaagaagaatcttcaggtatgttttttaaagcttatagaattataatcctttagttaaaattatgatgttaggccattaaagtgatttattgatgtttttgatgtgtgggtttttaaaattaacttaaccattcttttaaacagtactatgacatttctgccaaaagtaactacaactttgaaaagcccttcctctggcttgctagaaaactgattggagaccctaacttggagtttgtcgccatgcctgctcttgccccgccagaggtggtcatggacccagccttggcagcacagtatgagcacgatttagaggtatggtgtttatgtctcagcgatgagtgcttttagattcctggagcttttcatttggagcattgtaacatttccatctctttgtctaggttgctcagacaactgctctcccggatgaagatgatgacctgtgagaaagtgaagctggggcccagcgtcagaagtctagttttataggcaactgtcctgtgatgtcagtggtgcagcgtgtttgccactttattatatagctaagcagaacatgtgcttaatctttggatgctgaaggagatggatgggctttggagtgaatgtggcagttaaaaaaaaaaccttcattttttggacctgcatatttaggtgttttggaacacagttgtttcctccttgagtttcaaatataagactgctatagtcacatg

SEQ ID NO: 34071 - DNA, 1466 bp, Bovine  19866881398926
  misc_feature (1)..(1): n is a, c, g, or t
nacgtaagaatttatcgaatgaatgtggagttattaaaagaatacatgcgcaaatactcctgttgacattgaattctgctgcaaagctgacgttacgcggaatagactgctgattgctggagtgtggaagaacagggtcaaaaatgaaaaccccccccctcccacctgctcaggatgctcttctagccttgcctgacttccagcacctctgaatcacaggggctccatgctgcctcattgattaaatgtccaggcccattcagtgatggattttgcatcaattccatcccgcccctgggagcaggcctgggcaggaaagctctctaaataaagacatttaatgataggtttgtgaccctgtgtgaagggaggcagggtagggaactcctttttcattagctgaggccagaagaagccaggtgggaggaggaaagagggctggagccttggagcctgtactgttctctgagtcagaggagcctgggtcacaaagctgcctgtgagttgtctgggcagagggtattagagtgacttgtagtgaggtgtcctgaggctgatacaaaggagatgggaaactcctacttgactttgcagcctgtttgcctggaggctgcaagggagaaagggatggagcagctttggggcaaccatccgagagtgcctggcaaagggagggaattcagatgcttgttcataagattcagctcaataggttgcaataagaattcaggttctgtaacactagctgtattccactaatccagaaaaaagaaaataagagaaatacgtttcattcatgtgtgctatcaaattgcatcatttataaaatgctcttttttccccctagatacttaaattgctaatactcttgcacaatttatagaccaacacctgaggtagtttttccctcaggcttcttttctgtgtattatggaaatctaaagccctctccaagactccatatatccccctgggaaatggtctcctttgacaccaagctgcctccactgcacgtaattcctcatcccatattccctgtgtctattctgttcataaatgcccagatctgggactcagcctttatccttattttccatgaaagaaagatagggaggaagggagtgaggaaggaaagaggggtttgcacagatcactcaacatgttctgataactgcaggacccctggcccagcccttcctccttctggatgctcctcccatctcctggctgatggtcaatttgcaaagttatcagaaaagactcctgtaggtttaattaattaacctacaggatattttcttctttctggtccatacccctttctccattacaacaacactggtcttacagctttttagggaaaagttgatgctgtggaatggttgagtcacaaatcttgttttgacttgaaagactcacagcatagacttggagggctacgggttcattttgtcatcgcaaataag

SEQ ID NO: 34072 - DNA, 1251 bp, Bovine  19866881706286
  misc_feature (1)..(1): n is a, c, g, or t
ngaagagaattcctctcaagtgtggatgagaaaatataaaagcagggactcttacagagaaacaaactgagaagctgggacactcagagaggaacaacagtgggaggttgtgtccaccccctccagaagggcaggaggggacgacatagggggagatggtcacagggagaggggctgcgggctgaagatcacaggtcctgccagcagtgcagcccccagcagggagacgtgggtgccaaatgccccaccctctctctacacactctcggatctcccgggagcctcccactgcgggggccagaacagaaggcaggaggcaaggcagcctgggtgacctggcccccaggtcatctcctgggggtgcagtgggtgaaagagggtggctctggaggatagaggggtccacaagccccctgtggacatcagggggtctcacccaagaatgcagaccccccagacacccttggataatcagaagtttcccaacactggactccacaccaggcaatgatcagtgaccccatcagagggggtacacacactccagttcccggagcccccaccgggtgccctcatggttgtccccccgaaagccctccaccagctgagtctggacttgggaccagactctgctatgagcacaatattgatgagccgcatggcagagctggaaagtctgaatctctctcccctcaaagtgtgctggttccctcgagaccagcaataaagaggaaaagcaaaaataaacctgccagcaaaaaactaataagaaacgagtttgggtgcctttggcaaaaagagctcagaaatgcaataatattttcttttaacattgtatccacagactcttgtgaaggaaatacctgatcagatcccaaaatgagcaattatgagagactgctgtttgagtgagacacttttggcagaggaagctaattttgcaaagtgctctgtctcctgacttgggtcttggttgctttccaggggtgggaggctggtccaccagggagagacaacctgagaggagggggccctgccttggggttgacccccctggggccgatgtgaggtccagagagcactgcaatcttgccccatcaagggtcaggggcatttggtgatggggtgtcccatggggtgatgctgggggagacatcaggcttgttgccaccttttggctcttgtaaataatactgccatgaacactgagtatatatccaattccttagggtatataccaagacagaatta

SEQ ID NO: 34073 - DNA, 1410 bp, Bovine  19866881760657
  misc_feature (1)..(1): n is a, c, g, or t
ntttgccctttattatatagctaagcagaacatgtgcttaatctttggatgctgaaggagatggatgggctttggagtgaatgtggcagttaaaaaaaaaaccttcattttttggacctgcatatttaggtgttttggaacacagttgtttcctccttgagtttcaaatataagactgctatagtcacatgacaatattgagaggtggaatcttgtttgttactgtcattcccattccttttcgtttagaatcagaataaagttgtatttcaaatatctaagcaagtgaactcatcccttgtttaaatgagcatttaaaaccgctaacagggaaagttgtgccatgttactatttgaattgcctttgctactaccacttaccttgaagtcaggttaaatgcttctaattttctgtatacttgaatcatttcacacaaacgtaacaagtcaacagtattgtatttgatgagaggtgtaaatactatcaatagttaggctaaaataacatctaccccacctgcctttgggcttacgtagtgtcacctagagatgagatttatgtgacctgtgaaaggtggtacctgtttcagatgtttcaaacagataccttaattatatttgcattttatggcagaagtaaccattttctaatgtagagcttgtcaaagtccaatgaaatcatacaaacggttgcaggaacttgagggacatctcatctgttaaatatgaatataattgtgcatttacttttttgttttttgatgttacatgtttaatgtaaagttggcattctaggaagatgttccatgtttacctgctgttaagtactcccaagctttaaaggttatcaaagattaaggatttcaatggatatatcacagctttgatgatttttctctccccaaagaattttttctgggtggtgcaagaacacctcaggatgctgcagcataaaagtaggtcttaggtaagcctctcagtgatgtgaacagactgccaaaccttcagtagattaaccacttaacattgtatggtttccacatgtaaacatgaattgggtctgtcttgcctgagtttgatctcactgacaccatactgtagcaattagaaatcaagacgagctattttcctcttgtaagtactactgtactatagttcagtttgccaaagttcttcagatgtccaattatccttaaatgattactttcctacctaaaagtagggaaggatcccttttaagtatatggaaaaatggactataaagggtaaaattgggtacattttaatttgtctaagtattgaataaatattaatagattcacttacagatttgaattgatgtatatgctatgctatattcagttcagaaccagactttaacagataataagtttcccagatcagataaat

SEQ ID NO: 34074 - DNA, 896 bp, Bovine  19866880633731
  misc_feature (1)..(1): n is a, c, g, or t
ntgtgagagctggacctaaagaaggcttagtgtggaagaggtgatgtttttgaattgtgctggagaaggttcttgagtgttccttggactgcaagaagatcaaactagtcaatcctaaaagaaatccatccttaatattcactgggtggactgatactgaactcgaagctccaatactttggttacttgatgcaaagagctgactcattagaaaagaccctgatgctggggaagattgaaggcaggaggagaaggggacgataaaagatgagatggttggatggcatcaccaactcgatggacatgagtttgagcaaatttgggagatagtggaggacagaggagcctggtgttctgtgggatgtccatgggggtcacaaagaatcagacccaacttagtgactgaataacaacaacaacaaaatacttttctgccgtgtatttttaaaataatgcatcagtggcacctttttgccagagcatgagtggaggggccgttgttgctggccctttcctcttccccaccgtccagttagtgggttgattaggccatcggttctcaagccaaggcttgtttcttatttagttctggggagcacctggccggcatgaatgatgtaggggagaacaactttgaagccacagaggcgatctcgaagtagatccggtgcaccaggatcctggcgccgaaggagccgacgtcactctccagcgtctagccggaggagacatacaggcagcagggcgaacccctcagcgtgtgtgaccactgagtggcggcagtgcggttcatgaccagcgaactggacgatcccgaggatatgctttcgtttatctcgagagaatagatgactcaagggaagctaaggaaagggcaaatggaccggaactggatg

SEQ ID NO: 34075 - DNA, 802 bp, Bovine  19866880643743
  misc_feature (1)..(1): n is a, c, g, or t
nttttcaaatcatctgagggagtttttgagtcctgatttcaagggggaacccctataccaatttgaagagtgaaacaggacctagacttcagtatttatttcaatagctttatgaaaatataattgccttgtaataaattacacatatttaaagtgtgcagttgaatgtttaacatgtttatattcattaaaccatcaccacaataaaaaataatgaatatatccatcacctccaaaagtctcctagtgctcctttgtaatctctgtctcaatccctgaaaccactggtctactttttattactgtagattagttgcatagatacttcacagttccttaggaaattccgtagacatagttgaaactgctgcagagggatatgagttgaagggatattatgcttggatttttttttttttatatgtgtaaggaaagtgagaagtaagagattaggaaaaatgagatatgtattggaactacgttcctgaggaaatagtagatggaattcagagctttgaccagtaaagaaacgaagacaacatctttaacaaagaaaatgatattaaagatagtgtatttttttgttatcagcatccaggttgtcatcatgtatcaagattggttctcagaagtgctcagaaataattagcatcttagtgttatgaaaatgaatgccctgtagaaaaaccccttaaatctagcccctggtactaccatgtaatgctttgtcattttttggaggggagcagatggaattaacagttgactattgcttactgttagagccaagtactgctagaat

SEQ ID NO: 34076 - DNA, 1678 bp, Bovine  19866880663843
  misc_feature (1)..(1): n is a, c, g, or t
natgttctgcattgacgatctacagtgatgtgaaacccctggagtaggaaatggcagcccactccatgttcttgcctggagaatcccatggacagaggagcccggcgggctacagtacatggggtttgcacagagttggacacaactgaagtgacaaagcagccgcagtaaagtgacaatcaggaaaaatgcaaatatgaactagggatgaccacagcactgattatgcaggaaaagtcattgtattagggatacatacagaaatatctagcagtaaaatgccacattttttataatttaaatattttccaaaaattggacaaagcaaatattgcaagatgttagaattgttaagacctaagtgatggattatttgggtatttatcaggtttctatttttcagtacatttgaaatttttcataataaaaagtcaagacaaaattactttgtgaacacctgtgcatgaagcagtgcattggatctccatgattacaattaaatggggacaggatgaagaggagaaaaccaggaatattctatggttatcttaccatatcctgccatagaagcgccattctcgacatccattgtgttcttattttcctctgctagggctttaacatattttttgcttaaatctagtatctgctcacgtaacttgacactgctttgatgtcttggtcgttgaaaaatatagtgcagtaacatcaatccccaaaggagtccaaatacaagcaagagtaaactcaatttctgggacatagattttcttgagattgtaaaaaccatttctgaggaaccacacagactcaactgaaaaatggtacccagaggcaagtcaccaagcaatcaagacgtgaaagaaaaaaatctcctcctctagtgtatattcttcatcttcagcaaggttgccgccaactcacaattaactctgtaaaattgagaagaaaaaaggcaattagtcttaactatatcagtaatagaataaacaatggtagattaaagaagagattgtacaaatagttttcatttagaattgtattgtcttctttttgataattttctctatcactaaataagcttcctagtcttttatcagctctgttttcacagctctttaaaaatttaaactagaaataaatgtcagttcattagaactacctgaaagaaacgccgccatggtcatgaaactctgaataacttctcattgtctgtaaataaaacaatgaatatataagatttagagatatcagtctcttcaaatacaagtcaccaacctaaatgtgtgaaagcaattcctccttttcctttaaaaaaaaaaagttgattccaaaatgaaagtcagaaataggaaaggtgaaacagactggaagatcaaaacagctgactgaagaacaaaacagaacccacagtaagcatgccaatgtcactagaaaatactactactgacaacaggtaatctgaaaaaacaaccaacctaagatgccaaataagtcataatttctaagtttatacttttaagtatatgccagacatgacaagcactaacttccttttttttacctttccaaaatttacaattctaaacagggaatgtatttttataatttgaggaaaaactggaaaagtttaccttcagtttttaaaagaggataaagtaacaacaatcaagggaat

SEQ ID NO: 34077 - DNA, 2546 bp, Bovine  19866880736840
  misc_feature (1)..(1): n is a, c, g, or t
nctaacagttttttcagttccattcatcattacagtaaaaaaaaagaaaaaaatctgctgctattttttgttgttttacttaaatagctcgactcaaggaaaaatgttaaatttaagaactcctaatgttattgaaaatttatacttcttataaatatatatgcaatatatatgcatatacatgtgtatgtgtgtgtgtatatatatacttattatatatatatatatacttcctctttcatatgaaccactcaaaacaattttaaaagccggtttttttctgtatttaaaattgcccttttaaatatttagaaattccacaggtggtggctttaatggaatttttcccagagcaaatttcttggattgaaactgttccagttcttctgctgttagttgatccttgggtgtgaataatgcattatctgttgaggtgctgccaagtgagaatgagagagaagtaggtatgctgctgtttccaaaggtgtcactggatgacttagagaaagcagtgtgaggctgtgagcctggactaccaaaaccagctatagaactgccacttccaaaggctggggccactggagatccaacagggcttgctgccatagaaggtgaaaatcctgaaaatccagatgatccaaaaccagaagctgcaggggttttaaatgaaaatgaagcagcagatgtgatttcgggtttcctaaggccaaaagtcggagtagcagcagcaatggcagaactggaagcgggtacagctccaaacgctggagtattcccaaacacaggagggcttccagaaggggctgtagcaaatccagggcttggtttaaaactaaaattctgagcactgttgctgctgctgttattcacaggaaaacctacaaaaaccagaaaaagaaaaaaaaaactattagtcaaaaaatgtagctatattactaccttgcccccaccttttctttttcttatttctgccatgtttagatgatgagaaacttattggaaggaagaaaagtgaaaatgagaagttaggacaaactcactaaaccctgttggcctgtctttctgctacactgatctcatctgcactctaatttaccttcacttaagaaggtagctcttgagaaatctcagggattagggagtggactttcacttcagcttgtcctctactcttgttggagctgtcacttgaaaacaaaactacgctgttatgtacaggaacaagaaagtcctcataggtactgttaccatagctatgtagtcctatgaaactctagaaacaccattcctaaaatacacatctaaaacccgagccatagggtctttcaaagaacgtgcccattctgaacaccatttcacaatactagatgagccaaattctttgaagctctattatggaaggtggtaaaatttgcaagggtgacttaacacggcactagagacaccttcaggctttgtatttgaaacccataaaatcccatttttctaaatcaatcaagtcttgcatgacttttcacttacctggtgacccaaatgttactgtttgcctattgccaaatccaaatgaaggtgttgcttgattcactccatcctgtaaatcggacagctattaaaaaagaggtaggcaagtgaataactcaagtactttttctgtacacttttagccaaatttaatttttcaaatgtgcactttaaaatgtcttcaattgcttaacatagaaaaatgcccacaagtgaatatgcatagaaaaaatgggccctgagttctcaaggagttcagagtgatggtctggctgatgaattgtgagtgtttttaattttatttatgcttttaaaacattttctaaatttcttcaataaacacatattaaaatcataaatactttttaattctagatttcagtgtctacaggttgatctgcattaaccaagaaacctagatattaggtaagggacctttagaggctaccccagttgacttactcaaatgcctgacttgaagttaattcacaattacattattaaaagcttaccagtaaactctattaaacattccctattcccttaaaatattttatgttcttgctattttctgctgtagaaatatctttcatctctgcttactgaaatcttaatctccttttcaatgaacttttcacttaatcctgacctctaataagtccttcctcattaatacaagcatatattatttctctcatttgaaaaccctattggcactgtttttaaaaaatagttatttatttggctgcactgggtctcagttgtggcactcaggatcctttagttatggcatgtgggatctagctcctcaaccaggtatagaaccccagccgcctgcattgggaatgcagtcttggccactggaccaccagggaagtccccagcattttctaaaattcaactttattgaggtatagtttacataaaataagacgcatccattgagaaatttgtttttcaatgggttttcataaatttataaccatcactacaatcaaaatttagaatatttccatcacccataa

SEQ ID NO: 34078 - DNA, 1169 bp, Bovine  19866880742989
  misc_feature (1)..(1): n is a, c, g, or t
naggtgggtcatagaggattctgctgtgattcatgtcggagagtgttttgcctatgttctcctctaggagtttttaccatttcgggtcttacgtttagatctttaatccattttgagtttatttttgtgtatggtgttagaaagtgttctagtttcattcttttacaagtggttttttttttttttaatttttttttttagcttttgtcttattttattcaatatatttgaaataatcattcacaagtttaacctatccttaaaaataggcactacttatttcaatataatcccatttatgtacaaagcaaaccctttacatagtcacacttaattaaaaagcatgaaaggatatatattattaaacactggtaatctctgggagagtaaaatgaagggaaatcataattctttattccatttatttctgtatatttgaaattttcacaaacattatactcacataaattaattttttaaaaggcctaatgggtcttagttaaaccacttttcaccaactgtttgcatattaattaaagcttctgtagtttcagggagctctaaaagtttttctatgtcctaaactccttttccgggagaaggcaatggcaccccactccaatactcttgcctggaaaatcccatggaggagcttggtaggctgcagtccatggggtcgctagtagtcggacatgaccgagcgacttcactttcacgtttcactttaatgcattggagaaggaaatggcaacccactccagtgttcttgcctggagaatcccagggtttaattttttggaaaaaaaatcattagttactgcagttactgagttttaacaattaggaaatttcacatataagctagaaatagtatgtgtctttgggcctacccttcctaatggcagcgaccaactgttctcttcagataggtaggtgctacccaagtttgccacagtctctactcatccctggagtcttatacttaaggagcctgccttattatgtgcattcctgcctgattcctatagtcatttactgccttactcaaaggcagtaattgatagagtgaattaatgaaatatacaactttcccatgttccctatgtattaaaagtcagtatacatgaactgcatttttcgtgggaattagatcataaatatttcaagcc

SEQ ID NO: 34079 - DNA, 877 bp, Bovine  19866880797175
  misc_feature (1)..(1): n is a, c, g, or t
naacaaacttcacagtaagaattaagttttcacagggtggagaaaaacaaaaagagggagaaaatccctcaggacaaggtttctcaaatttggctgctttcaaggacgtattcttgagggaggaaactgcacgttttctttcatcacattttaaattttatgttttacttttgttcatagtctaaaaaaatacacacttgtttgggactatctggacaaccatcttctgtaacagagtgctaccacaggagccatactgctaaaccagaactgcagtccatctgctaattcttgctttgcttctttgctttacaggcatgtattcaatatagacattttcctcttccagctcttagtattgtttcctttcgtccctttctccttctgtaccaaaactcccagggagcctagcttgctgtatgttgaacccttataatattttttaataatatcaaatttttaaatggtttgtctttttgactaggaggaagcaagggaagttaacagaatagatcctcaagtgatatggactcaaatttcttgttggaatttgcaaagccaatttaagtacgatcttatttgtcagaagattgttttttaaatgtagaaattcaagaagacagcctttgagaatgcaaattttgaagaacttggaatcttttttttcatttcaattatagtagaaaccacagagctcagctagcaggatatcacagtgtgttcaacataaggaaatcacagtaataaaaacagcctctcttccttgggtgttgggtgctctctttgccctgcaccatttcctgtgtgttattgattagaggaatagcaataaagagttctacaggggggaaaattaaatcatggtgactagctaagt

SEQ ID NO: 34080 - DNA, 1418 bp, Bovine  19866880820418
  misc_feature (1)..(1): n is a, c, g, or t
ngtctgggaaggtagagatgttaatgtagatagaggtcttaaagaagactgtctgaagctggtcacatctcatatggtctgctctccatcagaaagcttcccctggccctggtggactagacttctgtatatgcactcccagcaagctaagtacaagctaggactccagtgggagtgcagggattcacttcctttggctttatctcttcatttgggggcagggtcttttccttagacacaaaccaagtacatttagtcacagcaaaataatatctttaaacctaaataatatgaacagttatagctataagcttaacttgtgtgtgtgttcagtcatgtccaactctttgtgacccctatggactgtagcccaccaagctcctctgtccgtggagttttctaagcaagaatatttggagtgggtaaccatttcctcctccaggggatcttcctgacccaaggatcgaacccgcatgtccctcatctcctgcattgcaggtaggtatttactgttgagccactagagaagcccaagcttatcttactattagttacttttttcccagttacctaaggttaggccttctccctggtgaagacatgaaggcattttggaaaaaaaaaaaaaaggcttttttaaaaataatagacccaaacttcaggtaactcaggtcagaagacaaactgctgttttgaaatttctcaagctatggcccaaaggtccacctccctttgaacttgatggggaaggattaaaaatacttctacttcggtaagcaccaggagttcagaagaggacttgtaggaatcatgatttgctagactgccattctgctttctaagataaagtgaagattagtttttaagcctaagattttttacaatgcaactgacaggccaaaagcaattttcagtttttcacaaagatccagggagtagaactccctaccacacgattaaacatttcttggcagcaagttgctagatgggcttgagagctcttggcggaagccatcattaaatcatccttcttccctctatcacatcagcaaaccacagttgatttacaatactttctgagaaaggcaagtctcagtcctaagggacatcaaaatgaaaagcacaccaaatgaagtgtttaatttcatcagcccaggaattaagtacaacatctttttctctgtagtgtttataatagctttctgttagacagacttgattacaggattatgtataaagtaaactttttgcatagagtatgtgggctccccaggtggtgctagttgtaaagaagctgcctgttgatgcaagagatacaggttcaatccctgggccgggaagatccactggtgtaggaaatggcaccccactccaatattcttacctggagaattccaggacagagaagccaggcaggc

SEQ ID NO: 34081 - DNA, 1889 bp, Bovine  19866880834871
  misc_feature (1)..(1): n is a, c, g, or t
ntgacagtatttatttcttattttgttctctattatataatgtctgcagcaaagatttgagtacaagaccttgtgctgaatactgtggatggagagataagataggtcttgcctttgaggaattcacagtaaagttaaaatgaatcaaatatccttattataaatatgctgtttaattttctatgtctatttatgcacacatttacctatatatactaaaccataacccattttaaatcataaaatactaggatatgggacatggaagaaataatgtatatcttacaattaccagtatcttgagacattagaagcaaggtatcacacggaccacagctttgtctgactcaatgaagctaagccatgccgtgtggggccacccaagatggatgggtcatgatggagaggtcttacagaatatggtccactggagaagggaatggcaaatcacttcagtattcttgccttgagacaaggagatacaaccagtccatcctaaaggagatcagtcctttaggtgttcattggaaggactgatgctgaagctgaaactctaatactttggccaccttatgcgaagagttgactcattggaaaagaccctgatgctgggagggattgagggcaggaagagaaggggatgacagaggatgagatggctggatggtatcaccgacttgatggacgtgagtctgggtaaactccgggagttgatgatggacaaggaggcctggtgtgctgattcatggggtggcaaagagttggacacactgagggactaaactgaactgaactgagacattgtatctgctgcaggataaacattgttgattagttggttgattgatagaaatacttttcctaggaagaaataaagacttggaagacagaagttgttaaagaaggccatactctagaaggataggtttttatcatttgttatgaagttttattttgtttgtttgtttgtttttccagatttccctactacctttacccaaaactgtctgcttactactggagttttatctcttcccattcctttttggtcatggtgtcctttctgaaagggtgaccctgccaaactgtggttagttgttgatattttaaatggcattaggaaaatttgttggtagtgtggctatctttttctccattccaagaagtaaaaacttccccccagttctgtaaaggagaacagtcttacttaacagacattatacggtctgtggctttaaggtttgaaacattagatccttatataacatgtttattaagaaacaggataaaatactgttaatgagattggtaagttgtatgttgctacaaaaaatgtatctctggctttacaaatgattcgtattcttatttccaactccaaactatgatcaaagatgcagtgttgatattaatttgtatccctgttgatgttgaggattaactgtatcttttgttttatttttaccatttttttgttgagatattattcacataatgaaaaattcactgttttcaggtgataatacagaggtttttactggttttaaaaggttgtgccattaataccatcatctaagccttggatatttccatcacccccccaaaaaaatctgtatctagttagtcactctcagttcttcctcttcccaattccccctcccccagtttctgacaatctgctttctgtatttggatttacctatttgggacatttcataaaagtaaagtgtattttttaaatttgtttagacactaccagaaacatctttaccaaattatgctacaaatttgaaggaaaagagttctttagtttcatctctctataaagttatcccggagccacaaagtgaggtaagtactctcagagttcatcatgctagtagttttca

SEQ ID NO: 34082 - DNA, 1760 bp, Bovine  19866881052519
  misc_feature (1)..(1): n is a, c, g, or t
naaattctaatattttcctcctttaaatatactttgcccccaaaacaaaatagtacaaaaatcatccatgctgaagacaacatgattaatgtccatacctgactccaaaccctggccagaagtttaaactatgatagaacccaccaaacacccttagatctgcaccactttcatacctaacatatgcattgagtaatcaggcatatcattttctaattctggaagtaagacctcaaatttttatgggaaaaattaagctactgctatttcttaatttcttaggaaattaagaattgtcctccttgttaaaaaaggaagcataatcaaaagcatgtggtcaaaactgaagaaatttctcactgaacatactccctttaaaagtcacggaaagtgttatttgcagaatgttacataatttttagtgcagtcagtgccttttctcatactttcaagcctttagctatggtagataaaataaaaaccaatacagaagctatgaaatcatcacaactttcttccttaaataattaaggtacatactaataaataaataataaaactaagggcattttattctgagctaagttttgggctatttcacctttttacagctattaagaagtacatccacagctactgaaaagaccttaagatcaatgcagacttttaaagaaagagattaattatatatagttctaaaccagtgttgctcaaactttatttacagaatccccaggagatctagttcaaatgcagattcagattaatatgtctcaatgggcctggcaatgctccccaacaacgcttacactgctggtccatgatggctacactacgagcagcaaggctctaacttctacagagaaccatttcaagtagtttatgtttggaaaataatttcgccccaggccccaacatttcataggccagcaatgagactacaactgaaggcccacattccacatacctaaacatctaagtatctgaggtgtccagtcaacatcaggacccagcatagtgctcctagggaaaaggcctggagaactggaggcgaaaggagcagctctgccctaggtaagctcggtataagctgttagggacttttggccttatgtgaacctaaaaggggaatgggacctgacccatcaagcttctcatcctcattttttctggctcagaattactagatatttctggacgtcactcagaagtataccacctagacagttcgagggaagagcagtcagatagcaatccctttacccaagggatttggcgggaccaccttgagatggagcaacccctgtggctcaggtttcaagctgcacctgtttcccactgaggcagtgatcatctgacttcccctttacacacacacacacacacacacctgcctctcacacagtttcccaactgtcaaaaatctttcttgggagaccttaaaaaaaaaaaaagaacacattcttgcaggtacaccagcctttgtcagggccccaggcagtgagtcactaccaaaagccctaggggcggctgcgcttccagttcccgggtaagagtttctctagaaccagtcagtcagtctcctaaaaccagcacctcgtggtccggggtacgtttggaagttcaagtcccaccctattacaaagtgaacatgcaaacctgatgtctgcttttacaggccaggtgtactcaacgtgtgatctacaagggcagttaagaaaagaacaatggacctttgcgtaaatctggagttaataatt

SEQ ID NO: 34083 - DNA, 1243 bp, Bovine  19866881106830
  misc_feature (1)..(1): n is a, c, g, or t
nccataagcagcgtattgtgagcagattctgtttgtcataatggtgagaagtgaaaaatgtttaagctgaagtctctagaaaataaatgagaaatatttcattagatggtcaggatacattgaaagcagtgtgcaaaagtagcagaaaaaagggacattctgactccttttaatgactagaaaactgaattctgaccaaaggaacatttcccccagagttgcttatgtgtgtttttccattaacaaaataaaaaagaggcatttaaaaaatattttcagattccagaatctgaatctaacattatttaaaaggaatggcattaatagaagaaaaaagtacatagctaatgatgaatatatagctgtgatgaaatgacacctacctctttcaaaaagcatactgttgggtttggtgaagtacagcaggaccctaccatagagagataactcttggtgtaaccgactaaaagtgtcagaggagcttgtccataattaatggaatattcatacataaatctgtaggggaaaaatagtaggattaatgaaaatatttgtgggaaacaactcactttttcagaagtgttttgatgggggaaaaaaaaggatgcatgttactttatagttttaatatctaaaaaagcacccgggatatagagcagggggttataatactagtcactttttttttaattgtatgatttttattaagtgatattttacagactggttcgaactcaaagtctgcgagtcaagaaaaattaagtaaatgaaaaaaggatatggcaaaaaatgtgctccaggtacaacaaaccaacttttttcttcaagaaagaaaatgtggtcatggtacactacttgaattttaaaaaggaaacaaaacacataaactgaaagttactgtacatgaaatgagacaaagtctaattttttaccttctatcacacatgttcctataaaataagggatgaggctaaattccttccagatagacagttgagaacaccaacggattaactatccagaagggccaagtctcaagtatttctccctggctgcccagtctgatccattctgaagggttttaagttcatgagaaactggctacatgatcagtttataaatggatattaaggcaatttacttatcaccatcttaagacattcgggattgtcttgaataagtggttcagcttgtactgttttacttaagaaattctttgatataagaggaaacctgactttag

SEQ ID NO: 34084 - DNA, 1647 bp, Bovine  19866881310462
  misc_feature (1)..(1): n is a, c, g, or t
ngtttattcttttttgagccctttgtaaactacttttaaacatggttgagttttcataggacatggagtggatgtgggcagggtggggaggagaatggaagtgggggagggagtgtggaaagggagaaaggacaatggaatggcctgaatgtttatgaggggataatgtgtctcctcttaactagaaaaactgggaggcaaacagaaatgtgaaggactggaagggggaaggcacctgtacacataacaaggaactgtatatgagccaccaagtgactttaaacatattctcctttcttccatattctaacaacacccatgataagtaactaaaggaaatcaacaggcagaaaatggaatcactgcagagtctttacataatctctttaactaaggatctaattatacaaaccacatgaatttttttctagctgttaaggagccctgccaacaaaaattaacctggaaaacacttacccaaaggaggggtggtttttggaggtctgggtgaaggcaaaggacaaggtccaggcacttcagcttgcacagtgaggttgaggctaaaggttccattgagcacataggtgtgattcaaagtgtgattgttggaaacaaagagaccagtattatccccgaagttccacttgtagtaaatggcagactcattgaggaagtggctgggatcgtgaatcaggacactgaacgtaatggggagatccctgaggaaggtttcatcagatgaatttcgattgttcttctgggacatagtcacaaatacaggaatctgatctaaaatgtacatccaaaaaaaaagaaagaaagagggtacgattgcttgattttaagtgggtgacttcaacagtgcctttagtttagatattaaaacgaggggacaattcagcatcgtttccccttttctaatgcaagttttctagagttttctcggtttactttagaaaacacagatggaatatgttattaaatatatgaggttgagaaggagtccagatgaagtgtaacctaccccagaatatttggttctactttttcaaacccgctaacatcaccagaactcagcgcctcgtcctctgttaattcacagctcatatcactcacctgttactacatacacatctttcacttttgcgatgggaacatatgcccgtcggtgtcttctatagacagttacttccatgatttgagggccaagactcacattggctgtgttgatggaaattgtcactgaacactgtcccaatttctggaaatactgacctttgagaagatagaaatgtttagttattggctacatcatatcattatagaaagttgatgttccttaaagactaacaactaccatttacagattgttttgagaaaggaaaagcagggtggggatgcggtcttggttccttcagaaaggaagacagtgcttatttttatataaaaccttataaaatccacaaataaataaatgtagttgtatatgttgactaaaatgaaaagagctgtttaagtgggataatgctgttagtccttagttgacaaatactataagtaagtgacctggcacttgaaatacatgtgtttcccacagaaaatacatttaatgtaacagtaagtgtccaagggagttaaaaaatatat

SEQ ID NO: 34085 - DNA, 2011 bp, Bovine  19866881414759
  misc_feature (1)..(1): n is a, c, g, or t
nctctactgtggcagcctgttggatgaaaccaactctggcttctttttcctttggtgtatagcagagcaaatttgtggctatacataaaagagatttactatgtataatttctggttgtatgcagcaatcgacaggatctgtttgagtgcatcagttgtatatgttgacttgattttgtagcttccgtcaaagtagaaaccatctggctaagatgaagaaatgtttgacagaaaatactccttgctggcccatttagacatgagcttggcttcttgtgagccttatgtgggtggctctgtagttcattcagtctctgttactcaagaaaaatgcagttactatcttactgccagcaggagaattttacctttcaagactggagagccaaccaacggtcagtcattcagctgccgcagctgtgataatgtcagcactgtcgccatctttcctcgggctcctgccatctcttgggcggcaggccaccatcaggcacagatgtatccctgcagagggctgctcccgtggggccaggccattaactttacccactgtaaaatcagtcaacctttggcctttcctacctgaatgacactgataggctatgttctcatctgtaggctcagggaagaatttatggaaaaattaaagaagaaaattttgttagtcctaaagaagaggtgaaacttgaagctcacatccgagtgccgtcctttgctgctggcagaggttattggaaaaggaggcaaaacggcaagtacttcagcaaaacctgtgcagtggtatgacagggaaagcatcgaaaggtacttaggagttccccgtccctgaatttgggctaacttctaacagcaggacacctgggtcgaggtttggagaagactgccctttgttctcctgagggttggctgtcagccactggggaaagcagcacctctctcagaccactttgtgcgagaggactgtctcttgaggggccttttgcatttttctgttgataaacatcagctttttatttctgttgtgcaaaaatactaaatgacatgaaaactttaaaaagtgtcatctacctttataacttacacatcctctataactgaaaactcgtttgcagtttctctttaacatatataacttcaaaatcgtaaacagctttgaaaatgacttggaagtgactgcaagtatgttttggaatcagatttttagggtttaaattaggctttgttattgatgtatgtaactgtaggtaagtcagtttctttggggattagttttaattatcttgaaatgggacaatactaataaccaaatagaattattggtatattagatgagatttacaaagacatattttggtacaagcgttcaggaaatggtaatttttttaaaaataaaaaaaccccaacagttccacttaacatgatttctgtttatctccttcaggtgaatgagctccagaatttgtcaagtgcagaagttgttgttccccgtgaccagactcctgatgagaatgaccaggtggtcgtcaagataactggtcacttctatgcttgccaggcaagtgggctcccgtgtgtcagggcagctctacagctgcctccgcaaatggaagccattctcccatgggtgtctccatgccgtacaaatattcaaggctgtgtttgatgcttaatacgttaaatcccctttgagcaggtgattttagagactctgctagcaaactaattagtacatgtctttaatcttcaaattttaatttgaagttaattttaaaaatggaagaggtaaaataacttcctgcaatacttgatcaggtaggtgtttcaaggttccctccttttgcaggttgcccagagaaaaattcaggaaattctgactcaggtaaagcagcaccaacagcagaaagctctgcaaagtggaccatctcagtcaaggcggaagtgaaggctcaggaaacagcccaccacagaggcagacgccaaaccaaagacagactgctaaccaacagccggg

SEQ ID NO: 34086 - DNA, 1037 bp, Bovine  19866881416694
  misc_feature (1)..(1): n is a, c, g, or t
ntaacactggacagctctgaatacaaaaatctttaactttcccttttcttcagctcactgacattattctaatcgttttcttttctcttcattatattctgctcactgacagtattttcatctgtttggttatacaaaatgcaatcatttgtttttgagactaatgaaggcatgccaagatcctttccactgattaagttacaaataatataattagagatgaaaaggtttgttaaccaattaatttgtcatagttgtacctccatcaaaaccactcctcacctatgtcattctcaacatccaaattcaggaataacacttcacagtatatttagtggcaccagccaagaatatggctctcaatattttttatttaaaaataagtggtggcatatgagtttactgagaaataaaaccacagaaataaatactcctgaaagattttaaggcaaaaaaaatctatatattgctccctgtaatactgaatacccccatattttgaaaatattcaaccttttatagttaaactagtaataccactcaagcagaaattgagtggtaccaatgatatagctttatcaggtactttcaatatctagtgaagacttcagccctgtaagagggttccagtggccgagtccagaatcagactgcagatgtccaactctcagttccagtacttactgtgtgaccttgggcaaattacctcacctctctgtgcctcagtgccttcatctgaaaaatcagaacaatgagagtattctcttaccacctcatcttggcaggttattgtgaagaaagtaaaactgtattgtccaatatacggaaaataatcattgtcattgccattgtcatcattctggatggaggccaattaactctctaatctagcctcacaactctgccgaaatggtcttcctacagccctgctctcatcctttctcacacttgcccacgcttgacaaaacctctggcattttttcactcatcaagtaatctgccactccccctcagaggaattttcctttctgggcagg

SEQ ID NO: 34087 - DNA, 1277 bp, Bovine  19866881562163
  misc_feature (1)..(1): n is a, c, g, or t
nagtttgattttgtattcgggaggctgttgtttttgtgtgtgtgtctgcgtgtgaacaaagtgtgctggggcaaaagtattgagtatcctacttttagttttaattttactggcttttataatgcttgtgactttgcacgtgtactttttttaaatgtgtgtgtgtcacttcacttgtgtccgactctttgcaactctatggtctgtagcctgccaggcttgctatgtccttgggattctccaggcaagaatactgaagtgggttgccatgccctcctccaggggatcttcccagcccagggatcaaacctgcttctttgtctcttgctttggcagatggattctttaccactagtgccacttgggaagccctttttatatcttttcatgataaatatctctttatatcactgtagactttttattgaatctagaatttgtttcctttgctcccactgaagagggttcctagactgtatccccaacactatcctatcatcttcagaaacgcacacgttcagtaaggaggacttggaatctagggtcatgcatgtcttatccattatctggagcacgggagccagtgtaacatttaggaagaggttacttgagacactacttacgaataatcacatcactatggttaataatcactaatcttgtgggagaataaagatcagtgaagagatcatgaaatgaaattgctttctcttccaggattaggtcagctcaggtgctgtggaaatggggacacttttcacagtcttgagggtatggctggagccaagtgtgtgagggagatgtgggcagtaccagatcattgattacctcctgcaccaggtagaagtttggcattttgaagacactgaagagaagtaacttccagcaggagggcagttactgggctggaagaaagaattcaatcagacccttgcttcagatgattcagaattgatgggacctgagcggtgggtataaagaataagtcatcagcagtagatatatctgcagagcatggattacaccacacccataggcggtcaggcttccctgttgacccagtggtaaagaatccgcctggcaatgcaggaggtacaagagacatgagttcgatccctgggtcaggaggatcccctggagaagaaaatggcaacctactccagtattcttgcctgcggattccatggacagaggagcctggcaagctgcagtccatgatgaggtcacaaaagagtcggatacaacttaccaactaaacaacagcaaccataaggggt

SEQ ID NO: 34088 - DNA, 761 bp, Bovine  19866881703884
  misc_feature (1)..(1): n is a, c, g, or t
ntgttaaatattcccaacatagactaccagacaccaacatataaagaaatgaatctatctttgttgtgagattagcacaggacatttttcttttccagtgtgtaagatggtggtatggttcagtccctaagtcacgtctgactgtatgacctcatggactgcagcatgccaggctcctctgtcctccatatctcctggagtttgctcaagttcatgtccactgagttagtgatgacacaggattaataacggatctgtactctttattctttaaaagtaagttggctgggctctggttctaagggaaatgccgtaaagcccgtgttgttgtctctggagagcttgagtgggtggttgggccatgtcctaccacattggcttgcttgcctgttggggagcagggcattgcagcagcattctctcagcctcagtatttggtaaacagaggccccagtgagaagaaatttgccaaattggctggcttcatcagtatcatgaataacattcagaaatagtgatttaaattcactacccaactatagttgaatctacagtctacccagggatttatacccagggtcaacttgcaatcatgctgggagaaactgactgcagaaccttgttgacaagctacataaatacaaagaaaacattgtgtgatgtgattcttatggcccaggaacgaaaggtacctcatcatgttgtccttggtgcagccagtcatttttttaaactttatgctcacaactcacatgcttgaa

SEQ ID NO: 34089 - DNA, 1370 bp, Bovine  19866880737029
  misc_feature (1)..(1): n is a, c, g, or t
ntttattttttttttctgtagcatcttaatatctccttcagtccttaatgttgcctaccataatttatgagttaaataatttatatttcgttttagcttcagatggagaatccaaatatatatccatatataaatatatatatatatatcccccacacaacacatacacacacatatattccctcttttctaggacatctctccctttataggaaggaatacaaaatatggcatacactttctctcaagatgcctgtttttaaaagagggatgtgattgccaagaaatgaagtagggagaaagcatagggcaaacataacttcagcattctctgctgcacctactgcaaagaaaaaaaaagtcaactatcatgttattcaactccaaaattacttcctttaatgagagggagacaaaaagagaaataaaacagtcgcccagtgcaaatggatccacaagctcacacacatgctgccgtgccaacaaatcccttttctttaaaataaaagccctttagattttaacacaagagtatatcccctgttgctgcaatcaacattttgacagagcaacaacacatttctctgtagcgattacaggagcactcaggttccactggttacctttttgcctcccagctcgggaaggacagggaacggaagccctgggcaacctggaagctgcataacacaacattgacccttccttaattacagtctagtaggcagggctggtagcatttacagctcttcctacttacagtggggttaagtcccaataaatccattgtaagttgaaaatatcctgaattgcaaatacatttgtgctcagtcgctcaggggtgtcagagtctttttgaccccatggactgcagcccaccaggctcctctgtccatggcatttttcaagcaagaatactggagcaggttgccatttcctactccaggagatcttcccaatccagggatcgaacctgcgtctcttgcggctgctgcactggcaggcagattctttaccactgtgccacctgggaagcccccatactacacttcctagccaaaaggctgagaagcgaaatgcatttagtacaccaaacctactgagcatcacagtttagcccagtctccctttaacattcccagaacacttagattagcctacaggtgggcaagtcatcagacacaaagcctgctgtgtaataaagtgttgaatttctcatgtaacagactgactactggactgaaagggagaaacagaacagtggtgtaggcccattatatttttatatggtgggaagcagatcggttgttgaccattgtgatcatgggcgactgagagctactgctgcttcgcccagcatcaggagagag

SEQ ID NO: 34090 - DNA, 1189 bp, Bovine  19866880893114
  misc_feature (1)..(1): n is a, c, g, or t
ntgctgtttgctgatgggcagcatgactcactatccgcagatcatttttctaattaagtggggagatggacagatattttcccatacttgggcagaagcctcatttgcttgtgtctttttactgcaattactcagctttatattgaaggggcgattttctccactttaaaaaaatagtacatgaaacctgccccttcagacaatgtgtggggaacatggaaaggaaatgaagcacttttccaaaatgcaccctcatgagagagaagaaacaaccttcactgagcttcttccacaaaattgccatagatgggaatgcccagctccctattttatctttaggatgctggctggcgtttaaccttcctgaaacgattcccatcctcctcctgctttctggactcctctcccctcagccactcaactgaacaacttccttggggcagcagctttattctgtgaaggaacgacaggagcttgcaggcaaatcctggggtctaggaagtgggatgggaggtctagctcagtgatagcccttcatggagatgcaggagcaaccatggtggaatttgaagggtggacaaggataaatttgcacagtgtcactctcatagcctcaagaaatcaaataactagtccccctctcttctaggctcagaaatagctcctcagataaacccaattcaagctcaagtgctcaaagtgcattgtagacagatactgctatgaggattttttttaagtagaatgttagtagctcctggaagtcccactcagtcccccatgagctgaagtcatggaactcaccagttggctcagccccctctcatttctgcctccaacagggtaagcagccctggcactggtctcactgctctttcactgcattcattgggcccttgtacaactttccagttatgagtccagtcctgaatcccaagcgtacttggacagaattacatttcctgcctggcttttgccaggctctttctccaagggactacttcctataacacacacacacacacacatacacacacacatacacgtttgcctctgccatgcctaagtcttccacacccaaagaccacccaagaaccagtattcccaaccccaccccttccttaatagcctcaatagtggctgcaatcccagcatgcctcctgcccaaattatgacaactcgcttaaat

SEQ ID NO: 34091 - DNA, 1116 bp, Bovine  19866880939259
  misc_feature (1)..(1): n is a, c, g, or t
naaaaaaaaaaagagatggagaaattggagaatataaactaaatgaaatgggagcactgaatatgaaataaaaaatgtgaaacaaactagataaaaataaaagatcatcatatagtccagttgtttttaaacatgactgttcattagaaacatatctggagctctggagaaaaaagccttttttattgcacagctctcacatctgtacatgactactgggaaaaccatagcttagactacatggatctttataggcaaagtaatatctctgctttttaatacactgtctaggtttgtcattgcttttcctccaaggagcaagcatcttttaatttcatggctgcagtcaccatccacaatgattttggagcccaagaaaataaagtctgtcactgtttccattgtttccccatctatttgtaggagagatgtggtcaaatctataaaggaggtaattctgataacagtatgacaaatagatgtgagcaggtcaactacataaaggtttcttgctatagtccaaacaagagaaaatgaggactgaaaccaaactgtaagtgaggatagagaggaagagatggagttgagctgggttcagtgagtaaaactagcaatattgttgagaataaatatagggaagtaggaagaagtttagggcaactttttagatttttaacttgggtaactggatataatggtaatgatgttctctacaataaggaacatagcaggagaaacaggcttttgggggaccagtcaaatccagttaagacatgacaagcttagagaccatatgggacttccaagtgcccatccagcaggcaagtatttctatgtcatgttagatatcatacatcaaagttctggataagatttcagagttatgagaattcctcaaactaattattggctcatccatccaggagtagagcttgctgtgtttggacacagctggattcagggctccagcctcttaaagtgttcctcagttgtcagattctctttctataactcatactcttttgctgtcttcctccaggtagagaaaaagttggccactgaccaccctaggcctgtatctttacaactcactatccaaaaggaagacagtctttc

SEQ ID NO: 34092 - DNA, 2014 bp, Bovine  19866881211694
  misc_feature (1)..(1): n is a, c, g, or t
ntgtaatttctttgtaatcaggttgcagatcacaaagggaattttgaatcttttctcctgttttgctcgcaagtcagttgacaaaaaatctttaggtggaaaaaagaaaagggtatttgaacttaaatctaccctgagtttatagctcctccagctatgaaataatagatgctgggggactgatccagaagtacagcaagacaagtattaaagtcatcagtgtgttaggaagggggtacaaaagcccactgatttacattcattctggaagagcagaggggaggaaggcagcatgattctatgggattctgttccctttgtgttcctacacttgaaaggaacttttgctggacacccagcttcacatcccatctgccaaggcattattattgttcccatgtcgacatgagaaacatgtgactcagaacagtaaaatcaatgcttcaggctgaaacccagagtctaatcacagaagtaaacgtgccagctatttctggcacctaagcagagctcattctgcttttaggacactgtaaattggcgatggttcagggtgggttagccagtggcgtttcggtaaattttaataaatgtttgtcaaacaactccttgggtggggggaaatgtatgcttatataagtacacaagtttgttacaaattttagtgatgtgaacatctactacataccatttacaaagaataatgaaatatacagtgttctttatcatccatcccatatagccagttgattctcacagaattattttattgatttttgctaaactcatagccttagccaacctctggttgcaattgacaagggacgacagttctgacatcaatattgattaatattttcctttacacgaatgagtaaaacagaagtgaaaccacagagaagaatgccagaacctcactggtttgtcagcgacgtgaacaacctcattgctgaatctgaaaataccttctggaaaataagttcttggtttttgtgctagtcacagtggctcaactcgagacatgactcacgtttaaattaaacctgctttactaacatttcttccatcattaaatcaaactctgatctgcagcgtgtgccgatgcctgcgggtaagtgctcctagtgtggaaaaagtcagtgccgatgtgaagtcatgaaatgcactagggcacgtttccatcaagcatcggcatatgcacatacatacatcatacaagtatgacagacaaaactagcaccaagaccacaggtaacagtacactatggtagaataagtaggaagtgatgcatggcacagtggtaaagaatctgcctgccagtgcaggagatgcaggtttgatccctgggtcaggaagatcccctggaagagagcatggcaacccactccagtatctacccagggaagacagcccctcctccccgctcccatgcaggttcaatgttacagtcctcagtcattactgatcttttgtttaaaaactcagggctttctctgaacactgacagttattagttgaccttgggaaagttgtttgaccttgacactcattcctttcattgtaaagtggggaagttcatagtttcaccacagtatcactgtgaggactgataaagcaaccagcacagagacgaccgcacacacgctcagtaactaggagtttgcaccccagtctgcccctccctatgtcctggggctctctctgacccccattcattctacactgacccccactcattcttcccatctctgtcattatcatttccaatttctgtgcccaaagataactgaccatatgacctttctgactaggagaatacatacacataaaaagcagtagtaacaaggcttttcatgtattaactcatttgattctcctgacagttctatgaaggaagtgtttttctttgctccattttgcagatggggaaaatgaagtccagagggaacaggtcacttacccaaagtcacattacacctttcctacttgatctcatggcctctagttacaagg

SEQ ID NO: 34093 - DNA, 935 bp, Bovine  19866880113431
  misc_feature (1)..(1): n is a, c, g, or t
ncatattgaaaagcagagccattactttgccaacaaaggtccgtctagtcaaggctatggtttctccagtggtcatgtatggatgtgagagttggactgtgaagaaagctgagcaccaaagaattgatgcttttgaactgtggtgttggagaagactcttgagagtcccttggactgcaaggagctccaaccagtccattctgaaggagatcagccctgggatttctttggaaggaatgatgctaaagctgaaactccagtactttggccacctcatgcgaagagttgactcattggaaaagactctgatgctgggagggattgggggcaggaggagaaggggacgacagaggatgagatggctggatagcatcactgactcgatggacatgagtctggttgaactccgggagttggtgatggacagggaggcctggcgtgctgcgattcacggggtcgcaaaaagtcggacacaactgaacgactgaactgaactgagactcatgagtcacaccttctcaaggcagaaaccagaaactgggttacccagcctcctttgcagctccagcacagacatgtgactcagatcccaccaatcagattcattcattcactctagaagggaagtactggagtaaggaggcaatgcccatagtccacagtgctggcaagggtggaagtggaagtgtccagctttgggtagaagtgacaacaagattaagttcctggtccaagaagtgcaatcagtggggagtgacagcaaaggttctctggtgcctggtgggaggcgagtccggtttccccatcagtctggttctgtgtgcagcagggcatcaggcctggaatatgagcctccagtctggctctctacccctccctgcgactagacaagacacccagtattcctactaatattcttcaatcagtcagagtcg

SEQ ID NO: 34094 - DNA, 3974 bp, Bovine  19866880420616
  misc_feature (1)..(1): n is a, c, g, or t
nataagagagatgtatttcctgtggctgcaagaacagatatttgaaattcacagagaaacagattaagggtcagtcaataattttctaataggaggagaaaggcactaagaatgctgaatgtgtccctgtgccaaaaatcaaatgtggtttatttatacaatgaagtattattcagccataaaaaggaacgaagtactaacacgtgttatcaatacaacacagataaaccttgaaaacactgtgctaagggaaagaagtcacacaaaaagccgcaacttacatttaaataaagtaggcagaatggacaaatccacagaaatgagaagctgatgagtgattgcccaggagtaggggtgttggggggatatagagtggctgccaatgggtaccagatttctttcttttgagggtgataaaaaatgttctaaaattgattgtggtgatggctccacaattctgcgaaattactaaaaaccactgaattgtatactttaaaatagtgaattttatggtacgtgaattatgtgtcaatttggggaagaaaagtaagccattaaatggttttaagctgggaagtgacatttttcatctgcattttagaaagaatgtgctctggccacggggtagaaaacaaactggaagcagagaaatcctgacagttatgaggctgttacagagtcttgatgagagataatggtgacccagacaaaggaagtttagtgcagatggagaggaaaggtcagatccaagaagcatttaggatggatgcagcagattaaacatacagtcaaaactgagatgtgcagaaatacgagtttctttataatcgaattcaacttcattcttgtggtggtttttaaaatgtcctcaaaatattttgacagtcattccttcagaaggtggagtctagttgccctctccttgaatgtgaccaaatttagtgactcacttctaactaatagtatgtggcagaagcaaggctacattaattccaaagctacataataacataacaggctctctctctctctttttcttactgcccgctctgggcaaaggcagcaccgtgccatgaggacactaaagcattcctgtgaagagccccacatggacaggaatgagccctcccaccaccagccagcaccaacttgccagccacccgagggtatcatcttagaagcagatcctcatttgcccagggaagtcctcagataaaatcccagccctgagcctttgggtttcccagctgtggccacagtctccagagtccctgacccactgaaattgtgagagagaataaaagtgatcgctgtgctaagtcactgagttttcagatcatttgttatgcagcaataaataaccaatacagtgctgaagccctatgcctactgagagcagagaacaattaaccttgccaagtaaaggtaatagagtcacttctctttgaaaacttaagtctctttggggtcaacactcagcttcaaactgatttgaactcagagttcaagctccctatctgggctcctggttttctctactcttgccctctccctaggatgtctcattcatgggagtttcatgtaacatcacggccctgaacaagggctcccctgccctcctttgagggctggcttgtcctctgtggcccttgggcattggtttctgcttctgcagcatctgccactgaagtggctatgagccaggtgacctgttttctgtttcccagatgtttagttgtgttgtttagtcactaagtcgtgtccagctatcttgcgaccccatggactgtagcctgctacatgctcctctgtccatgggattttatagataagaataatggagtgggttgccatttccttctccagggtatcttccccaacccagggattgaacttgcatctcctgcttggcaggtggattcttcactgctgagccaacaggaaagctcgttccccagatgaggccactctatatagttagttgtacacattgtgcttgtatagagggttcttccaaggggctgaatgggaattttaatccagctgtgccctgctcaccaagctgagacagtccagaggagagggtgctttgggtaattcatcctcccagaaggggcgcctatttgcaaatcccacaaaggcacagatccaaacatcagccttcccccaccccgatccttctaacagagacccctacctcccaggacagcaaagagtaaggagactaaggcactcacacctcaagcacaaatttaaggcaatgcccccaaaactcagcaatcaagatcgataatattttaccatcggctgctgctgctgccaagtcgcttcagtcatgtccgactctgtgtgaccctagagatggcagcccaccaggctcctctgtccctgggattctcccggcaacaacactggattgggttgccatttccttctccaatgcatgaaagtgaaaagtgaaaatgaagtcgctcagtcatgtccgaatcttatcaaccccatggactgcagcctaccaggctcctctgtccttgggattttccaggcaagagtactggagtagggtgccattgccttctccaatattttaccatagtattttttaattcaaatgaatgctgaaaattgaaacaaaatatcaaaagtttaatagggacaagatccaacccatctcttgcatgaccctgtctcactcgcctcattgtaatcccagcccttgttccaataaaactttatttataaaaccaggcagccaaccccaaggccacgacttgccaatttgattttttttttttaagtacagcagtaaagtattatttattttgattatccaatcgctcacctcctgctagccctggcttgtcccaccagccctcatctctcagactggggaccactctgtatttcctggattccagccacagaccaggaactaaaagggtagcagaggaaggctgctaccagaggcagtatctcaggccctctcccttctgctctacagtgttcaacccctgctggtacagggcattctgggagttccagagagaaacagggcacaaattgccttgggctgggcagacttcctgggtggtcttcatcatgccctggggttctggtctctaagtgaaaactgagggtgggggaggacagagaacacccatctgaactctagctctctgtctctttgggctccccgatttcccagggaggaatgcctccttgtctggtatggaaattaccctcaagcccctgatttgtggttactgttttttcattcattcagccatttacttcacagtcaatcctcagtctctactatatgccaagatttgccagattctagagatacagaggaaaattctagtactgatgggtcaaacgataagagacaataacatttataataattaaagtctcttatataaagtgcaaaaatcaaagtgtgttcaggcttagttgtggcagggaagagaaagtgattgcctctctccagaagcctcaggacaagggaggtttgatccccaaagccgacaaagaacttgaatgagtagcagcagtgcatatagaagtaataggatcgatataaacagagagaggcacattagagggctttcgtgcatgctcagttgcttcagttgtatctgactctctgccaccctatggactgtagcccgcgagtctcctctgtccatgggattctccaggcaagaacactggagtgggttgccatgccctcctccagaggatctttcacaaagagtcagacacgactgagcgactgaactgaactgaactgaactccctctaatggttcaagagggcttccctggtggttcagcagtaaagaatactcctaccatgcaggagcctcaggagacatgggtttgatccctgggttggaaagctcctctggaggagggcatggcaagccactccagtgttcttgcctggagttaggcagttgaccggagttt

SEQ ID NO: 34095 - DNA, 2766 bp, Bovine  19866880557813
  misc_feature (1)..(1): n is a, c, g, or t
ncctgtatcctgcatcgaacctgggactggtgattcgtttcttatatgatattatacatgtttcaatgccattctcccaaatcatccctgcctctccctctcccacagagtccaaaagactgttctatacatctgtgtctcttttgctgtctcgcatacagggttatcgttaccatctttctaaattccatatatatgtgttagtatactgtattggtgtttttctttctggcttacttcactctgtataataggctccagtttcatccacctcattagacctgattcaaatgtattctttttaatggctgagtaatactccattgtgtatatgtaccacagctttcttatctgctgatggacatctaggttgcttccatatcctggctattataaacagtgctgtgatgaacattggggtacatgtgtctctttcaattctggtttcctcagtgtgtatgcccagcagtgggattgctgggccataaggcagttctatttccagttttaaggaatctccacactgttctccatagtggctgtactaatttgcattcccaccaacagtgtaagagggttcctttttttccacaccctaaaatcctcacttttaacagttgcatattattacataacatgactgttgttgctcagtcctgtctgactctcagcgaccctatgggctgcagcacaccaggcttccctgtccttcactatctcctgcaagtttatgacatcatatatttaatcattcctgttgttggatatttattttgtttaaaagcttttaatgtaatgactttacttcagtgtatctttctacatagccagagatggagccaaggtagaattactgtgacagagaatgtgaatgttttaaagtatgtattgccaaaatgcttaatgagtaaatggtgcaattttatatttttattaacatcaacaaaaagaattgtaattaaaatttttgcattacccttttaatgacctttttctctttatgaaaatagtatgtgttataagaatatttaaaaaacacaggtgagcaatgctaaaaaaagttagaatcttaccacctagagtcagacagtaattgacaacaggtaatatactcattgccattcttatgtgtttagaatcatgcttgctgttttttactaggagtatcttgaacatctgaggatgttatatatttcttctgccacagtgattttcgaattacttcaggtaattgcaaagcagttcattctttctgtttttttattcttcctcttccagacctcttcctgtgccaaagctgcctcctggggagcagtgtgaaagtgaggaggacacagagtatatgactccttcctctaggcccgtgggacttcaaaagccagacgtgaagtggcctccggagatagcacagagttcacggtaggttcacaatagtcctgttagggaattcagttgacaccaactcactcacctgcttggcttgctgcctgcacatagcattatccagccaaaaataaagcagaaagatgtgtgtagccgctaatgttttaagcttcttgcagctgtaagcagttcaacttaacatttcttcagcatcacagtaatttcaaaaacatacacagctgttactcgtaataggagtcaatcttatgatatttactagtagtgacactggtgaagggagagtgttatcttgatagaatcagggtctagagaagttgtgaataagtgactcctggtaagtctgcagataacagagttctgtttctgaagataattatgccactttccttccggtccagaacgtgtgactgtgaccagcagatcgatagctgtacatacgaagccatgtataatattcagtcccaggtggcgccgtctgtcacagagagtggtacctttggtgagtagtcattctgctactttattggtttgtttatttgaatttatttatccatttggctatgccgggtcttagttgcagcacttagttgcagtgggatctttagttgtgatgtgtaaactcttagttgcagcatgtgggatcttagttccctgaccagggatcagacttgggccccttgcattggagacacggagtcttagccactggaccaccagggatgtccccagttttgctgctttaacaatcattgatatgccagaggaatgagctggtaatgtctggccaatgaaagcttgatctaagtgaaatattcttaaataattttctttgcaaaatatctttgatctatggcagtaaaggcctttcttctcttttatttctcacagccagttccatttgggtttttcatccttccagggcctggcggcctttgtgttatatggcctggacctgcagtgctggcagctagctccctcttactcccattgcttttcaacattgatgaaattcttgtgtgtgtgggtggtgaacactcaattcccatgttaactagcttaccaagttgaaagttcaagaaggcagtacatacaacagggccctttggctgatcttccaaggtgaaatgcagatgaaaatattgactgaatgctgtaaagtggtgcttgagtcttggatttcagtggctgttaaccttggccagggttgcttttgacatatttagaaaagtagagctgcaggattggtgcagattttaggttccttgtttcttttatttctacccacagggccacacagtgtttggcccataatggatattcagtaactgatgccatatatgcttgatgagtggatgtccctgt

SEQ ID NO: 34096 - DNA, 2922 bp, Bovine  19866880585891
  misc_feature (1)..(1): n is a, c, g, or t
nacctgctgtgtccactttcaagcctgccctgtgccccgtgtcagctccttggactgccgggctggacagtcccagccttctattcccaggatgcagccctcactgggctctcgccatttctgtgctcggaaccccaattctgccttcactagagctgggccctttctcctccgtcctctgcgtctgatttgttgtcagctcttactggtcccatttctacaggaccccccatccccaccccagtctaaacactgccaccctctgagacatgcgagtgcggggggctctccctattcccttgtggcctgcacacacagagcaaggagatactggggcacatcacactcctgctctgcctgaaaccctcgtgccttccccatcccctgccagtgctgcttcttaagcacacactctgtgaccgaggccagggctctcacccgcagttggcactgttgacgtcctgggccaggtgattccatgcataatagaatgttcagcaccatctccggcttccatccaggtagatgccagtggcgtcctcccaccatctccctccatgggacagtaaaaaatgtcctcagatattgctaaatgttccctgggacaaagatacccccagttaggaaccactggcctaggcttttgctgtagccagaagatacttttcaaagctatctcccccagcctgccatgggcacattcaaggttccatgtcttcaatcttcctaacccagggatcgaacccaagtctcctgcattgcaggcagatgctttaccctctgagccaccagggaagcccattcaaggttccagcaggaattaactgctccctctcagctcctcctcctcctgctcctgctgctgggtcagtccaaagccccccgtgtgaaaattgctgtgaaatgcttggttgccaaagggccccatcccctgagttctttgccagcctctgggactgcattgtctggaactttctctctgcccctcaccctagaccctgagtctttgaaggggaggactgaaccttacaatgtcttcaggctccagctcagtgctttgaacacagtaggtgctccataaatgtgcagtacaccaatgggagctgctggcttgccctccttctcaagcccagtaagctctgagaattccttcctctgcatacctctctgttttcctggcccttcgtctaaccctataaccaaggcaggagaaaagggcaacagaggacgaggtggttagatagaatcactgattcaatggacatgaacttgagcaagctcagggagatggtgagagacaggaaggcctggcatgctgcagtctatggagttggaaagagttggacatgacttggtgactgaacagcaacaacataaccaagatgctaaaacttctgatatttccctctctcctgacacttcccatactcccctcatgctgtttgctgcaaacaaaagcatctttttcccacaaagtcaacatttactaagtaccttccgtgcacggagccctggggagcaggggactctgattttcatgtgtgtgtgaaggtgttcctggctatgtggtttcccagcgtgtgagctggtgcatcactaggcatgtttgtgtttgagtgcaagtttgtggggggtctgctcctccactagctgctgcaccctgggctcaccccctctactcgccatccctcacctttcattcctcccggcctttgatcacactgtcttctctatttaggggtcctacttcactgcctggcaaagtcccactcatccttcaaggccctttcttctctaaacacccctccccaagttcatcatttcctcccttttactgtcatggcacttgtaaacattcctgccatggcacctgatcgcaatattaatccatcgtcccttgaccccaggaccatatcactcttttactcgtgtgtgtgtgtgtgtgtgtgtgtgaaagagagtgtgtatataattccttctctcagtcacttgatagattcttaatacatgtttattaagtaaattgaaataaattgcttatttcatctcctaaagcattttccttgtacagttctaagaatgtgtctctgattaatgactttgcttaacctttttgcgtgtgccctatgtgtttctgtgcctgcaaacatgcacaaacacacacgtctgtatgtatacagcaatgtttaattgcacgtgtgtgcttggtcatatacacaggcaggcatgtgtttcgtttcggtgtttctgtaggtttaaatgtgtgttccccccaatgcagccactcttcaagccgctcacatttgggaactgagagagtgagggtgcaggagacaggggatgactccctccaggtgggtttctccgccccttctgagaggctccttccagaattcccttctgaccctgcccctggtctgctgaaagtgaccagggacttcctgtccatcctgtggcagcccagcatgggcaggtggggttggagggcagagccttctgtggcccagtcacatcacaccccctttctgatccatctctgccctgtttaattggaatttggctagtggagaccatctgttctattccgtcctgtttccatgacaaccaagtggcttgagactgaggtttgtggttagagaagtggcctgggggatgctgggaaaaatcagcgaggtcctccccctcagaccggctccacctcgccttttcctctctgccctgccctcacccccaagcccagagtaaaaataaagtgattgcttgccagggcatgaagtcccccagcaacgctctgcctgcccggccggcctgctctctcccaggctgctctgggctccccacacacggctccctcctgcttccattcataagctccggctagagagatagccctgcccttttacccacatatggggctgaaag

SEQ ID NO: 34097 - DNA, 1256 bp, Bovine  19866880611908
  misc_feature (1)..(1): n is a, c, g, or t
ngaaggaggggatgagacgggtgtgggtctaaaatttactggagcaacaagggctacactctcaggaagagacccccgaatcacagaggtgcagacccctgtggtgccagggtcacctgtggtggcttgtggacacgcatggcttagacctccgccctgggcagcccctctggatccacctcagcttttgtgctgtgcccacacttccccaggctgctcccaccaatggctggacgtgatggggtcctagtgcagctggttcctgtggaacgggaggctcctctcattgcagctgtggcttcgaggtctctctgtggcctgcccagagcttctgcagagtgtgtggtcactcaagactcttcccacgcaggcttccttcctcccccatctccccatccactcctcctccaattttggtccttcacccgggtccctccccccatgactctgtgtctgatcccatcttggtgtctccttcctggggaaaggaaggagacaaaccaacaccaaagctttggaactccatccctccccaggtcgttgcatccagtcttctgcttctagtctgggctgtctatcctcccaagactgaggagctgggagcccctctccctaaaggtgaggcagcactccctcctcccacttcttctaggcatctaccttggagcctctggaagtcctccccaagatctagccccaagccagccagcctttcaaatggtacctgctgcctgagtggactcctggcccagaaacctcgatagaaattgagagatgcgtcacacccttgctgaatgcccttgagtgtgtgggcagcatgggacctggcccacccaggctggggccagtaggcttggaagggggagtctctacctgttggtccctggggccccctgcaggcttccctccagagccctgcctcagtgaacggtgcacgctctcttcttggctccctctcactacttgttgggaaggagaattgatgacaacgtcaataatgtgacttgtatacaagctgcaccgccaacaaacccgagtgctgggaataaatcctctccaggccccgtaattgctctgtaagccgaaaggaatcacaccagtcttggcaacaccggcgcctccctgggatgctggaggtgaccctccgtgtaccaccccacaggccgttctcacaagtgtccagccaccctggtgccctcatctcacggcctctgggtccaagactcagagtgcgcccatcagctaacctttcctgc

SEQ ID NO: 34098 - DNA, 1859 bp, Bovine  19866880627249
  misc_feature (1)..(1): n is a, c, g, or t
naaagtggagatttcttctttcaggtagtgaaggatccaactcctcttggagcccatgtcttctgatgagtggctgaataatcacaatttactctgccaagcaccatggggtattaaatgcatgatccctcttgaacttcacagcatcccataaaacaggaatatttagttgtatttactacagtggaggaaccaaaggcccagagaaggttaaatgaactgttcaagaggcaggaaggagtggactcaaacacaacttggcagactccacaaccagatacactctttccctacaggtcattttaaatcatgagatcattaatttgtcttcctcctccttccccctcagtgattgtgggtagcatagaaatcaaagttcagtccagattttggctatatctcatctaactcaacttcctggaagaggtgggaggaaggaaggacaaaggtgtaatcctctctgttgactggtgcgcaaagaggaacacccatctagaggtcagcgatctgcagcagcgtggtccttgtccatcactctcccacctccctgcttctgtcctgcggctcagtcatcattttcctttcccccatccctttgctatcttggcacacgggtgatctcagttagactttgggaaggactttccaagtctttcgttgagaagtttcttggacaatttatatacttccaaggagaccatggtgtgggggtcagtttgctatttcttgcttttgtgtttagactgagccggctttgttcttctttgttctcgccttttcccctcgttgtctacacacttccctgacacagagcagtcgccccatggagcatggccccgaagccgaggggtggagtagaagccgtgttcggggcgatcgtgacatagtcttgaaaaaactcccatctgtcatctctggccttttactgttgtaacagcacttacggtcccagccaactgctgaggaatctgtctgtggtttaattagcctataactccaagcctcccccaccacacaagaaagcaataaacagcttccttcctcttagtggggctgggcagccatggcagggggagccatatgaggcttggggccagtgaggtcttaaagacaaatgaaggactcggggacctgcagggaaggactctacactcgtgcctcccttccctgctaaggtcatgagagaccagccagtgtgcttcaggggaaaataaccacaataatagaacaattccttgtatccatagagagctttccagacaccaagagctttcccagactctctttctaggtaccactcggaacctcagtttcttcttctgtgaaaagagggctttgggctcagtgattcctgaggtctcttctctatctggacccgctgtgggttccacaatcctaacaaaatccctgtgatgtgcctggagcgggtgtcattagcctcatcctatagttgagaatgggcctctcccgtggctaagcagtaaagaatctgcctgcaatgcaggaaatgtaggagatgcgggttcagcccctgggttgggaagatcccctggaggagggcatagcaacccactccagtattcttgcctggggaatcccatggacagaggaacctgttgggctattgtccatagggttgcaaagagttggacatgactgaagtggctgaacacgtagtcatgcatgcatcattgagagtaaccaggagcagagaagggaagcagttcactctagagtactcacagaaccctgccagggccaggcctggaactgcaggagataggaagagagaaagatggatcttgatatctgccttcttaactcaaggaggtgggaggtgggagggcagggtctgaggg

SEQ ID NO: 34099 - DNA, 1170 bp, Bovine  19866880628190
  misc_feature (1)..(1): n is a, c, g, or t
ncacatacccacacctacatgcacacacaggtcattcgtgtctacccctgtactccccctggggtcacatgccttacccaggctggacactgcccaaggcccgcctctctgctccatcttgcccctccttccagcggagaatgggacaggggcgggggtcggccttcagaagcttccagggagagctgaggcaagccccctaggtgcctccaccctagcatctcaggccggcccttaaccacttcctacagcatggaagtttcttgagtttctccctacctatcaagtgctagcaactcttgattctcttggggagtccgagctgggatcccagaaaagagtgacctccgggagtggaggaggatccacgcagagggcactggagaagtcagcaagcacagttggagctctgccatcacgggctgatgagactctagagtgcagggagctcctcgcccacccaagagaaggacagcatgaggggaggcagggtcaaggatcctgagtcagccgttcctgcaaaccacccgccccgtcctgctcagttctccctggtcatcattctggatggggtggcgggggaaccctggagatgctttccctttgagttgtagattcccttcttgaatggggctctgggttcctgtcaatcacccaagaccgatggtcttcccatggacaccctggaggaaggcccctcccgggccccctcttcgttcccccggctcaaagtgcctcagtccctccatctgcccagcccatccccctcagcactctggatgggagagaccctgggatgggagaggcaggttcgtgtctgcccgcgaggattctggtgaactcagcccagggtgcagaggctctgtgggatggcaagtgttgaggggagggaggcagaccactctgtgccccacgggcaccaacctacccttgccataggcttcccaagggagcctccaatcccctctcctactcctcccctcctgggtgctgctattgaacccctagccagctccatctctgccctggcaaccctggacccaccagctgggtcacccttctcacccagcccctgctgccctagccctagtccagtccacccagtagccacgtagcagaagtctgaagccatgccagccctggggcggtgctcccctctctggcattggg

SEQ ID NO: 34100 - DNA, 3099 bp, Bovine  19866880635251
  misc_feature (1)..(1): n is a, c, g, or t
ngtcttttccatgagttggctcttacatcaggtggccgagtattggagcttcatcatcagcatcaatccttccaatgactattcagggttgatttcctttaggactgactggtttgatttccttgcaatccaagggactctcaagggtctgaaactctagaggtggagtaatttcccatagttttcattgagcttgtctaaaataaaagaggaaaggccatctaactccaggggtccctactaaactgtacacactttagatgacaataactttaccagatgggtttcccttgaaagcagaggaggagagattgacatgtatcagcccacagcagcaactccctcacatcaaccagcacacatgttctgtctccactgcagtaacagcctgatggagacaggaggagtgcactgagtcggttcctcatgaagtgagtgggtattcttgaagcctgaaaaccaaggccatacagagccaaagccatgaaaatcttgcaaagggaacacttgagaggctcaaagaagtgtgtggaagtgagataaggtcaaaggcagtgggatgttagagattcatcaggcttaaaaaaaaggaggatacacaggacattgccagaaacagcgtccagcccactccattccctccccatgtccactgaaaatattgaaaatggtggaagattcagctgattaaaagagaagattaacagtgagaatgatgcctaaagagttcagctaaagcaaaaacaaaacaaaacaaaccagagccccacaagaaaacagattgggacttccctggtggtcctggggttaagaatctgcctgccaatgcaagggacactggttcgattcctggtccaggaagatcctacatgccgtggagcaactaagcccgtacactgcaactatagagcagctcccacttgcccaactacagaaaatccatgagcagcaatgaagacccagcacagtcaaaaatgaaactttttaagaaaaaaaaaaagttttgtaaaaggtagagccacactcatgctggacagaagagagagctttcccatgattgtaacttccagataaagttggactcgcaacaccttttgcaggaaggtgatacttagtgaaccagaagtgcctcaggaccagctaacctgggaccagagaacccatgcattaatatctaccaaggaaactccagctcccctggccaaaaagtgcctccaaaatctctccctgatgtgaaaagatcatgggtcatttggtctcaaacatcagtgccctcccctccccccacaggctctctcccatcaaagagccaatgaagctttatttcacatgtcagtattctgaaacacttgagaaatctctgtgccatccaaaagctggggcctgtggaacagtgagtgtttctactatagttcactgagaaatgttttcagaggtttttgacccaaagcaccaccacccatttagtgcttcaccttattctccagactttaatccaatgactttggggtatttccaaagatctagttcgccccaagataaatactcaccaacattcaaacccatatgccacagacttcccaacgagagctgtgaaggtgcgttgccggtgggacatgactggaatacatatcaaactttccaagaggattacattgaagggaacaatacccacttcaaagttctgactttgggagaaaaacaaactgaatctaatttttcttctcacagcggccactagcaatggatttgagtctttttttttttctttccagccatgtggtgtggcatgtggggtcttagttccccaaacagggattgaacccatgccccctgcagtggaagtccagagtcttacccactggaccacaaagcaagtccctctgagtccttccttatgttagttaattactaccttgagccctgaaggggtgagaagacaaggatggtttggtgactaggagtaagaaggcctgggctcaattctggctttatctttgatatcctgtgtgaccaaagacctgaacctgcttgaggctctggattttttcctttacaaaatggtacccataacgcctcctcaatgggcttgtaattctggccaaatgagatagaggatctagcacagtgttcggcacggcgtgcagtatgcatttattatgttagttgattctttggaaggaaggggtcgagcagccacaggtcctgaatgagtgcctgagagttgtcccgaagcctggagagaacaagggtggagatgggcattgaggagagagagaagagaggtgtgaatggggggagatgggcaggaaactgagagacaaacttacctacatgatgattttgtctaaggataggtcctaccacagggatacaggaaggggcagggtttcaacactcctcagattgactctcggacctaaactcagtaaatgaaagacaacaaaaagttcttagaaagatttctttattatcctagtgaaggattcaaatcgacaaatcgacttacattgcagccaaagagggcagttagataagacggagaacttgtctaactaaggatctagtggactagatcctcaggctgctgagagaggcttaggagcaggacaagcaattgttcagagacaagggaatggatgagatgaactagtgaggctctaactcttccatctctaaggttctgcaagttgaggtccctcttatgagcagctctcagtatcgggaggggactctgcaaagcccggggaaaacactggtgtggcaattgagtggtgagcagaacgctaatgagtgccaagaataacagtggcttcttaatggagcccttaatgaagactcatttctggttttattaacgtagagaaaaagcacacactctcccccgctctcagagagcagacagaataaagagcagctccaaacaggggggctgatcccatttcctggaccctgcttaggataccattataggctctgggaagtgggataggaaggtcaacctcagagttctgagatgttcctctgcactttggccaatctgtttagaccccaagaccccacacagtctcaggggggagatttccagctgcgctcagc

SEQ ID NO: 34101 - DNA, 1030 bp, Bovine  19866880664608
  misc_feature (1)..(1): n is a, c, g, or t
nctgacagcctcgtcccccaacacacccacctccttccacagtgccattctgccaggcccttcgtgaaggacagaagagaagaaggaagtgctggtggcaagacctccgccctgccaggcgccagacgaggggccaaggagcatgtgggcacaagcatgagctgctgcgccctccccccgcccccggcacgcctgctcagacagtccgccggcctccccggcctgccttggggagtgatgagtttatctccgcgagacagagaggtaggactgacggcagagatgactcgggctgaacttctccgtaagcaggctccccggggaagggctaggagagatgctatcgcccctgattgtcagtcagtcatcaggaacccaggcttcgtgaggccccctccctgctccccagctccccagagctcagcccagctgtcttggcagccgagggagctgtacatatcccaggggcacctggctccagagccctgaggacacaggaggcgaaagcctgaagacacaacacccaccctcaggaaaaggaaaaagaagccgggccagccttgctgctctgcctctcgatcctgaagcctgagcggagctctagggtttaaggagcttcagcagtttgagggtggaggacacgtctgggccagaggggacacgtctggccattcctgcgggagccccaggaggcctcgtctccaagtccgcacaccccaccacatgttgcctctcacgctggtggggactgtcagcttctcccctagaactccccctaccctacaactgcccactttacccatccatccaggcggccagggccgataggcacggcctctcaagccagcccagggtccagggcccctcctctggataaaggaaaatgggccagagagcaggagagttggggactgaggtttgtatctgcaggcagcccagctgatctcccagtggtgcgtctggccctgggctagcagcttagggatagtgcctggaggtggagatgaatgtaagtcaggcaggaaagggg

SEQ ID NO: 34102 - DNA, 2531 bp, Bovine  19866880666589
  misc_feature (1)..(1): n is a, c, g, or t
nacacgaatttcctggtcagctcaatactgccaactgggaaagacctttcttgggctcagtggggtaagaccttgatttaatctcactcctctcccctcaccaccctcaccctcgcttctggtgctgatcacatcttgctggggtgagaaccacgctgttcgtggggcctggaccacttctttctagaaccaggtccagtttcttttctgacctccctcttcccatctcattcattcattttatggtgttcagcttactagcagcgtaaccttagagaaatgcgtgaacttctgaacctgtttgctctgtaaaacgagagcaatcatagttcccacttcagagattgtggtgtggaatcagaggttgtggtgtgaaagggcttggcacttagtaggtgcttgatcaacatcagtcctcctttctgccttccaggtgcttggggtttgaggggggaggggagcaggagagatgtgagctgtggtccctgccctcggggaagcttggggaagtaagttctaaaaatagttgcaccggaggccgccctaggtgtttttttagtgtcataggtgatgggaaagggagaaggtcatccgaggctggatgaacagtttggccgctggaagaacactttgcctctttaaccttggatacctctcatctgaactgttgcctcacccataaaagggagtggtcatgcctgccctgcccacctcccagggatgtcatgaggttcaaagcaaatcatggatgcaggggaatctgtaaccagtaaaatgcaatgggagagcttccttaaactccagggggaaaaggtgctgctggaaaagaaggggccttggcagctgactggagtgggggcggggaccaccgccgggaggaacaaagctgagagtgcatcctagggcagggccctgggtgagatctgactcctctgaggcagccctggccctgggctctctgggcagctgacctgaactacaggtcaaaagaagcaggaccaacggggggaatagaacagatctaaccagactcaatcctcctgttaatagtaacagcccacatgaacttggaatatcacagactcagctgagctgagtgaagaactggtggagggggacaagaattctgaacacctcccgtccatggctggcttgcttaagcaccaacaagatgccagtccacggagtgcgcactgtcagcctagggcagtgagggtgccctagaccccccttcagacagattgcaggggagttgtatgttggttcagaactggttttaaaaaataaaaataaaaaacccttcactacccacagtgggggcttcaagccagaccaggtgggttggccctgcagagagccaggggtccaagcccccagcttggccacatcccccctccactccacttctcttgttcccctgggcctatggaaggacaagctgttcccactgagccctaccagggctgcgctttaacccctacaatccatgctaatcctcagctccacccactccagctgctctctcccctgagccctggcagtgctgcctgccagcttcagccctgcgctcacccttcccagggcaccctctcctctccctgagaagagctgggagctggcccagggccctccagagcacaagtcacgggctgggcacctgctactcagatgcggagcccggcccagcctcttgccctcacacggcccccacacccttgccctctgccctgggacctgttgctaggagcagtcggcctgggcacctggactacctagatcctatttgcccctgggggggctgctgactcatctcacaaagcctcgggttccagctgttcagtgacagggagattatataagatgaggtcatgtgattttcctcttgggtgggactttggacttgactgctgtcaagcggtggggggaagggaggagttttagtctgaagtggaggacagcggcggctgtcctaggactcctgggtgagaagtgtgacctttccctctgtccccggccttctcactgtttattcagccacagtgaactgcatccctgctgtcctgtttgtccagcttggcagcctgagaccctggggcttgtccttacccacaaggccacctggaggagggcaaacttcctgagggcctgaagctgtgctcacggcctaggaaggtcacacagaggggtcccatggcaggactgatcctagctgctgagaaagaaagggcagtcgttttgtagtttgtggtcagaatcagcaagacgctaatgtctccaggcctcgaagaccggctatgggctgcgacctggctggtggccttggagccgccttatccaggctcattttctcaatcagtgcccagcaccatgctccctgcttcctcctccacccccactctgggatggatgtctctgtgagtgagttcaagtggcatgggggtgggctcagcaaggcaggagttaatccaagcctagcaaaatgttccctgcctgtgggagagccgctccactgaccatcctgctgcagaaat

SEQ ID NO: 34103 - DNA, 853 bp, Bovine  19866880709104
  misc_feature (1)..(1): n is a, c, g, or t
nctgggtaccttttctctcagccactggaactgaaggtcctggttgctctcggcctcacagttcagagtgaggctgctgccctcctggctctcaggggctgcggggctcacccggacatcagacacatctgggggtgcagcagtggggtcaggcagggcagggcagattggattccctcttgccccagcctggccccccctgtcctgggcccccagccccctcacagttcaccaccagctcctgttggtcactctgcagcgatgtcgtggtctccaagtccaggccctgacattcatagcggccactatgctccttctgggcgggatccaagaccaggaccccgttgtcatccgtcctctcttcctccatctccctggtgtggaggttctgggagaggacgaaggcatgatcagagcggacctccagccattcctgcatgcccgcctccacccagaacagagggttccgcacctgcttgatgatgctgaaggggggctgggggttgccatcagccaaacacctgatttccacacggtccccctccttcagcatcccctcaggctccacttccaaccacactctctcggccgggtctgcacaggcaaaggggacagtcctcagcccaagagcggcctctgcgccagcagggcagaagcttgcaggactcagccccactgtgaagagtcggtactcacagaaaacagggacggtgacctccttagattccttcatgtggttcccgctgggcagccggtagctgagctcacagtaaaactgggcatctttgtcctccttggacacctgtgcctgcagaacgctgcgcaaggtaaacagaccattcgactcctccgt

SEQ ID NO: 34104 - DNA, 897 bp, Bovine  19866880713961
  misc_feature (1)..(1): n is a, c, g, or t
ngggaccaagggcttgaatgatccttttccactgttacttgttggatgatcttgggcaagcccctttatttcactgagcctcagtttcctcatctataaaatgggggcaagaataagacttatcacactgattgctgtgagggttaaatagagctgtgtttgaaaagtctcagcaaagtgcctggcacacagtcgtgttcatcactgtccctaggcccccttgttggaactggcagggccaggcagtgcagcctggacatgggagtgtgggcaccctcacgtgggaagaggttgtccagccacagtctaaggaacggactttgcatccactgtgagttttagcttacttggaagcctctagattgactgaggaatgacaaatggctgtggtcttcttaccccctgcatggaattggaaggtgggggccaagttggtcgtctgggctgagcacccgggataggaacgctgcctcccaggggcaaggtttggcatcttgagatgcattctctttggcccttccagccgagagggagcgtggtgaggctgtggagacaaaggcctggctctccccccagtgccaggcgagggtgtgttatctttgggcccaggcggtctgccccgggtctgtgggctggcactctaacgggtaccaccccggcccccaagtctgctgaaaggagtgggctctgggcagaggtggcaggcattcaagtggacgctggcccttggagcggctcggagcagggccaggaggaggggctgcggctggctttctggtggtcactggcaggtccagggactggggtgcagggtacagagctggggggcgggcagggctgtgggagggagagctgagcaccaggctgggctgtgtcctcactggaggcgccaccctc

SEQ ID NO: 34105 - DNA, 961 bp, Bovine  19866880716295
  misc_feature (1)..(1): n is a, c, g, or t
ncgctgagctattttgcagtttgtactggctctgggcttcaagcttctgcctctgcaaaataagtaagttggatcaggtgacctcccagggccatcctgttctgatacatgactctgagaaagaaagcgatactctcatccagatcaccaagtaatttttcctggcagcagattatgtctcaagaggggaggacacagtaagacatgtaaacagaaaattttggtttctataaataggaggaacttttaaccttaatgacagccagtttaacacatacaaagtattcagtactactcctgggctaaactcctttcttcttcctgcccactctccaggtagcagtactgtcccacaggcccatacgtttgggtaaacaatccaccaagacaaaaccatgtctcagattcagtggtcccctctgtctgactcagaacagtgaccttgctgtacctcagtttctctttcatccccggcattctacaggccttacccctttcctcctggtgtcaaaactgtgacttatcctctcaaatgccctccggggtcctccaataggagttggcaggatgagtagcaagaattattattaattagtgaaaatatgtatcatcacataattggagtgtataattgatgcttcactgctgcaggcagaaatagagggagagatagatgaaagccagggaagaaggaggccaccatagatcccagccactgtctagaatgagaaatagggaggatttggcgctcctgatacccgcaaaatgtggactgaccaaaggtcatgagctggggcggggggtgcctaacaatcaaaaaagcaggggacaaacaagcccttagtgttagcaggggatgtaaatagagctgcttcccccaaggagatcattttaaacccacattctgagcctgctggtgtgtgtgtgtgtgtgtgtgtgttttacagcagcatcagatttc

SEQ ID NO: 34106 - DNA, 862 bp, Bovine  19866880727507
  misc_feature (1)..(1): n is a, c, g, or t
ncacagattaactgagagaaggaagtggaggcccagggtctctggtttgaaggaatcattaaggccccttctctttgcttgtgttttcatgccctttccaagagattagaaaccttgatggagcagttccatgctgtttattattatttgaaataggctggaaagcaatcagaattggattttcttgaagggagggtggtgaaagagacaaattaagccttcacccctactccgagggttgggtttgtaggaaaaagagaatgggctggacttgggggggggtcccttccaggggggatccctccctcttcttggacaccagcaactgagggaagacggtccttcctgctgctgagggaacaatgaggggctggtagccgaggtgggctgggacctagcaagactcacagccttctccacagggagtcaccagagccgctggccctcctcacggtgggatctagttcccaaggagggtgccaggcagaccttctgcccctgcaaaaacaaagctgcctaattgccttttaatctggggatgtcggtctgctggtgtcggtactgaattgtaaggggagatagtatctttccctttgagtgagaagttatttgatctctgcgtcagaggaaggcctgtgcccagggaagaggtgggacggaagggaaggtggaaggagagagaagagtgagggcctggctcccggccgacctgaggctttatttctccccataacaatcataaataaagggaaacaagcatcgctcttgtcttggctgaaggccattgtttggtgcaggcttcctcctcacccctgcccctcctggcctccgtttcaggcccaggaaggggaagacagcttgt

SEQ ID NO: 34107 - DNA, 1752 bp, Bovine  19866880735067
  misc_feature (1)..(1): n is a, c, g, or t
nacccggccccgggcctggcccgatcccttccgttcccggtgttctctcgatctgacccattgcccggccgtggtacgccaccagcaggcctccaaagctgagatttttcctccagcccgggatcacttcgactttagagatgtttggcttctttcttcccaaacagaccgccttcaaaaccggcagtcctggaccagcacctggccccctttccctcccgagactccacttcttctaacccagtttttcctcagtttctctctgattggagagacggttcacttcccttccagattaatccctgagcccccttccccccaaatattgacaaccctggcacccccctcagccgggagccagacttctctgggaccaaccccatagccctatcatggaggctgtgtacttggtagtgaatggggtgggcctgttgctggatgtgctgaccttggtgttggacctcaacttcctgctggtgtcctccctcctggcttccttggcctggctcctggccttcatctacaacctgccacacacggtactgactagtcttctgcacttgggccgtggagtcttactttcactgctggccttgattgaagctatggtccgcttcacctgtgggggcttgcaggccttgtctacggtactgtacagctgctcttctggcctggagagtctaaagctcctggggcatctggcctcccatggggcgcttaggagccgggagatcctccaccgaggtgtcctcaatatggtctccaatggccatgctttgctgcgtcagatctgtgacgtctgtgccatcaccatgagcctggtggcctacgtgatcaatagcctggtcaacatctgcctcattggcactcagaacttcttctcccttgtgctggccctgtgggatgcagtgatgggaccactgtggaggatgacagatgtagtggctgccttcctagcccacatttccagcagtgctgtggccatgtccattcttctctggaccccctgccagctagtgctggagctcttggcctcagctgcccgcctcctgggcagctttgtgcttgtcaatctcactggcctggtgctgctggcttgcgtgctggcagtgacagtgactctgttgcacccagacctcaccctgaggctggccacccgggcgctcagtcagctccatgcccggccatcctaccaccgggctcagagaggatgttgtgaggctctctcggctagttctgggcttggaggcctggcgccgagtctggagccgtagcctgcagctggcgagctggccaaaccggggaggggcccctggagccccgcagggtggccctaggaggctgccctcagccaggacatggcgacaggatgctcttcctgaagctgggccccgatcggaggcagaagaagaggaggtcaggatggccagagtaacggctgcccggggccgggagaggctcaacgaggaggagtctgtagctgggcaggacccgtggaaattgctgaaggagcaggaggagcggaagaagtgtgtcatctgccaggaccagagcaagacagtgctgcttctgccttgtcggcacctgtgcctgtgccaggcctgcactgagatcctgatgcgccaccccgtctaccaccgcaactgcccactgtgccgtcggggcatcctgcagaccctcaatgtctacctctgaaggtttcctccctccctcctgcccacccctccatgctccacgcagccacctgcgctc

SEQ ID NO: 34108 - DNA, 1504 bp, Bovine  19866880738986
  misc_feature (1)..(1): n is a, c, g, or t
nctttctcgtttactttttctgccttctagtttctcctccatccttagcgtgcacatatttgtatacacacattcatcacagcaacacaggtatgtgggctggtgtgacagcaagggcgtgtgcccgcacacgtgctctcctgtgtatacttgtcatctttgctactcacgtgctctcacgccccctttctgcacggtcatgctgtgtcttctgctcgtagcccacgttggctgcacccccggcccccaccttgccctgaagggccagaccgcagccaagaaccacagcccaggtttctggcacacacagggcatctacagggccagcactggggctcccatcctcctctctgtaccctgggagcagacgaagtcaggcgtggggcacccggtctgctctaggctcggcgtctcagaagccaaggtgtggtactagggcacagtgaccggcaggtgtcaggcagaggggcagtggtgacctccgcacaggctttccgtgcaagagaaccaacaatgtgtcattggctggtggcctcgggaaaattacttaatctctgtaatccctgtctcgtcgtatgccggatggaaatgaatagcataccactgtatggggtgtcagggacactgagtgtcatgcgactggcatggacaccgggtcgtggctggactggctccaccttcaaggagaaagtcagtgtggaggctctggggccacgggactgtctcttcctctgtcttctccagctccagctaccagcgccgcttgctggtctcctggatttgggggagggggttgccaggggcacctctagaacaagagctggccttgggctcacttcctgccttcgcctccccatctccctctcgtcttccttccctgccacccctgctgactcagccaccggagcagacactgacactgtccccctccttctcttttcctcacccagagttcccctacaccccgtctcctcccgaacacgggcggcgcgcggggccagtgcccacggccatcattgggggcgtggtggggagcatcctgctggtgctgattgtggtcggcgggatcgtggtggccctgcgccggcgccggcacaccttcaagggcgactacagcaccaagaagcatgtgtacggcaacggctacagcaaggcgggcatcccccagcaccacccgcccatggcccagaacctgcagtacccggaggactcggacgacgacaagaaagccggccccctgggtgggagcagctacgaggaggaagaggacgaggagggtggagggggcgagcgcaaggtgggcggcccccactccaagtacgacgaggacgccaagcggccctacttcaccgtggacgaggccgaggcccgtcaggacggctacggggaccggactctgggctaccagtacgaccctgagcagctggacttggccgagaacatggtctctcagaacgacgggtctttcatttccaagaaggagtggtacggtgtagacccctgt

SEQ ID NO: 34109 - DNA, 1072 bp, Bovine  19866880750988
  misc_feature (1)..(1): n is a, c, g, or t
nacaggaggcagtcatgccatcggggggcccacccctgaaacatcctctggaccctcagccagaggggtgggggagagtttcttcatcagaggaaaggccaccgcagcgggaggggagaggaggtgaaaggtttctgggacaagccactccaacgagctttggcagttttgaaggtcactttttttccccttccaccaaagaatttaattaggcttctataaagcagttagatttaggagcggaacatttttagctcccctgctaggagtgctcatgaatattaaagaccgaggaaggaggcaggagctgggccggcttgcaccctacccggaatccctggggactgtggcacgtgggcacaggagaaagggcagctgggttcctttggcgatggtggaggggggcatttcctgcacagcccccagcagccccgtatcattaagagttgaagtcatcacttcttccactcagccaggacccaggctggagtgtcctggagttcagtgctagcctgatgacacggatgacagcagaggggtgcaggccttggaaagggcactgaggacccactccccaggccaccctctagggctcttactgcccctgagaggagggccagttccctggggccagcttcaaggctttcctacagcaaaggtcagccacttccccatccagagcatgactgggtcatgtcagagagcaggggctgatcaagtagctgtgtgctcagcctgcacggggcatgagacagacctgcatccggcctgcagaggtttccagtggagccaggagaccagatgggctctccagagctgtctaagagagcaagtggacgagtccagctgtgctcagtgagagcattcttagttccgtggactacgggtgggtggggggggggggggcaccggggcaccggcccagccagctctcccattacagtgaggagtcccttccagctcctctgtggatgtcagccagaccccaccttctgacacgtttccacagtgtgccgagctctccagacaggtttcagtcccaatgtcacccaggagccccactcacagggcc

SEQ ID NO: 34110 - DNA, 1934 bp, Bovine  19866880752928
  misc_feature (1)..(1): n is a, c, g, or t
nctttgggaaaacagatgaaagtggctgtggtcgcgcttaaaagctgtgcagtaacctagcatgttaatggaatcttatcaatgtgttcctttgccatcttcatagactctcctgggtaggaagacagatgcagcagggaaaaaggtccttgggtcaggtcatacttggtcccttctcctgccttttcagagccaaggctcttaaaataagctcctctgttccagggaagagagttcccagtggttgtctctgagtgattccttggcctccctccccagcccccactgtccccttgggtcaagcttccttgcgtttggtcctcttctactggaaccagacagatttaggttcagatcccgaatcgatcatttgctcactgtgtgatcttgggaaaataacttgccctctctgaacctgactttaggattgtaaacttgatgtcagaaggttgctgtgagcatcagatgagactggatagtaagctgcatggcatagagcagctgctcaataaatgtcaccttttttttctgacagttctgccaccgttaatgagatccttccagctattgctcatgtttctcaaaagtccagggaactttgtctgagagaccttccacaattcactccctgaaatgactgtcatcctctcagaatccccccggggaattaaggggcccatttgcaggtgctgttgtgtggttggagatagagtcaggctccatcaatttcttgctgtatgactttgggcgattgatttaagccatttgtgtctcattgtcctctcctgttaaagaggcaagataatatctaccttacaatgatgttgtgcgaagtaaacgagaaataacatgtgttaagcactttgtataatgtggggcgcccagcagtcactcagcgatgcaccctgctgtcttttcatgggtgtgtggatgtggtgtggactgctccttatcaggttgggtccttcctggaggggactgcctcctctttgtcctctctgtcctctttccctgagcaccaatcagagacagtccccatcctagaaggctccgctattggagaagtgcccccttcattccccttataggttcttaggccattcatctcacaaacttggtaactgttggcgcctgggttgcagtgtggccagaatagccgtggagtcacttggggatgaatttcacccctctgttgagatttcccatttgagtttagggtgtcaaagatctattaatataaaatacggatctcctagtttatttcacaatgagctttttttaaaaaaaagatttattttatgtatttattttattttttgcctgcggtgggtcttcgttgctgcgcatgggctttctttagttgaggcgagtgggagctactcttcatttgtggtgcttgggcttctcattgtggtggcttctcttgctgtgaagcacaagccgtatgtatatgggcttcagtagctgtgatgcatgggctcagttgccccatggcatatgggatcctctcagaccagggattgaaccggtgtctcttgcactgcaagatggattcttaaccactggaccacccaaagaacttttgaggctctaaatgatttgagtacagccattcctgagttgtatcctggttagcatttggtcactggagacaactcaaaatcttagccacaagtgcccctgaggtacagccttgcacatgccagttcagccccagggatggtcagtcagctgggttatagagccctgagagagggaggtcagtaggggcagaggctggtgtcaagggggagcatttccaggaatgtcctggattatggcttagatgcaactggctgtttgattttttgagtttgtaatttctctgggcctcagatgttcacaaagcaaaaaattagactagatgaactccaaggtcatccacaagttttaaa

SEQ ID NO: 34111 - DNA, 866 bp, Bovine  19866880785136
  misc_feature (1)..(1): n is a, c, g, or t
ntggccctggctgagccctctataatgacttaatcttgccgacagggtgacaagcggatgaatcgaactccgaggcttttttctccactccagattcatttgaagatttctcccagatgcggcactaaaaccctagattcaatttccctttgacataataaccgaattagtctcatattgtcatacataaattactagccagtcagggtgccaccagagggagagagagctggagagaaagccaggcacgagcatccaaaggggtgtgactgtgacaagtggggacctgaataacaatggggacaggagggtaagagctaatcacatctgacaaacgaggagcatccccaggcggcagcaaaggtacagattatttaccttcctccccatgcccctggccattaaaatgtcaccatggggagcctcgcaccttacaagagatacacggatctaaatatcttctccattaagtaatgctctgtttgcaaaggctgctttcaaaggggaaaatgtaattgtgtggaacactgatgcagcttcccaggcttcaagacggagctgagcccggcagaggacctgtctgaggcccagtttggggcacagatgccaatcctgggcccaggggggctcagcctggcttattctgagcacagaggcggcctcccagccttccccatgtgggtcctggggccatgagtgagaccagatcgaagccagctggaatgaggcttcctcacctgcccaccagccactgggccccaggccagggccctggggacgctctttaagccttcccctccatttcccctggcccatctgttcatactgctcaattctcctaaaagctctggcctctggcctcactg

SEQ ID NO: 34112 - DNA, 1665 bp, Bovine  19866880832601
  misc_feature (1)..(1): n is a, c, g, or t
nacccgcaaaaggccttcccactggcctgtgggacagtgcctgagatgtaccaagaaagggtttcctttcgaggcagccctgtgtctaggaaaacctgtttaggacagaaatgctctaaggaaaggtgacccacagtcagcatctcagaacatgcaggactttttcagggaggtgtgaagcccacatcatttgtgagtcagaggaaaagagaccttgggcagaagcggagaggggcatggagcccctgtctggctgtcactgcccagcaaacaaagttggattgctttctgcctacatccgtgccctggccgggtcacagcaaccctgggtggggtggggtgacacagcctttggtgagcactcggcctgtcctgtgaccccagctgggacaccagctgtcagagccatttgtctcccagtctccactcccaggggccccggggcagctcccacattatttaaagagcggtggaggccctgggctgtagagcgctccaaaccagtccatgtttccctgggaggggatttgggtggaacataaataagacaatttattcagagaaaccatctcccctatttacatttaaattgaataatttaaaacacctttacccatttccataaattatcccctgttggacgggcagttcagctgcatggagggggtgccgtcctggggaaagacctaattacattcactgctacaggcctggggtgggagggggagcgtgggaggtggggaggggccgcagcgcccgggatgagggtgggggcgctcccagaggaggaagacatttgtcttagaattggcaggaagaaagagggagctactaagaaggtgcggtccatttaagagccttacaactgagaggtagagggcaaaaaataaaatcctgctcttatcacaggggcaaggcattggaaccaatccctggcctcctagccaagagtatcacccaagtttgactgggtcaacggtcctatatttacatcttctggagacctgagctcttggtgccagggaagaaggggaagagaaagaaagaatggggcttcttctgtgattcgttacttctgagtatttcccaggcacctgctctttccaggctctgtgctgaggacacggggatgactggcccagccctgccctccagggctcccggggtgggtgagaagaactcctttcacacaggctgtgtgtgctcagagcagatgagtgggcatggcaagacccaccggagggggaggagtgaggagctgttccaggcagtccctgggttcacaggggaggtggctcttgaggaccctcaaaggctgagttgactcaggggggtgctgaggatgagagaaggcatcaccaagaagggaccagtgtgagaaaaggctcagaggtgacaaggtcttgccagctcctctcctctccgtcagggagggggcactctggacagaggggagccccagagcactcaacgtgctccacagttggaggcaaagtgaccagtaaagtgtatggagcagggagcagagaggggtgggcttaggggaggcgggggacaagccctttgatgcttatgacatccctaggaggcaggcacgattagctctgtttaagaggtgaggaaacgggagctctaagctccaagctggggaaatcaggatttgaa

SEQ ID NO: 34113 - DNA, 3866 bp, Bovine  19866880878089
  misc_feature (1)..(1): n is a, c, g, or t
ntttgtttctgtaccatgaagctaaagtcgaaggccagttcttcatgaagagttggtccttggttgtaaattgccaggtgagacctttagcctatgctggctgagacaaacaaatttccttgtcatcttcctagacaaattaatgacttgggctacccctttctctggtgggaatgtaacatttgaacatcaaggcaaagatctcagttccaacacttttcctcagaaggctcagagcctgggtcttgggcctcatgtgagccctaaccccatgggcttgcagtggcaaagaggttcccagacttagggaatgaacctatggttgccgaggggaaggatgaggggaagggatagttagggagtttgggatgggcatatacacacactgctatatttcaaatggatagccaacaaggacttattatatagcacatgcaactctgcttagcgttatgtggcaacttggatgggagaggatcttgggagagaatggatacatgtgtatgtaaacagcaaacagtccctttgctgttcacctgaaattatcacaacattgttaattgcctataccctaatataaaattaaaagttaaattaaaaataatgcaaatacaaacaccagcacagtcatcaaatgctaagtagacaaaacaaaaaaacatgcagtggctacagcgtcactccagtgcttcctgctatagggtctttgtgtctggcttgagggtgaatgttctttcttaaaggtcagttaggcacttaaagaatatttgcctttctaggtctttgtcctgggtgtgcattctggccatataggccactgcactgctgagctgcaagtcctgcctcttcttcctcagccctgaatgccaccgtgacccgcctattacatccttctctccagcacatggggcctgggatctgtggttgagtccttcctggcccattcctgagcccaagtgccctctggttcttgtgcctgtggggcttcatggtgaacaaccaggcttcctgccaatcctcctgcagaccccaaatattaggctttctccaccagtcacccctcctgtgtctgccctctgtcttaacagaaatcagacaatgtcctttacatgccactgtctcctcccctattctttgggttcttgtgactgtatgtctttcttttcttttttctttcttttatttttttcatttcatcagggttttagaaaggagagagagaaacacatgttcaatgctccacacttagcaggaagttcaaagagtaacttatcttcatgtttctttaattacaagtgaggttgtactttctaatgagtccattcgaattaatttattattattattattaattgcactgcagggcttgtggaatcttagtttcccaacaaaggattgaagttgggccctcggtagtgagagcttgaagtcccaaccactgaactgccaggcagttccctaacaagtccatttttcacaacttcgttgtcattactgttcacatcctttacctgttctgtttgttctcctcacctgctcccaccccatcctgggtctcagaatattcccttcaattcatatatcaattatttatagtagaatattaacgcttggcctgaaaggttggaagcaaatatttttcttcagtcttcactttttataaaggcattttattggtttgttatttacataaactcttaattgtatgtaatttaatctggcaggttttacctttttctgtttctcctattgctcctgcattgattgggagagtggaaatgttcccaagagacttgctggctactattgctgtttggttctatggggagagaaggccgtgatgggaagcagagagaatgaaataggagaatttcattagagttgtcatttgaccccggttatctgtcagtacacagataattgagaactgactccaagtgaaattgataaactgaccttcttaattacatgccaatgtaccctatcattcaccatgggcaggaaagcaatttccaggttcggtttatgccatgtgctcatccaccctcttccttgagactttgcacttttgtgacctgcccttccagcgagttccctttaagaccttcttgcctcctgatgccaaaagtgctgaaagataacaacatccagtctttattgctgcctgagttcctgtgcccccagctagtgcgtaaagaggaagcagcatatatctcaagcgcctctgatggtagctggcatgatgcttgataacagaatttctcagacaacaggcccaggctggggaattttaatattgtctttccctacaagtaatttccaatgtttatgctctgtggagccccttttgagtgtcagagcagaacaaatgccagttttaatggacttgctaaatcataaaaactgcttgcgaaattgcatctgattaaaacaggaaaatgttccattattcagaaaaatctccctgcagaggctcacggaggctgttggaggtgcagaaatgcagggagcgcccagatcctgtggagttttttctccatggaaaagatgtggctccatttatgttcttttctctcccccaagtcccccattcttctgccttccctgatgaaagggaaattgacatgagttatttcaaaattaatttatgcaacaacatattattagcaggggcagagcacgcatgacaaggtacagccacagaagagacggtgggggtggggtggaggcatactctgaaacctctgagttgcctctgagttgtctgagcacctccacagagcaaagaccaaccgatacagcaaaagccaaaagggtgctctgttaagctggacgaggctctcctggctaacaacaaaatataaaatagaatttagttatcccatagatataagttgggcttccccagtggctcagtgataaagaatctgcctacaatgaaggagatacaggagacatgggttcgatccttggatagggaagatcctctggaagaggaaatgacaactcactccagtattcttgcctggagaatcccatggacagaggagcctggtgagatacagtccatagggtcccaaagagttggacacaactgagcaactgagtatgccccgacataagtcacccactagagagccgtttctagggaattgtcagtggagtctggtttggggatttaacctacagccagttagacaggcagatggctagaccaatatcaccagcaagtactctttgtttgcagagaattgtccctaagtctggagagatagcaaagggaagcactgcccagttccagccccagctaatggtgggggcagggtgggggcaactgtagcctcatgaatgagccaccctgacaccacatggagcagaagagctgcccagcagagcccagctatcccaggaattgctgaaaacaatgtcatggttttttcctgcactggactgaataactgagacatcagtcggttccagcctctcccctgggaccctgacattggaaggacctgcccaagttgccttcttggcactgataactgaatgacaccaatcaggatggcatctacagtgacttggctgtcactcattgtgtcctggtctacctggagtgatcctgctctctatctgggactttccttgtcttgccccttcctcctttgtgtcctgtctcccacctcaaagactgggcactgttcccttcaccttctcttcagacttagggacatgctgaatgggctttccagatgttgctagaggtctactgggcagctcttctgctccacgtggtgtcagatggctcattcatatgtctgcaatttgctggggctggaacattcaaaaggcttcactgccacatactg

SEQ ID NO: 34114 - DNA, 873 bp, Bovine  19866880882348
  misc_feature (1)..(1): n is a, c, g, or t
ngcacatgaagacttcagcatgaagggttctccgtgctcagcagacccttcacccacagctgcactggatctgcctgtgatggggaagcaccatcatgaccctgggaagggtgctgatcatacataccatcagcttatcccacaggcagtggacaggctttctatctaacatggctcttccattttcatcaaggacaaaaatgaaaaggaaaaaaggttcaggcagaattcaggcagaacttctaggttcagaccagcaggagtctcaggaatcacttctctgtagaccttaaagaagagagactcctgtctaggtgggctggctcagatattaacctgctcagaggcaggggaataatagagatgaccctttctaacctcattgttaaagagttccctgtgccccaggtccacctgtttccaggctcccaacagcccaagtgccattaagtctctcggaataaaaatctgacttcagaatcaattgatggagaaaggttctccaaacattcgtcagcgaaggtaattaaattccgataggagaagatggagcggtgtgacagggcggtgggggcagcatgctggcgccaggctgctgagcagtgaaatcgcaggcgtgcgcagcccaaagctggcagcagcacaaaggaaattggagcagtcaaatatttccctcctcgttgagttccatttacatgtttataatagaggttcttaaggccctaatgagaaggctgctcattgcagggaagaggatgattaaggctctgccagacgtgatcagggacaggaacaaaggcctgttaattactacagaaggacaggaggggagccaggctcggctcgcagctccccaaggcctccccaggctgg

SEQ ID NO: 34115 - DNA, 1742 bp, Bovine  19866880909212
  misc_feature (1)..(1): n is a, c, g, or t
ncacaaaccaaggatggtaccgggcatctccctctccatgggttcagtttctcttcaaagaagaatgaaatgtgcttggttccacgtcaagcctttgctcaggcccttctctctgcctggaactcccctgcctcttccctgcacgagaccccctcccttctctacctgcaagccctgctcaggtgtgcttcctccaggatacccaagcccacggaacccccatcgctcacgtaatcacccagcactcaatgtcaggaggcgcaggctgcaatcctaacgttaagctcggtggccttggcgatcacttctgccctcagctcctgcacctgtgtgcttcattagcacaacccagacgttttgtaaacagttcaaatgccagggacccctcttaagattctgattcagaagatccacggtggggtatctacatttttcaaagtacctaggcttccattcaacaaatatttattggatgtctattattgaaagcttagagtagacactggagccagacatcagggttcaaactctggctcagtacacctgcgtgacctcagaaggttgatggaggcttcggtacctatttagcatcactaccacttgtcatacgatgtactttctgtggctggagagaggagtgagcatgatgtggaaggatctgcatgcgcgaggcacaccctctgtgtgctgcagtggccaagaactgccaggctggatggcctctggggtcctgccacacaaagatcctgtacctttaagatgctctctataagagccttttgtctgtttcctggcgtccccaaaccccgtgctcctctagggcagagccaagctccttcaccctctggaccatcaccctgtccccaggagagggccctgcacaggaggtgtggcccaacagacctcatgttgtttgaccagagagtcctaggtactcacctgttcccaatccacctccgccggccttcaactctgggtattgtgcaagacaggcaggaaagcggacagtggccatcccaataccagcccttgagttagcactgatggtggtgcaggggctgaaaagcagctatgattgcaaattgatctgttgtgcactgagctggttactgagaagagagaaagcaagttgtcaatactgcgttacccactggggtccagagctgctcccttgggctacccagaggagagacagagggaggaaaagagagctgtttccattttactggggtccttgtggggtcttagggagttgggtgggggcccagcttgagtcccatccagctcagagccagtcctgggctctctttttcatcttccctcctccagaaccaggagcttccctggtggctcagactgtaaagaatctgcctgcaatgcaagagatgcaggtttgatccctgggtcaggaagatcccctggagaaggggatgacaacccactccagtattctggcctggggaatcccatggatggaggaagctggaggaccacagtccatggtgtggcagagagttggacacaactgagcagctaacattttcagtttctttcacttcctccagtaccagcttggagttccatgtggaacagaggagctaaaatagataattcagaaagttatttccatttggtttgtaatttgtgtggtttgccatgggtctgggatcaaaggacagaccactcgcctttattcagcagctcgggtcaagtgtttgcatttctccagcgtcaccagtgca

SEQ ID NO: 34116 - DNA, 942 bp, Bovine  19866881019357
  misc_feature (1)..(1): n is a, c, g, or t
nggccctggaaggggtcccccttcctgcaacactactatggcatctccagaaccacagaatgaccaaacggagtggaagagaaaccccccaccccagtccctgtgtttccttgacgaaaaggccaaggtcaagggactaaccccgggtcacacaattgttagcagaaatgccaatgtctggctctcctcccacccctcacactccttccataactgttgtctcagcagctgtgctcttgggtgctgggccctgaactcaaaccctggtgtgactcaggggtgcccgtggacaccccccacccccacaatccctgcactgagaggccttcccggtgagttcaagataggcatagagggctgccacagccacaaccctcctccccggggctccccaccctgggctgggcggggctctggcccctgctgcgccctgacagctcttggtgctgccaaagaaggtgattgccatgtttgcagctcctttccttgtttggaaagatgtggaggcaggtgaggctggagagaaagcaggactgacaggttgtgatcagtctctgctccagagcagagtctcgcgaaggctggctggctgtggggccggtcactgcctccgcgcccggcatcctaacgccgccctccaggacaccgtgcaggcctcctcttcccgatccttcaggcccccacagcccccaaacccctgccttggtccgctggtcctccctctgcctcggacagacccctcagcaaacccgcaccgccagccagtagccctcccccgcaggccttcctttctgaagtccgactcaaatctccggctctggcacaacgccttgtcttcgtaagaaggaacattatgcagtcgtgctggttcccttcccctcactcggagggacccatctagacatcagtcacgtgggatttttctcgcgccagacaaggcaa

SEQ ID NO: 34117 - DNA, 679 bp, Bovine  19866881024190
  misc_feature (1)..(1): n is a, c, g, or t
naagattgaccttctgcattctccagtggcggctggggggcagtgcaaaacgctgcctcagcagtcatcatctttgattgcctgcccttccccccttcttcccctcaccctcaggatccagattctgcccttctcccaacagggagctagatgagagccccccacctccacgggggagaagatggctattagaggctgatcgggagcagacacacacacacacacacacacacacacacacacacacacacacaaagcacatgacctcatgtgcgggcacacgcacacacacaagccataaacctctcatacacacacagaagacataaaaacacttgtaaagaaacacagaaaccagcacaaattatcattacgtgcaaactgtgtacacaagtgccgagggggcaggagtaatggtgtgatggagacaggagaggataatggagctctttcctagcaagggtgtttctacgcagagctggggtgtatgtgtgtgtggaggggtgacctgcagagaagctccctggtggcattgtctgtcccctgtcccaagctcccaggagggaaggggagccaccaacacccttcccagttatcccacagcagtgctgagaggtgggggccaaacggtgttgccttccctcctcccatgactaacaccacccacccacccccactc

SEQ ID NO: 34118 - DNA, 1352 bp, Bovine  19866881070110
  misc_feature (1)..(1): n is a, c, g, or t
ncctcatgcagtgcctgcctctctcagcccggttgggtaggggggccaagccagtgcactccagggcccaggcacttagccctttgtggggagaagacagtgagggtggccttactgatggggcccctggggctcccctagtgcttcctgcctcctgacatgtactcatccatcatagcatttggttctcttagcaatctgtgagctacagaggactggattatccaccccgtttatcagacgagggagctgaggcccagaaaggtgaagaagctggtggcgcctcagctggtcctctgcccaaaaagcagcacattcaaccctcatcaaaaataagggtgcggagggatatttactgccatggagcaacattgataatatatcactcagtgaaaatacagcttaaggaatagtatgtacagtatgactctgattttgtttaaaaaaaaaacatggttaccaagatatatggagaagaatgtaaaagaggttgtgcgtgcatgctaagtcactttagtcgtgtctgactctgcagcactatggactatagcccgccaggcttctctgtctatgggattctccaggcaagcatactggagtgtgttgccattatcttctccaggggattttcccaacccaggatctaacccgcatctcttctgtgtcctgcactgaccagcgggttctttcaccactagcgccgcctgaaaagcccgaacaagaggttacttcccgtcaggtgatcagtgatacgtccgagtggtgaaatcatcggttgtcattttcttctcaggatttttcaatatcccccacagttcttctaaaaacagataattattatttttatagtcagaatttgtaaaataatgactgctggaaaataaaagaccagcacacagggagtcagggtaggggctctggctgaccctgaccaccctctgccctctctctcgaccaggcgcccaggcccagatggtccaggtgaacgactccatgtacggtttcatcggcacggacgtggtgcttcactgcagcttcgccaacccgctgccgggcgtgaagatcacccaggtcacatggcagaaagccaccaatggctccaagcagaacgtggccatctacaacccagccatgggcggtctcggtgctggccccataccgcgagcgcggtgggagttcctgcggccctccttcacagatggtaccatccgcctctcccgcctggagctggaggacgagggcgtctacatctgcgagtttgccaccttccctgcgggcaacagagagagccagctcaatctcactgtgatggggtaagctgaccctgaccgtgcctctctgcttgggcacgt

SEQ ID NO: 34119 - DNA, 1015 bp, Bovine  19866881114986
  misc_feature (1)..(1): n is a, c, g, or t
ncatcactgagggatcctatctcttgatagagatgaccagggtgtttttacagcccacccttccttatccatcagcagctcctcccactcaatgggttgacatgaaccatcattccacgtttgggaaactctgtgggtccaaaagttccaggggagtcagggtgtgtccactgaaacctcagccggaaccaagcatcattcagaaagtgaactgatgagctgtttatgtaaccaggttcaagagcaagagcccaggcccaggcctgccgcctccaggccgcaccagttgcggggagaccctgggcgctgctcaccttgatgcggtccttctccttctgccacttctcagcttcatcttctatctcaatgatcttgagctgcaactgctccttttgcagtgacagctctgtctgtagggaaggagccggggttggaggagaagtcagggggaggaagtggaaaagacccagagagtcagggaggagggcccacaaatcatcactctgcccttcattcaaccaacactcactgggcccttgaatatgccaggcactgtgccagtcaccaaggatccagcaacaagtcaagcgccacctcattgtaaactctggactctgaggctgggcaacccagccatgtctttgtaaggcggaccctctaccaggccctccacccaacgtgagcaggaaggaagctcattagggggttcccgctcctttcaatggacctggagccatcggagagcagcttataggagaaaggggacccagcccagctcagcccagcccagcccagcccagggagcgtcccatggcagtaagagggtacagcatttctatgacatgacatgaggcttgtgttgcaagcaggagtctgggttgccgccagcggggagtctgtctgggcaggcacagctataaacctgtttatgggaaatggagcgcagtttgcagtctgggcaagattgagactttattcaagtccctgggggaggagagaggccaggagcaaggca

SEQ ID NO: 34120 - DNA, 808 bp, Bovine  19866881144264
  misc_feature (1)..(1): n is a, c, g, or t
nttgcctgggtgctccgagatggcctctgaggctgacctggaccattgtgctcagaagtgtagacacagggcctccaggccttgggcccagctcacaggatggcagtggggaccaccacagcttccctgaggccagagtgatgtctctggcaggcccattgcgaaggctcgggctcagtggagaaggaggatatagaagcttattagtttaagcaggatgaaatgtgtaaattaattaccccagccacccgtgtatgtagcagccagcccctcgcactgggaggagacgcatcagccttcatccttctctcagattgccttttctgctagatactgttgaaggacctgtggctgcacacccactcagggtgggaagggtccaggcccatcccgtgcccaggaacctcagtgggtggtattgagggatgggcaggccctcctgcggaatggtgaggttgaattctgccaccaccagcagtgaaatcagtgtcagcaaaggacagcaaaggcctgccgcccactcccaaagcattatttatcgagggataaggtgtcagaaaccggggcaatgctttgcttgcttcctttcatttaatcctcacgaaacacataagtggttgtaattactagccccattttacagatgagaacatagagggccaggatgttgagatgcctctaatattgagaatgagtggaggaagcccccaccagccctgctcccacaccaattcccactcccacccctctgttctcacctgggcctgcgcgcagacacaatcctggactcaagtcatctagcccagat

SEQ ID NO: 34121 - DNA, 1143 bp, Bovine  19866881160134
  misc_feature (1)..(1): n is a, c, g, or t
nctaccacgttctgctggagggggagggcctggggcaggcgctgggcaactgcaaggatgacctgcttaacgtgtgcatgcgccacgtcgagaagatgtgcaaggcggacctgagccgcaacttcattgagaggaaccacatggagaatggtaagtcccctcccacaggtgggccccaaggccgtggaggttttctcccaggtcagttcctgctgcctggctcaggctggcaccccaccagctgggacctcactgtttccagcctcccaactcacctaagggtgtctggacaaggactcagagatggtaccctcctctctcgaagttgctgcccaaggtatgcagctattacaaggggcctccaggggagcatcccaggcactggctagggagatgcaccgctagggacaaatgtcttctccctggattgttcatcaaactcagggattggttttacagccctgagtctgactaggggacctaagccaggagccgtgtggatgctgcaaattgtaagggccagactgcaatctggtggctttgtaggctccaggggacatgacctagaactgcatgcatgcttggagggagaacttgcctgtcatcatggctgtgctgagcagtgttgagcccagaggtggacttggcctggtggactggctgggcgtggttgagcacatgtctcagtgactcaccagctcccctgaagtcagcttctctattgaatcacactgtcctctgcagaggcatctgaatcatcttcatagaaagcctccaaacatgagaaactgccccgttaagtgcttttccaccagtcccagcccatccctttagggcccgaagctggacactttccccaagctccacccggtggcccagaccttgaggatgcagcctagttaatgacttctagctgcaacacccagaggaagtgaccctgtctttggtctccaaaaggagtatgtgattctttggggcatgagaagggggtgtggtgcactgaggggctgggactcaagggctggtgtctgtatatcttgggaatgttgacatcacatactctccccgggagatgtgagggacattgccaccctgaggacagataagccactgccgcaagacaatcattggcttcaaggggca

SEQ ID NO: 34122 - DNA, 1031 bp, Bovine  19866881191863
  misc_feature (1)..(1): n is a, c, g, or t
natatgcccaccccctcccaacccaaatgaagaaccctgaagagtacactgccttaagcccacccacctcttctcctccaggtggaattctggttttaatctccaatctcttatcttacctcttttgccctgtcccagtccccttgagtaactgagagggacccaatccccttgatgacccctggccaaggcatatcaggcactaaactggtgggtcatgagggtgccagcctgagaggtagagccgctagcggcaggcagaggctcctgagcatctgagagcagtaaacagaactcctgaactgtgagagcacaaatatcccccaccccaacctccccctccgcctacatctcactcctgccaggacatccctcgacgtatgggatgacgcttgtgtctaggcaatgtcccagcagctgggccttgtggtgggaaagtgtagatggagacagggcccctctgtcagcccactttacccttcaaggtcagccgtctcagtgcctcatctccgatgttgttagcaagcagctttgggaagctctgaggtcacccctgtgacggttcccaagcacctgtgggactggctgggattccctactcacctgcctcggacacagataggaggaaaggaactaaaccccgctgaggtatatgtctgaagcccagctaggggctttctatccaggcagtggcaaggccacagaagctggcgtgccttcaccccagacaggagagcggatctgggcagaggggggccgtgaaggctactgggatgttgggcatcacccatcccataccctgggggccaagagtgcctggcattcctggggagcaagtccctcccctggctgggcaggttagggagcccttcacgtgagcaacaggaaatgacagtagctgacataatgggctggtggccccaggaagataggcttcattttaagccctgactcacctagtctgggtaccctggggagtgggccaagctgccgcaagagtaagaggcgggggacatgcaggagcttggcat

SEQ ID NO: 34123 - DNA, 1662 bp, Bovine  19866881222492
  misc_feature (1)..(1): n is a, c, g, or t
ncacccgtgggcatcgcaggccccagggaaggaaggcgcagggcagagctggctccttcatgctgatgagtcaatccttaggtctgcatggaggtcatacaggtcttaaggcccccttccccctatcacttccaaagtccttcccagggagggtagggggcagattccagtcccaggaaccgatcccgcagctctggcctgggtctgggccacagaggccactctgtaattcaagctaacggagcatggataatctagaacagcagagagtctgggaggaatttctctttggcgtcgaaatgtatcagatgactgttttgcagccgagttaccttcctaattaagcaagggagtttgtgaggcctgagagcacgtggtgacctgcagggtcagggtgtggggcagggcactggccccaggtgaccctcgagaggacagtccacaggtgggccatctggactccactcttggtcctcggccacaacactgggaaagggtgttgatttttctgctcccatgatcgtccttcctgggaagttcgctaccccagctgtgaggtggtggccaatgcctctgtcccctggttccccatcctgaacctgcctggggcataggaagcaccaggccctttcatcccaggagatcaaagcagctggcacaggtgaacaccctaaatcctctccctgccccgctccccaggtaggggcccctcccttgccatcttttgggatctctgggtgagggcaatagagagggggaccttccagaagcttaggataggcgctggcatgggatcagtttgctgagccgtggacccacccaggatgtggaaccagcctggaaacacctgctgggggcaattccaggcagattctccaaggggcgctattataccttcctctggtctcacagggaaacatggtgggaggccctcagatggcatcagtgatgctcaaaggctcaggggatgaaagagcaataatgtcaagacatctccctccagcagaggcacgttagcactcccaagacacaacagtgactggcaggatgcaccaggagtgtaacaactgcacttctagtacttacaggggatccaggaggtaaagtagtaacaaccgctgaaaatttctgatgatgagcattaataagcccccaacgctccaggaaggccccaggtcattcctgcatcatcaaagggagcaggtgggtaggctctacgatgctacataggggtgataggcattctggaagcaaggtcctatgttaccccaggcttagtaaggatcatggacactgggcctgatttcccagatccaaatcctggctctgccactaaatagctttgcgaccagaggccagttacctaacctctgctcgggcctcatttgttcgtatgttaaaaatgaggagaataatcctccacaagaagtaagtattgttatggagattgaataagttattaccggtaagatgttcgtaatagtgtctgagtgtctaaaaagtcttgataacagtttgctgttgttaccatcatcactgtccaaacaatgatgtatccacctaacattggacgatgtaataagtatccgcctaccgtgtaatcagcccacagagtggcccaccctgtgcaatgccctggggagtccaagccctctcagcaat

SEQ ID NO: 34124 - DNA, 1518 bp, Bovine  19866881321608
  misc_feature (1)..(1): n is a, c, g, or t
nctcagttattaggccttattaatttaagattaaaagtcttgaaatagattactgttaaatttttttttcttatttacctgttaatgcctatttgaatggagggacatgagtggacttcaaatgaatgcaacagtctttcttgcattataatcacacaccctggtgtagtggattcagcacatttaaaataaaaataattttatgttctcatttaaccattgcacttctggatcatttttaggcgaaacctgaccaaactgtccctgatcttcagccacatgctggcagaactaaaaggaatcttcccaagtggactctttcaaggagacacgtttcggattactaaagcagatgctgcagaattttggaggaaagcttttggggaaaagtaagtgtcaaaataatgaatttaaactatgaagaactgaagcttgtattttgggtttttgtttagtttgaaacaaaaataatgaatatatgcataactacttcccaactgtggtaaatattagcctagtttttttgttgttgttgttctgatcatgtttgtgtttttttttcttaaagaagtagatagacctttgccgttctgttgaaacccatgctgttctctttttcctaatccattatgctgttaatgaacacatacatttcaaattatttgctattgcaagcagtgctacagaaaacaaaattgtatttgccttcatatgcaggagtttctcaatacttacatacttaggagtggaattgctgagtcaggggtttcacatctgctttgccatacattgcctaactgctttccaaagtggttgtaccagtttctgttcctttgagtagtatgcatgtgttccagtagctctgcaatttggctaacactggtaatatgaattggtatcatattttgctttatattcttaatgacaagggagcttgagcaccttttcacatttgtcacctgtctaggttctttttctgacttggctgttttcctatagacttgtctttttcctattgtaagatactaattctttgttagtcactaacattagagatgtctgtggcttgtgtttccactttgttatattgtcctttttataaaaaaaaaaaatttatttggctgtgctgtgtctatgctgttgcacaggcttttctttagttgctgcaagcaggggctactctctgattggggtgcatgggcttcttatcacaatggcttctcttgcggagcacaggctctaggacatgagggcttcagtagttcaggtccccaggctctagagcacaggctcagagttgtggcacagggactcgctcaactgctccccgcatgtgggatcctcctggaataagaataagaattgaacccatgtctcctgcattagcaggcggattctttaccactgagcccaccagggaagcccatgatttaagtcaagtttttgtttctcagtattaatataaatgttcttgaatatactctgaaattttaagtcaaagaactgaaaaagtagaaa

SEQ ID NO: 34125 - DNA, 1271 bp, Bovine  19866881334144
  misc_feature (1)..(1): n is a, c, g, or t
naaatgctgtgtggctccctatttatatcaaaacagagatgactgcctagggacagtaagtcagtagccgaaaggagtggaccaaagtgggaggagagctggtcctgggacccaaattgggaagttaaagctgatttagactgttgagaattttgcctgacttagaaataaggttattccttacaccctggctctgcctatgctgggggtagtaggctttctggctcatctgagcatgtgtgatgacagtggtaattcagcttgatgattcggagcacacattcctgacttctaggccctgtcccgctggaagggaggcgtactggctctggaaagcacactgagtgggcctggagccagcccacatttggacctcgactgttaagggctgtccttcttgcacctgtggctgcctgggaacgcagcggccagagtttctgtcactttagtgacggaagacagcctttaggacagctggtgaaaaaagatacatggcctccattgcccaaacaggcagtgatcccttgccacccagccttgtttaatgcttcttcactgtgacctcggcttatttctgttccttgatttgtaaagggagaaatctagtgtctgctctggcccctcagaaatgttttttgacttattcaggcagtaatgcatgtgaaaatttggtgctcagtgtaaagcgtgttgcagatgtgtgtgtagggcagcgtggtccccgtcggtagggcaagtgcatggtgtctttagaaagttgtcctgccatgagaggaaggctgtacactaaaacccttaaagctgtaaaaacccagccgtgtgactgaagaacacatggacccgactgacagtgggtcagtaatatctcatactaacacattgttattagatgaggctttctccccacccccacccgcccccagatttgcaaatattctctttccgatttcttctagacttcactgagagtgcccaggttcctgagaggccacccaagccgttccctcggagaatcaactctgaacggaaagcaggcagctgtcagcagagcagtgctgccgcctcggccgctgcctccccgcagctctccagcgagatcgagagcctcctgagtcagggctactcctatcaggacattcagaaagccttggtcattgcccacaacaacattgaaatggccaaaaacatcctccgggaattcgtttctatttcttctccagcccacgttgccacctagcacaccccctgcctgctgcagtcttagaggaccg

SEQ ID NO: 34126 - DNA, 1403 bp, Bovine  19866881346254
  misc_feature (1)..(1): n is a, c, g, or t
nagctgggggaaaggagtggagagagggaggccctgagcaaaatgccagtgagggaaccaaggcagaaaaccatctccacggtgaggcaaaaggccactctcttttgatttattctagcctatgtgcttcttattgcaacagctggtcttcaatgacgcctgctagcattcatcaccttgtgtggccccttcccatgaatctgagctagccccataatttgtgttgatcaataaattgtagtggatatgatgccctgtgacttcagaagcatgagcagccttgccgatctctctgggccccttggagtgctcactctgggggaagctggccaccatgtacgtgttctgagcaccccaagatggccatgctgtgaggaagcccaagctcactccctggagcaggccagtcagtccccagctgttccagtcatcctgactgaggcacgtgagtgaagaaaccatctgggagggccagccccatccagccttcagatgactgtggccctagcctccatatgacagtacctgtgtgagaggccctaacagacaccatccagctaagcctggtcaacacatacaactatgaaagacagtaagaaattgtcttaagccacgaaattgttatctggtgagatgtgatacacacatggtgataaatctccatgaatctggacatctctttcaacctggagaagttcaaggctaccccaggcctggagtgtctacatggccaccccacattcctcagctggacatggtcctcagcgcctggagagccggccctcagccaaaggtcctgagtttgtctcctggtttgtccacaccagtcgcgtgactttagacaggtcagtgctctctctatgccttattttctcgtccacccaatgaggtggtagagttgaaagcattaaagcctcttccatttctctggctcatgaaatcacactctgcctgagaaatgggtttgccaccaccgagaagtgccctgtctcactctgcagcaggaagaagaccatcctggctgttcctgggctttagaaggggctccataggtgccagttatctcgtcacctgtgggtctgtgaagggctgtgcgtgcagggtggtccccaggtttccagtcctctattgcctcttcagctggttttcagcaccgaagagggaggaccaactctaaggcctaggtcaccctggactcctagctctgcctgagcagggaagtccccgcctgcaaggaagaagggagctcctgagaggaggaagcttctggggtggctgtgaaacgtctggtgacaatattttgcatctaaaaatacacacagctgagaaccagttaattgcagcctctggagtcattcataactcggcatttccccgtcatacctgctgtctctgccttcatc

SEQ ID NO: 34127 - DNA, 1233 bp, Bovine  19866881346399
  misc_feature (1)..(1): n is a, c, g, or t
naacttacttcacagtatttcattttaggtcacatacctatctcccttaccacgctgagccatttgtatctaaaaacctccatacttacacaatattggtacgtactagatgctcattgatggggggtggagggagggaggggtggaaggaaacctcactagttcatccttcccagggtctaagaagtaataatctcacttcctcaatattcataattctgttggtctatatatttatgtgtaatcgagtatcttcatatcttacgaagcttgacatgtcagtgcttttctccttttaatgcagcccagttccatggggttgggaagagtcggacacgactgagcgacttcactttcacttttcactttcatgcattggagaaggaaatggcaacccactccagtgttcttgcctggagaatcccagggacaggggagcctggtgggctgccatctatggagtcacacagagtcggacacaactgaagcaacttagcagaagcagcctcaattctctttgagggtagaaagaaaactgagaacttcagaaaaatgtgcaaaagcatagttttctccctaggaagctttcagacactcttgaagaacccacctggagtcacttgggcatcccgggttcagaatcctgtcttgctggtctggatagagactaggactcttgcccctgcatacaaggccctgggttcatgacgatggtggtaaatgggtctgtcttgcgttgactctcatggactttggccatttctgaggatttttcactttagttttgtccaaaacatacacaaagcaagtggatatgtgccccaaattttatgctgataataagcaagtccctgtttggggctaagctattctgtcttgaaaacaccgtgttccatgaacttagggctctctggagagcgccccctgtaggaaggccagggctggtacctgtcttgtaccccagaaggagtggcaggaccgctatgtctgccctttgcctcagcgagtgctctcctcagacttagtgaattctatgctggagtcggaaggtctccttggctgaatctactagcagagcccgcagcccgaggcctggtggggggagcaggtggggctcagcccttctcagcagcggaaaagcaatgaggttgaactttatatatttattgatcacagcttctctggacctttactatcatttaactctcgcttctaaccaaatcccctttatct

SEQ ID NO: 34128 - DNA, 714 bp, Bovine  19866881502416
  misc_feature (1)..(1): n is a, c, g, or t
ntgggtcacgcagccacctggctggcacgaagcccgcggcgcctcctgcgggagagccccccaaactgggaccggagttccaaggcaaagcccagctccgcgctaggcggggagattgcgatagcgcgccgccgggcctcaccctcccggaaaagaaccgcaggtgagcgagaagccgcctctgccgcaggagcctgctccccgcgcgggtaggggggcgacgtggtgcgggagggggccggagcgcccgaaatctcttggcgaaagggctggaggaaaaaaatccgaagccccacttccatccgccaagcccacagcccaccagctccgagactgacgccctccccctggggctgttgtctcctaccccgagacggtgattacggtgattattttgcatttatgtaacattcagtgtttccaaactgcttcccgagctgagagctggttattaaataaatagaacgctattacatattattattttttgtgtgaaaaactgcgcggagaaagtgctttcttgctacacagaaacgtgcatccgattgccttcccgcagggcaggctgttgggctcctcagcctctctctccgccgaaccacccgcaccccccttacctaagccgtgacccaacttttctggctcctttcactccctacaacccagacgtgcccgccatccagctcccagccctggggagacattggatggggg

SEQ ID NO: 34129 - DNA, 1630 bp, Bovine  19866881549512
  misc_feature (1)..(1): n is a, c, g, or t
ncttcattaaattgcattttcccagagcagggcaggccggtgacagaatgagtcaacgccagcttgctacaactgtcgcccctggagccggcgggcacggagggagataattgggagtggtttgacagcttaatgtctggggttggcttcccggagcattgaaggggcggggcggggtgggcgcgggccagccccgcccctaggaggcggcagggtgatggggctgcgtccattcagactgaccccaccagccagcacctttcccctccatttccctagcagcagcttgttgggcaggaaaataaagcacagggaaggaaattagatctggagaataaatgaggctttctttattaatttgtcagaactaattaacgtctcgcccagattcatctcctctctagctgcccccctgagcaggagggagggaggagtctgggagaggccagatctgggcttcagggtcctattctaggggcttcaggctgaaaggcaccccatcaagttctctggtccacttacttggggtgctgagtcccactgtgggtgataaagctcagggggtggagccccagaaaaaccccctgcaccaggtctcagctacttcccctctctgagcttctaccagttcatctgagaaactgagtcagcgcctcagggctgttgggaggatatgaagcagccagtaccttcctggtgcaaagtcagctctccgtgtcactctgggagacggaacttaagtacagtactggaaggaactcccgagttccttcattttcacaaagtcatttttagtttgaccctaacagcaacctcaagaggtgttaagaaacagttaattggtgtccccatgtcacagatgtccaaaagggagcacagagtggttaagaactttatggaaaccacccagtgaattgctgcagacacaggactagaactcagctggggacctgctctgcttgccgacctgtctcatccccccattcccacccctgacctctgcagagacctgactcactgccggagtctcacttactaatagctgcctcacttcctgggtttgagctcaaggtcttcagcccaggagccccccactcctgccagggagctccttcaggctggccctcgacttgggtgagagctggcatttgtctgacagagctgagtgccttcccttgcctcccgtccccatcccagaactgggcccagccctgccgtttcagagaataaccagctctgagaaatgcctctccacaaccaggcagaggagaagcccttgagtaccagccacgcctgggttgcaaaatccagtctgttctctcgcctgccatgctgtggtcgcgtcctagacattccgtttctgccaatcggcagctccctggggcctgggaacatgtggagtgaatgccttccaccccgtagcatctcccctgcggccccggagcttgctgccttctgcacatggaacggggtgggagctggctatggagcagagactccctgactggccgggccagggtgagggtcggcgtggggggcgtgtcgggcggtgggtacctgaaggaagcatggaatgtccagctcctgtgtttgaactgaggaaactgaggcctcgaaaagaaagtcacaa

SEQ ID NO: 34130 - DNA, 1818 bp, Bovine  19866881779609
  misc_feature (1)..(1): n is a, c, g, or t
natgacatcccattgatcctattccccagcatgagcggactgaccagaggcctcagggccaaatggtgtgccctaccccagaggcacggccaggacaggaaagtcagggcctcccttctcccaaagtccagggagatgcaggaccaccgtgaaggcagggctgctcatcagagtcatcagatccaggagcaagggggaaggaaagagggcaacttcccagatccaggctgggaacagagaggaaggaagggaaaccagcgtgaaggggaaccatctcctagggcatgatcgcaccagtggcgccctccgtggggtctgtggtcaggccgaggtggtctttagggaaaaaatggacggggcggggggtcacacagggctctagctggaagaggcgcacagcatgtcctctcctactccctgagtgcagagcaggatgggggtggccaccaaagattcacacatcgggggtgagaagggccttgtataaggggactctgttgttgatagcccagttaagcaggagccagggaggtgtgatgctcgcagaatcattaatgggcccaggagctgtgtagctagccgtccccgagggaaggtctctcagcccctcaggaagactcaaccaggcagcctgagccttttcagagctgtttgttctcatactcaagggcaatatccacgcagccgcaaaccccacccgccttcatccctgtcgactggtctctgtggggaacacagccttgccctgtgctccaagccctgctgatctggagggaatgcatgaactagatggataagtggaaatttaatttttcattctggccatccgtccaggtaatagttctgccctgggctcatctggagagggagagacgaagagcagggcggggaaagatgtgcagtagagtgtgtgccggagacacatgtgtgtgcagggttgccacatcgcctgtacagacccactttttccctgacttcttgggggagtcccggatcctgggaaaggttgtctctgagtcgttcctccaaggatgagtggtgggcggtgatggggaaagtaggggttccccggcagggggagcatgtggaaagacagtggctgagcaagtaggcaggaacagaggagcggggcttcctctctcttggccacagggagcctctgaagggtgctcagcagagaagcagcgagatgaggagggtgactaagaccgagcgcctggggggctgtgtggatggcacttgggaactagttaggggttgtgtgcacaatgagggtttttctagagggaaaccacaggccaggctgtggccgtgcagctgagagcagaggagacagacccaccagagtttgcaggtatgcttcatggggccctcagggaagcccatttcccaagagcaatttcatgggtctggccccatagccataaaacaaagctgtgagttctccttcctccaccctctaggggcaatgctgggggcagaaaaggagcccagggtatggccttgaccaaactaaagaggccaaaggaggcgacgtcagtcctgtccatggaacaggggtgccctgagaagagtgtccagagccctcccaggagccggcagggaagcccctggagtgcaggggtccccaatttccaattccggtgcagagctcgctcagccatcagggtagggagagggggtgaggcaacagggtctgtaccttaggctgggagtccttccgaccaaggtttgtggggcttggaggtccctctgcaggagagggctgtgtgagcctgtgagtaggcgtgtgcctttgagcgtgtaaacgtgcatggg

SEQ ID NO: 34131 - DNA, 1143 bp, Bovine  19866881797610
  misc_feature (1)..(1): n is a, c, g, or t
ncagggaggccctgcccactcacaccttcagagccactcctggtcccaggaagtggatggtaacaaacagctagggtgtgccagtgccctgtacttcctggaaaaagaacgcagacacagtctgggcagccatcctctggccactcaagccaacctacttcttggcttccccatgcccttctccttctgtgtgttccatccagctgttctctgggaagaaccttggctcgggctgtcacagctggctggagggggagactaaaccctgaaaggtttaagccccaaaaccacaaagccaagaatgggattggccttggggcaagcactccatgaacacaggcattctgggctgactgctgcctctccctgagaatctgggggtgctggagaaaaggaaaaggaacaaagagagatctgagatgctccagaaagccagcctccctggggatacctcgataaaaataaatactgggggctgggatgggagtgactcagactgaatcaccaaaggagaatgacaacgttcttgattagggagcagaaaggaggcagatcacgagggaaagacccctggcagaacggtatgtcctgctgaccctgatgcagtcaaacatgggagggtgtatgtgtgtgtgtgtgtctctcacggcctctctccttttcacggagaaacctgaatctagaccttcatttcctccctgcccaaggtttctggaggtggagtgggtgcagcaaggttccttgcaaggcgagcagccagccccgcagcacttacgtggtccagtggtactcagtggctggggggttggcatcggctttgcacgtgagcttcacatccatccgctgcaggtaccagttgccatcaaacccctcgatggtcacctcgggctcgtctgtgagacaaggggtgatgtttgtaaagggtgaggtcaggagaacaggacttggggcggtcctgtaggtgggcgggtggggagcctcagagggtgatgaccctcagaaggggaaaagacaaggaaaaagccagaagacgggggaagagtgacaggggttggggaggtcacagaccctcagagtagaagcagcaggggaacaaggcagcggggagaggacgggcaaagcgagaagacagggcaagagagg

SEQ ID NO: 34132 - DNA, 4117 bp, Bovine  19866880585272
  misc_feature (1)..(1): n is a, c, g, or t
ntctgaaaagactattgttcgtttatcttgcgttttatactgtgcaaattcctgcatcctccctatgaatcttggtgactttcgttagcttttcttgctgtgacaatatctgtcattgtagcataaaataatacttcgatttttttcctatgattgtgttaaaatcactataacactggaatttgctttttttttttctttcaacttcttagtagtatataaaagaaaaaactaagttattccttaggttttaggcttaaatgttttctttaggttgagcgggagggtaaagagaagcagcactaagaagctggtcagaattcagatgaactgttttggaattactggttctctgccatgatgctttaggaaggaccaatgtctggaaccagggtgtgcgcctctgaaattcgaacagtgtggcacagagccaggctgacatgaacgtgcgtttttctgtcatctgtcttggtacggcatattcaagggatttccagttgtttacatcttatagttctgaaccggctataactagtaagtatcttacttgagctctaagccgtcttagatgcaatagatggaaagcgcattattaggggttgtgccacctgtgtcgtgtccggtgggcagcaccttggaaggcgaggcgcctcatcgggtagcatttgtctgtctgtgcatctcgttaataagtaatcgagtatttttgactcccccgttgcactttgaagtagatgtgatcgtaccagtgcccacgctatttcggtactaattccccactgtttttaatttggggcagagatttggggacggaattggggaagcatgcttcatgcaaagttatggctcaaaacgtaaacaccgaaatcatcctggacacgtttcgacagcacacgtgaggcagcctgttgtcgcagcgtgtagagacaccaaagggaccgtgcacatgcgtacagactcagcctcacgacgttcggtggcagatacatgggacgcgagtcatcttggtgactcagcggggtttggtacgtttaaccttttagccagggtattagttggtgttctatggaatcgttcttatttatttttgtccaattagaagacaaagcagggggagaggtgcctgcgcctgtttgctttcttagcacagatgacgtatgtaaacacgcacacacgtgtctatagatttctcccagaggcgtctgtctacacaccgcgaacacgttgcacagttcacataaaccaactccaggagagaaatcccaccataactgcttgccctggctcagggtctgtgtgtctgtgtgtgtcaatctgtctttcaactctgtttccctcttcctctacattatgaggacccgcagggcgaggatccgtaggagtcaggccaggtggattgtctgaatccatctcctctgtgtgaatggcttgtgtctagaagggaaaatcaaaaaaaagcaaagtatcaactgcagaaaccacattcaggttaaagggcaccggccatcctgcttgaactctgcctaaaggacgaagctttcatttgataaagatcattagtcaccaagacatatattttagagagttcccagcagcgacaactccgctggcagtcactggagtgtaccagatggttcattagcataggctagacaagtcagaggctttcagaatcatttagaaaatgtcaaacagaaacaagaaccctgtcactttttattagaattaactacatcatagcctggacacagatttcaccttgggtcagaaaaattaatacagagttccgtgcaccgtgtcatatactgggttaagatcagtcttcctcaggggactcatttgctggcaatatattacgatccttctacttttggaatcctcagaccttttcttttgtgagatatgaaaagaactgaccttgctcaaaacccactggtgtctagctgaccggaggcacaggcagaatttccacaggacgttgtcctaaagcacctttgtgaccgtctgctcaggcagtctccatgagtggggctgaccgaccgtctggcggtgcgtcaggtgggctgaatgtcaggaggaaaatgcaaccctgaattgaacaggctgctataaacagggattaaaacaccattgaaatattgtggttttttttttttaatccagatgtcaaaaacttggagaacttccagctggtggagggcgtccaggagcaggtcaacgccgccctgctggattacacggtgtgcaactacccacagcagacggagaagttcgggcagctgctgctccgcctcccggagatccgggccctcagcatgcaggccgaggagtacctgtactacaagcacctgaacggggacgtcccctacaacaacctgctgatcgagatgctgcatgcaaagcgagcgtgatcacagccgccgcgggctcggcctcccaacaaaacacagagatgggtggggtgggggaggagaagaacaggaagaaagggaaaaaagaaatactctgaatggctccaagcaacatgaattaaacacttggtttaaagatactgaatttaataaggcatagtagtcaagtgctgaatggccaataaatgatgtatcagggtatttgtatcgcaaactgtgaatcaaatgtgtcacatccccagagcgttctgtgcaaaagacactggaacggagttgactgaacccacagacggacccgaacaccgtgtcaggctggaaacggacagacgctttcctgtatattgaaaccgatctccgctgtgaagaaatctaggaactgatctatgctattcgttaggcttacgtggcagggaatttgagcttacagaattcctccgtggtaaagcggaactggaaccatcctcaagaatccatcagctgcaccgataacagccctctcctcttccttccaaggacccggcaccttctgtcctgggatcccggagtctgtagcgaggacctgtgctcagctgcaccccccaggagctccgccaccaaaccttgaaaagcctattcttgactgtctgtatcttagacctgccaacagctaataagaacagtccattgatatgtgagcttgccattttgactatgttctggattgttttgtcacgtgttcataatgtttgggaaaaaaaaaaaaaaagcaggcaatgtccctcttctgatcctattacaagcgttcattaatattaagggcagcgactacaaacttgtaaagctttagctttagcattactggatttcataaaaaatcccagcagaaaggcttattaggatacatcagcctttttaaccatcaaggtttgtagttcattaaaaaaatacaataggaaacatattttgctggaatgtcaaatagtcaccgttctgaacagaaaaagaacacggaagcatgttaagctatgcaatatcaaggcgggggtgaacacacacgatgagtggcgtgttgcaattgatcatcccctgaacgcagagaggaaacggtgagcctggaaagatagcaatgtgcttcaaatcttccccagtagggaagggaagagagcgatggtgacctttctgagtcactctatagaccaaagtctgctatagaacaaatactggaggacagagaactgcgaaacagtctccagaccacgctgtcagtattatcaacaggcgatgccagagatacagaagtcttgccttacttcacaattctcaaaggtagcagatgtggatcaacacttgtttaaaataaagtattaatactttaaagtcaaatgaaatagagtgtttacattccttagggcctctggggggcggggggggactgtgatgtgacgaaagagctggagtagcaatttcttaatgttatttttctgatcggtaattatttttaacagtacttagttattgtatgtcgtgagacactaaaatcagaaacggggatctcatttagattttaattttttttttttttttttgagattattggcggcacaatcacttgtagaaactgtaaaaaaatgaaagtatctcctagtcccttaattttttcataaatgtttctggcttttgaatagtttatttatattgtatatcataggttcaactgtagacaatta

SEQ ID NO: 34133 - DNA, 1255 bp, Bovine  19866880616522
  misc_feature (1)..(1): n is a, c, g, or t
ngtaaaaaggcagggacacacgggcagctgccctttgcgggaccgtgcggaggtgtcgcttacacagtgtaggcgggcgttacaggggtccccacactcgcggtcagtctcttgtgccctggctctggaggctgacctgcttctgcaacaggaaaccccactgtgtggagtcccctcgcccggagacaaggccacccagatgttccaccgactacccgcgaatgctgcccactcctgggttcgccgacctgaccgtttctcatgtcttctccatctgccctcagacctccagggctcaggggccctcctggcccaccacgtcccatctgcagggaaatacagacgcagccctggatggggcgggctcccagaacccacaacactgcaggcgcctgtggggagctgagagaccccagggaaggaggagaagccatgtgagtgagcaaagagaaagggggtcaggacagatagaaaggagagatggaggcgaaggaaaggggagaaaaccaagaggacgatacagcaggtcagcgtgtctccagagacgctggccggggccccgtgcacaggaggcccgagcttcgcctggcacgtggcgaaggcagccccagaggaagcaggtggtaagcatcaggtatttaagaaagacccagggctggcagagggacgctgcggaccgtgctgtgctggagggcggcggcattcttgggtcagagatgaatgtctttaacgtgagcaacagcacagacgtgcgatttccatgcagccattctgcaaatggatgtggagctcgcagagatttgtatgatcgacttcccgagctgcagaagaatgagtcagagcaagtcatccttcacttgccctggaaaacagaaagacctactctacctcacaggttcagagggcaaagtccttcaaaaagtgttagggagtgtcacacgtgagtcatgtttgcggcgttgccacccactaccagactcggagtgccggcggagatctcccctccccgagactgaggagcagacgttctagactttcttaagatctgtgagcagcctgtgtgtcctgctgggcagacgtgtgcaggccttggaccgaccagggacccagggaagtctcagcaaacaggtgtggaccaacttctaagcagacaggctgacacactgctctctattggccacgcggtcggaatcagagctgggcacccggggtggcagagcctgcccggcgtgccctagtggggagcaccaccccc

SEQ ID NO: 34134 - DNA, 1416 bp, Bovine  19866880739040
  misc_feature (1)..(1): n is a, c, g, or t
naaaatctaaaccatggcagacaccatccagaggtctttaaagagaccatcactttgtcataataagaaaacaggagcgcacggattgccctcattccaatgctaaagcaagaaagcggactttaaaaatcttagattaagatggattgtgggtgggagacagagtccttcttaggaagagagagtatctcacaaaaaagtgatataaatttgcattcatctagaaaatccaaagtaaatcaatatgacataaattataggtgctggaaattgtggagctggttttaaaggaagataatttatactgttctttactctgggattaaacaaacataaccagaaggtacaacctggaaatcaagttcgttgcaaagcacactgggggtcctatgggacgggtgcccctcgagtgagccggagcgatgtgactgacatgcaggtaaccggggggtaacaggtgctctaggtggtcagtggccaggcctgagcctcgttcctgaaggtcagggggagggtaggagggcctcctcgtctctgtcccccatccgcgctgctgccctgatccaagtttcatttccattttctcatccaattacatcttgctcagttcctcactaaaatttatagcaaactttgcaaagcttttgacctgtagcatcttattaaacttttatgaaaaatcaatgccgctccatcctacggaggggctgttcctcacgccattgtcaggggtgactgaagcctatttacccccggatctgacgagagagattgaaactgcaggaagtcttcatctcacaggccaggtggccataaagaggaaattctcatattcttctaaaatatggcgtttccagaaatgccaccttgggaaaatgagtctggaaagaaagcaaaagcgtaagtttttaatcatttgtcttctttttattgttgttttgatcgcatcgttctcccccagaatagcatctctgggccccctggctcccctctgggttcctcgtgtgggacacaccagaccctctggacaaggacccgaccccaccatccccctgctccacagctattccagtgacacgccccaccggtcagccggtcagaaacccaagaactggcccagaaacctcttgactagtaaatggttcttgattctgtaccctggctccaatccactccccagcctccgctctgtccttacgtccaacacggcagccctccgctctgtctcctagaccctcaccaatggcttcctaactcttctctcggccgcccatctttattttaaatatgaggcagtaagtacttttttaaagtgcaattgattttatttttttaacttatttttatttattttgggccacaccacacttgcatgtggaatcttatttccccagctaggtatcgaactcatgcccc

SEQ ID NO: 34135 - DNA, 1202 bp, Bovine  19866880779089
  misc_feature (1)..(1): n is a, c, g, or t
naaccctttggaagaaattcttgccagctgagttttgtgctattgaagtaggacatttctgaaggcacctcaagcctccacatggccctgaggctcttccgcacagaaccagagggtgcttttttcctaagagacgttgagagacctgtaaacccactccctcattaaaacgggatcacagaaatgtgttttccttgggaaaaaattcatttttaaatagaccgtttctgacttctaaatatagaccaagaggcttgtctttgtttttaaacgtaaaaatgcaggctcctgagagcaacgtgactggggacctttggtgtcacgcgtgtgctgtttgtttattttgccatcatctggcgtgtcagccaggcctcataacaccccatgtcacagaaaagcaaacagtcccggtatactcacgagcgcgctgaaatcagaccgctgactggctacaattcgatgccccctttgctataaaaaacatgaccctaaatcctaaccagctttagagtaaaaggccccacaattatgatatagtaacaaagttcatgctgtatacaatgtgattgtttcaatacttcgtccatcccttttcattttacctgctatttatatgaggcagtgaaaaagtccagcggaaaatccactctgtggtgtgttaggggtaatattcatttacctggcatgtttgcaggataaaactaaatgtagtggaaccttcttttataatcctggtgtttgaagttagagctacagccgcctggcggtgtgattgtaaccacagaccttttccatatgtatccacatttcccaaaggctggagtcatgctttatctctgaatacctggtcagtcctccccaaggccccctgagttttatccggatgggtctttaccagataatagatattcaacaagtactaaccatttggagcagaaataagccttctgtttgggctgtttcttctccaaacggtccagtagagacttgtagtaaaaccagggcaacgagtccaaagtctcaggcaagacagtcctggtgagagtgggtctgcgtggcttctccaccctgttgatggcgagcagcacagaggttgatgcgcgcttctgtccttcctgagaggcctgcggggctggtgtttggaggccagatggagaaacatctaccgtggtatcatttccatcagagccggcagctttatt

SEQ ID NO: 34136 - DNA, 1491 bp, Bovine  19866880800413
  misc_feature (1)..(1): n is a, c, g, or t
ncccttccactacacaaggacacagggatttcaagggtgctgactataaaacaggaagaaggctcacaatagaaccatgactatgctgacaccctgatcttgggcttccagtctccagatataaatttctgttatctttaagctactgagtttgtggtattttgttacaacagcctgattagataagatactggttttccgttttgcctcatgttcattctttaacccatgctgaactggctttcattcctaccatgctagaaatcacccttgctaaagtaaatcaatggtttccatttccctaagtccagttttcatcgtacacaatggaccaggtactctttgaaatgttcttgtccctgacttctgtgatcacattttgttagttctcccctaccatctgggcttcttcttttgtactgtataagccttttcactcaactctttactgttatgtacagttccttggggctccctcccaagcactctcatctactccttaaacaaatacttactgtgcacctactatggcagagacactgtattagttactcggcattgcatatacagcccctcttcttaggaagtttagagggaagtgaaagtgaagtcactcagtctttgtgaccccatcgactgtagcctaccaggctcctctatccacgggattttccaggcaagagtactggagtgggttgccatttccttctccaaagctgtcaaccataaattatttaactgatcatttcattatagtcagtatgccagctagtgatagggctcagttgctcagttgtgtccgactctttgcggccccgtggactgtagactgctaggctcctctgtccatggggttacccaggcaagaatgctggaggggttgccatttcctcctccagaggatctttctgacccagggatcaaatgtgtctcctacattggtgggtggattctttatcactagaaacacctgagaagccccatagttggtataaggactattggaaagttcaaggtaccacttcaacaggttaactggaataaatgtggctttgtctgaaattccaaagattcaacccatttaatcacagggggaaccagaaatgctcttataagcaaaacatcttctcacatttgagaaaaaaattaataaacaagaataaaatctttttgaatttatcagttgaaattgaggttcttcttactctcatttccttctctgaagtgtttcactaggtaaatctctagtctgtctgaagagatcaaaatttaggtggcgaagtgattgcagattgtgttttgtttataaaaatgcttctaccttgtgccacgaggctgctggtggaatttcggtagggctcctgattgtcaaagatcaaaagattaagacatgttggctatctatattttgttgcaacttttaaatgtactttgaacttccaaaccacatcattccagcctgataggacaaatattcttggatctttgatt

SEQ ID NO: 34137 - DNA, 2035 bp, Bovine  19866880844395
  misc_feature (1)..(1): n is a, c, g, or t
ntgtgtgagtgcgttgatgggcaggtgtgtgccttatggagaatacctgtagctaaatcagggcacgtaggtcagggctaagaaagaactcacctgcacaagcccttcaacttcttcagaagccgcaacctgcctgcccttcgtttctctgtccccagttttaacccaggtcagggttgcagagaaaaaaaagggactcagatgtgctgagacttttttcttctcgggggacctctattattgcacttgccatattgtaaagcaattatctaagggttttgttttgtttttttttttaatttctaaaaaagtttccggaactcattctctccccgccctcctgcccctccattaataacagacataactatttggcataaatcagcctgtgtgacatgctagagtacgggggagcagagtcacagagcagctcaggggagtggatcatccttggctcctgccggccttctcccttcctccagcatttgtctcctgaccgcggagctggacaggctgatggcctcacagcttctctcccctccctccatccttcagtgagaaccagagacagcaggccttccatcagacccaagagatgcagagagagccatccagacgcgagagaattgtcttgtaaaggtctgggcaactaaagaggagacatgaaatgcatacaaataaacacaccttctggttgctggtctacaccagggatctctctactgcagagccctggagatgtagttcttgctgggggacagccttctctcctctccccacctccaaaccgcactggtcctctccccccacctcccaaatagcactggttctcacatcttacacacatgagccttcctatctgaggatggagaccattccatctctgtgcatccaggttcttgcacagtgcactttgcaaatatgatctcactttatttaaaattaccacatcaacagtacacaatccctgttttgtagataaggacactaaaagttaagttcctttcctgagagcacgtgaccacaaagcggcagatctaggatctgaggcaagtctgactccaaagcccatgcaggactgggtggtcctgtggtgaagaagccgccttccagtgcaggggacgtgggttccacccctggtcagggaactaagatctcacgtaccacccagcaagtccaaaagataaacaaaacaaaaccaagaaacagaggccacttgatgaggcccccactgtgatgagaggcaagtaacagttcagtcagtgcccagcaacaagcagggaattcgtatcaaacacagcaccagactttccggtatcaattaaggaaagaagaaactgatgtttccagatcagtggtgactcaccctggagcctccctggggcacagtccagatgctgctgcctcccactaccttcaagtcatctgacctggaacaaaacagcttacaaaacggcctgatgatagaattcttaaatagcactaccgaactgaacttggatccccttgctgggcatgcagcaaagccaacctactgacaccgggttgtggtgaaggaaagcacagcgtttattgcagggcaccaagtcaggagaatgggcagctcgtgctcaaaatgcctgaactccccattgggtttcagggaacaatttttaaagccaacatttagggtgagggctgaagggggtgtgaccttctcctgacgggttggtgatgaggtaaggcgtggcgtgtgggcaatcctaatcatgctctgttttactttgttccctgactgcttcttgtcagccgtgttccctgacttccctaattagtaactgcttgagcctgctctttggaagtcagggaagaccaaggacactaaaccctttttccacaaacctgatatagggcacacagaaggccctgtgccctgaaaggccctgaggggtcctgtgctgatggctcagtcaccaagtcgtgtccagctctttgcgaccccatggactgtagcccgccaggctcctctgttccgtgggattatgcaggcaagaat

SEQ ID NO: 34138 - DNA, 2798 bp, Bovine  19866880998064
  misc_feature (1)..(1): n is a, c, g, or t
ncatacacatatatctacaaccgattcattttgctgtacacatgaaacgctgaaaatcaactatattccaaacaaaataacagggacaggatttgacccacctagtgcagcactcagccatcgcactgctgtcttctcatgtcacttgatcacctaaaatctccagggcctcgaattttgcctaaagagccgtcacattcaagccccacggcccgagggggccctcctcccttctcgcccacacaccctacggttagtttcttgggattttgtcattgtcgtttttcacatggaccgcttttaaagtcctttactcaatttgtcacaataccgcttctgatctatctctcggccacaaggcacgtgggatcttagcccccaaccaggggtccaacctgcacccccgcatcggaaggtgacgccccgacccctggacccccagaaagtccctgcagttcgttctggacgtggccctcttccctcacactttgcacaggccgttccctccgccaggagccttcacaccatgccgagcacagtcagggaacccactcctgctccagctcagcgcgggcgggcttgcccccgactctcgcagctgttaaagccagcccctaaagccagcccccacgtctgggtttcacactgtaagatggatgttggtcacctcccttcttaaacactaggctccccggatggtgacttactccaccgtgaccctagcgaacggcatataggagatctaagtaagtacttgtgggctgaatgaattcattatacttgcagctgtccagaggacaggagcacctcatgttggatgcaagattaggaggcctgaccattctcaagaattgatccatgaatgcacgcctgtgtactcgctccgtcacttcagtcacgtccagctctttgagatccctttgtgatcctatggactgtggtccaccaggcccctctgtccatgggattctccaggcaagaatcctggagtgggctgctatgccgtcttccaggggctcttcccaacccaaggatcaaactcgcgtctcctacagctcctgtattgcagacagatcctttaacgctgagccaccagggaagcctgacttagcaacactagaatactaaaagtattttacagcttcaaacacattatcgtgttaccaaaatctgctgaaactgtgagcattgaaccaaacaaatgttacaacaatctttacaacaagcaattgaagaaagataaagtgtaataataaaagaaatagtatactctggcctccaggcaaaaggcattagaaattgatgtttttttcaagaaaaagtcaacaaacatcttggcagtgaaacgggaaagtcaaatttagtcaagtttagtcaagacgatatcatcgtggaaagacattgatccagtaggctcatcttctaaaactattcagctctattcagctcgtcttctaaaactattcagctcatcaactattcttgaagggaatataatttttctctggcttgaaccttgatgaccatggggaaaggctttaactgggatgttcttttggtgatagataaaatgtgtgtgaaagggtcacagaacatgagcaggattctccaagaagttaagggtttagtcattctacggccaatggaatatttttatgaagctgtgtttataaatatggctgactggtggctcaggtggtaaaacgtctgcctgcaatgctggagacctgggtttgatccctgggtggggaagatccccaggagaagggaatggcaacccactccagtattcttgcctggaaaattccatgggcagaggagcctgctaggctacagtcatggggtcgcaaagagtcggacatgactgagcgacttcacttcacttatggagtacttgctgagatgctggatttttactcttttaatcaattagccatataacagagaactatgacggttcatgaaaatgttaaggaaaataaaaagggagtgtaggtaagcaatattgcccagtaatctaaaaataaatcattacaagctgtggataataggaaatggtggtagaaaagggcatttgggaaaggactgtgggcatcgaaagatgagggtgagcaatttgagaaagtaaccaagtcatacagcgttggaaagagaagactcgttacagatcactagaccttgattactaacctcattcccaagacccggtaaaatcaagtaccacgtgcagtggtattccagctactagcgtttcaatcctgtagaatcttatatccagacttggatatatttcaaccctagtcgataaataacagccgtttttttaattctttgcaaagccactaagtgtctggtatttttaattacactgggataaactcccttgactgcttactacgtgtttactggtatcgcaccgtgtgtcaactacgttataggagaacctagcgtcagactgatccagtcttcccagctttagtcttgtgctcttttataaatcagagagcagtgtgttgaaagatttctccatcaattactaaaaaatatatatatatatatttctattagtgtaataattaaggcagaagctacaaataaatatggcaaatgttatagaatcagagtattaataagcaacaatcttcaatcagaatgtttattttttcagcttttcaagaaaaatctattatcatttattttacatgttttatactcttatcccccaaatatctgagtgaaatttgatgccaggacagcttatggaagtaggtgaacagaggaaaattggaaactggaat

SEQ ID NO: 34139 - DNA, 1377 bp, Bovine  19866881072218
  misc_feature (1)..(1): n is a, c, g, or t
nacacagcagaggccccatgctccgccccccgacttctagacgagtctgggaatagtgacagccacctttcaaggaggggatgccaggagaggagctgcaaaagaaagagcttgttttgccggcgtctccagcagaggcccagcagcttgctgggtttgaggggttttgcctttggcctgtgcgcccctgttgagttggaaggggcgctggaaggcgggcgagagcacagttctaagcaaagccacaggaaccaacggaaacacaaaaccccctttgctttttggcaacattaaatctaattcacggaagtggcccagacccagcagattcgacgacagtggttaacgctgcgtttgcagcgcctggagcaaaatgaactgtgctctctgtcagtcagaccacgacgcacgggcgttgggtcaactgcggagcaaacccacggccgacctgggtcgtgctgctgggctcagctcacagcctcggtccaccgggggagcttgcgaaggctggaagcctggcagacctccgcacgtgtgcatccccctgtgcgtctgaatattaattcagttctgaaaacaggcacagctgtctgcaggtcacagaactacttataaagtacctgagaaaaagatggaacagcaaaaaccagttttccatgatgtggtcgttggttttcctgaagctggtctcaatatttgccttgttgtagccttccaaaccctcacctgtgtgctagagcacgcgtgcacacgcacacacacgccgtccctgaccggtgggtatattcccctcacatcgttccccaagtgcactcttaagttgttccttgtgaaacataagggaaagagggctcccggcttcttcctacaattagcattccgtctcagtttttcccttttcgtgtatgatattataatttagaaaaacactcaccagacactttctagatctccacaggattgcccggctgatggagatgcagcggaaggtaatgctggcaaataagcatttcctaaaatttatgtaatcatttgaaattcagaaaggattgattagcattcaggagatgcccccgctcaatatttacaccatagagatttggcaggagcaaataatggcacataaagttgatgcttgtcttaattaaatgcggtataataggtgttgtgtggatttttttttttttttctttcagtgagcaaagcagtttagcaatgagcagatataattcattttggagttctaagtttgagctgaatcgatatgaatttacagccgtggaagaagtgattatcatttgttatctcctggtgcaagaatataattgcctaaatagcatttatttaggcatatttctgaatagcttatgcctaaaa

SEQ ID NO: 34140 - DNA, 970 bp, Bovine  19866881145876
  misc_feature (1)..(1): n is a, c, g, or t
ntttcgtcgcgaagtactgaagtcctttaatgaacttcacatgtttccgatcatcactgcaaaatataaacacctcgagctcccctgttaaacagaaatcaggcggcagcttcgcgcggctccctgcagggatcgggtaaccgtccagctccggacgcagtccggggaaggcgtcttcgcagctctaagaccgagaaaaactgcgcgggaggggcggaggccgggagacccaggtaatacctgatccggcccctcccggagactcggtccacgccgggggagcctcgcagcgcgggccacgggccggggaaggcgggggacgccgagggcaggtccgcgcggcccggccgccgccgaagcctccgggcacctcctgcgaaccccggggcgcacttgcctctcgccccttgctcaacttggggctacacacaggcgcacgaacgccccagtcaagtttgttttaagttaatcagtggcattttcagggggcggggcggggctgggcgggggatgggggaactgagagccggcaggagtttcctctgatttgtttaccgaaaaggaaagggagacaacaggccccccacccgtccccaaagtgccaggacactccagcaccactttggcctcctggccaaagcgttgtgtgtgtgtgtgtgtgtgtgtgtgttttaaatacagttctgttttctttacggattctgggggcttctggaaagggcctttagggtgggggggggtccctagccgcgcttctcgactgacccccctaccgggagcctctcccgagacatggagtcctgggttggggcgtagatcgggatgagttaccagagtttggggagggggggttccaggaaaagatgggaaaagccgaggcaggcgtctgagctccgagaaatagaaatagagacacagagcgcagtcctctcgcgggggccaagggaggtccccgctcgggtttggggag

SEQ ID NO: 34141 - DNA, 1249 bp, Bovine  19866881277649
  misc_feature (1)..(1): n is a, c, g, or t
ncctgatttatgtcaagggtattctgcttatgctgagtattttacatttcggttttcaaagggaattatttgattataatttgaagataccaataccatttaatataacacctttaatacaaagctttctaagatgaaaaatgggactgtaactaatatataagatgttttgtatcaaaaatatagtttcactattaaaatatgaggtacaaattttcaattataatataaataattcctggggatgtaatgatggagaccacagttaataacatgagtgtgtgctctgactctttgcaactccctggactgtagcctgtcaggcttccctcggtccatgggattctgcaggcaagaatactggagtgggttgccatttccttctccaggggatcttcctgatccagggatggaatctacatttcctgtgttggcaggtggattctgcaccactgagccacctgggaagcctatagttagtaacattgtattgcaaaaaagatatttgttatataaatatatgagcatcatatatgtattagcttcctgctgtaacaaaccacgactacaaaccaggagcatacaaatagcacacacgtcttctctcactcttctggaggtcagggtctgaagtcagttcagggaaccacagtcaagttgccagcagcgctgcggtccttccgaggccccttggaggagtccaggtccctgcctcttccagggaactctggcattccggagctccggatacctttgtcaccttcggagccggcagggagcggctgtcctccggctccacttgcttcttcttcctcccgtgactttcttctctgtcagatcttctccctgtctcctataagggtacagtgatcacaggtgaggtgcacccagacaatccagcagtcttgtgttaatccaggatcttcatctcagcatccttatctgaatcacacctgcaaagtccatcttgccaataaacattctcacattccacggattagggcctgggtgttttctctgggccatcatccagcttcccaggctttcctggtggctcagcggtaaagactcgcctgcaatgcaggagacacgggttcagtccctgagtagggaagatacccttcaggagggcatgacaacccactccggtatccttgcctggagaatcccacgagcagaggagcctaacgggctatggtctagcggaccacaaagagttgaacaagcaagtccagttctatgcaacagt

SEQ ID NO: 34142 - DNA, 1832 bp, Bovine  19866881432974
  misc_feature (1)..(1): n is a, c, g, or t
nccaggctcctccatccatgggattttccaggcaagagtactggagtggggtgccactgccttctcctcactaacaccacagactgatgttaatagtttaaataatttacttcaaacttcataatgtattaaagcaaaattatactagtaaaatataataatagagatttttcataaaaagagtgttagaatggaaaactgtcatatattaaaataaaataagtttgatatgttacttttttcattttgagggtgtagtgcctgtagcaagtatagacactggaaaaaataaaatgaaaacagtagaaagggatattataaatacccacttcacctaaagtgaatatgtaaaatatcacttcaaaaatatcagtgtgtagctttgggatgaataaaacaaactcattaattgttcttagaaaatcttcataaatatctatgtgttgctacaagaaaaaccttcagcacagcagaatttggtcctgtctagaagtgtttctctgtctccactaactagatgtttatgaagatttcctaagagagaatttttcacaaggatatctatcctaacatgaattatatatcatattatttgaagtttatgcactatggcctcacatctttgcttaaaaacataacttttaggcttaggagcagagattctggcttaagagtctcctaaaataaaagcagatgcaatcagcacaaaggtctcaactgaaaataaatgaatttatcccggaagagaggtaaggctcttagcaaaattagattttagtcacaggatgttttaaagtgacaaaacgttgaactaaattgtacaatgatattctactccattagtaattaatcattaaaggcaaaaaaaaaaaaaaagatacatttttcaaagctttgtaattgatcttttcaaatatagccatggaaccacaaaacacttcatatgaccctgccccagcaaaaaaatttaaaaaagaaagaaaaaaggacaaaagaacaaagttaatacttctgtatagttatcatcaagataaagaatactaagataatgaattacttactaatgcatacaggttgagctgaccatccatttttcagacatgtaattaaccctgatgtcttaccatctgctgttacatatcctggtttacacttatattctgtttgtttatttaggggatacgtaaaggtagattcagacaaaaatccattctcaatccttatattggattttgaacatgtttctaaaagggagaaagcataaagaaaaggtaagcatatatttgatacacatttcataaggacccaaataaggtaatgatacaaaaaaggggagtcacttatgactataaaccaagaaaacttctaatcatttaaggtcgtgtgtaagagaaaaaaaaaaaaaaaaactatgagtttccaaagatattaaaccaaaacacttgatttctgttttctagaacaaagcaagatttaaaatactccaaattccttctaggaaattattagaaatctgtttgtctaaaggatctggaatcccacagcatgtcagaaatcttttagcaatgggtttcctttcctgggacttgttgaaagtattgtctagtctggatctcttacacaacccagaacacagatcaggtgatgatcacagaatcttccaccatagtgaccccagcctttgtctctgagaatttgaaatgctgtcatcaaaactgggtgcttaaagccatatcagtacatgggagttcaacgaagatgacaaagatgaatacatccattcattttactaaggacaaaatactggatccttcaaaccatgaataactaaa

SEQ ID NO: 34143 - DNA, 744 bp, Bovine  19866881866168
  misc_feature (1)..(1): n is a, c, g, or t
naaaaggacagaactgagaaaggtgtgtttgtgtaatgaggataaatctctttggttgacataaggctattttttgcttaaaagctgttttagtgctgctgtaagataccagtcctctttttctttttcaagcccatcccttagaagaaaagaaaacgcagtcagtgatcattagccagttttattttatttactaagataagatttacagctctcaagcacggctaagttcttgtgtacggcccacaggtacctttgtgacacagaatatggtggccaagtttctttgtaaatgctggactctcccaagacagtgaaaattcctgcataccacttgccccggagacctcaaagaaatagtcaaatcacagctcattactgattagaacagtcatataacagaaggtaatgtgtggaaaatcagttatcacaggacaacagaaaagcaaagattatttttaaatggcattaggataactagataacgttgtggacaggaaaaaggatgcaagaccatgatttacattaatgcacaaaatcaaagtctaaactagagcacattagttttaaaatcattacaatttagcggaaaaccaagtaggtctttggaagaacaatcacatgttcctcagacttgacacaactgaaggaagtctgaaagaaaacagaactctatcaataaaataaaatacttgaatttctatacaaaaaaaaaatctagattagaggaaaattagtataaat

SEQ ID NO: 34144 - DNA, 2074 bp, Bovine  19866880172272
  misc_feature (1)..(1): n is a, c, g, or t
ntttgcctagaaaatcccatggacggaggagcctggtaagctgcagtccatggggttgctaagagtcagacatgactgagcgacttcagtttcacttttcactttcatgcattggagaaggagatggcaacccactccagtgttcttgcctggagaatcccagggacgggaagcctggtgggctgccgtctatgggtcgcacggagtcggacacgactgaattgacttagcagcagcagcagcagggtcctgagggtatcctctgtgcctgtcatggggaagcagggtgcacccagtccccagcagctcctgagtccagtccagcctggacatcttcctgcactggtctctcccgggttccctggaggtggagtgtacccattgtcttaagaagaggggctttagccttggccatctctgcaaggtcagacccattgctgggtttaaagccaacattctctcaaaatgtaggtagagaagaagtgacattaacaagaaatttactccaccctaaatgactctgccaaggtgcagactgagggtacaaaaatactatcaattttcttaaaaagccatacacaatttttttctattggtgttaaaagaccaaacaaaaatgtttatcttcattagctcaatgcatggtaccgcgaggtagtggaggaaacgggagtggggacttcagaggccctgggtctcatcctagctcccccagggactcagaccttccacacaggtctttggcagactcagtttacccacaccctcttcaagactactgcgaggatcaatgaattagcacattcctaaaccaaacgaaccgctcatgcacaattactatggctcttgaaatgaagatcaagtaacagcggccccttgccttcagttccctccaggtcagaccaccaggaggcctaagcagtgcagcaggcactttctccctgccctttccacacaaccttgagctgactatttagtagagaagccaccctcaggtggatgaggctggggtgattgtctcttgacgaaccacttcctaaaaaggaacgctaagtttacgacagtctttttggtcaaacaagcattccagaaactcactcatgtgtgacttttcagagcctgtctggattaatttgctatttgactccaggagcctggagctagggatgcttggagaaggctctggagatgtgagtctggcattctagccagatgtccagtctttttcacggatgttggagaaaatattcatggaacaatggtaagctgaatgaagatcacaagattctaagagttcagagtccttcaagaccttctaaaagccgcatctatcatttcactgctgggaaagggaagatgatttctcaagagaaagagaaaggacatctgttgtgtgtctccagtctgtgatacacaaggttcttcatctcagtacttatttaatttgcacgacatctttttaatgagaaaaccaaggctcagagatgttaagttacttgttaaaggtcacacagtcacaggtaaggataacagagccaccttctgaggaaaagacacattggaataaactgaatctgacttggtaggataaatgtcctcttctttttctcccttctttctgcttcaccctccaagaacttctgccctgacttgaaacaggcggtccttttctctacccaacagtgtctcctgagggaaaagtcctccctcgaggcagcctccttacctgtttctgagtggcagcaagcagtccttcccttcaggagggcgctgggcttctcatgccggcagatgagcgcccggcaccactcacagtgttttcggacctcgcagcagctgcaaaggtgcagagaacacgggctgggtaggagcctggcaggagtgcccagctggggcagtggctgccggaggggcctgctgggcagctccgggctctacttatccttcccctggagcttccggagggacaatcacagcacagggctgagggctttgcaaggaggtagcctttggggccacttgcggaaggatctgttggccacccccaaaagaccagctctatgtggccgctcct

SEQ ID NO: 34145 - DNA, 3037 bp, Bovine  19866880346482
  misc_feature (1)..(1): n is a, c, g, or t
ngtgtggggcccactggctccatcgaaaggctctgggacgaaggctcgctcctggctcctgactccgctcccggccatccctctgctcccttctggaactgcagcaacaacccacagcaggtagagaaagccacagagcagtgtcagcgcaatcacgctggagaacaaggcttctctaagcagactgtttctgggtgccggctgttggcaggctggagggaccaggcgaaggctgtctgatggactgctgggcgcagagctgtggcctgctcacgctgcagagcctttttgatacccagcctgggccccccacggctccccattcgcctttgttctgggagctccgcccctgctccctccccactccccctcctccagcatcctgttcgacgggcaggatcagtgccccgcccttctgcatccatcaacgggacaggccgcgggcagcccacgaaggccagcctgggtcagagggggcctcctcaggtaccctcccgagcctgtgtcccagaatcacagatgaggacaggacgacgttacaacatccaggtgtttgtcatcagctaaaggaaggtggagtcagggaccagaggcagggaccagggaccatcagcttctaaactggggaggcccctttgccctcagcctcgtgtgaccccctttgagtggttaaggggaaggagcttacatttactatgtttctgctctgattgaagtgaggggctgggtgtttctcatgagctctgaaccaagtacagaatcccataagattctctggagagatggaggagagtccccaggatcaagaatgcccataaatagtttctttaaatgagggaacacatgcacacattttccatgaatgcaattgctacagtagttttccctggttgatcacacctaattcagtcattctgccttctgggagtggagtgccagaacctggagtcaggctctgactctagctctgggcaggccccctcctcggcttctcccctctcaccttccagaaacctttgtaagagtctgttccccaggttcttcagaccacctcttcatctgggcatttatggaaagagcagcaagagaattccactcctttttattccaagagggggaagcacccactgtattggcagagccagcagtgagagtctggatggctttagatggaggaggctggctgtgggacctcctgtggggcttgggggtgggagggtggagagccgtcccagggcaccccatggatacccagaagacagatctgggagttcatggctggagtctgacttgggcttgtgcagggtgactggggctactggggggcccacattgatgaccctgtttaaatgccacccctccacagagccctctactctgtgcccactcccaggtgacaaccatggcagtgtgctgtgtggttcattcataagtctgtgtcctgcccatgtacgactgcctccaggcccagtagaaactgactctgggacaagtaggtgctctttcctgagctccaagcctgctgagtgctgtcaccaaacaggagagatgaagacaggagaggagcaagaaccagcagcacacctgtggctctgggctgtttttcctggcccagagcctgtctctcaccaactccctgtcccactgatcacgtggtacctggttgaattccagaggaccctggctccagtcctgggtccagtccctggttggccccagggcctctgactatgccagaagacccttagcccctgtggctgtgtcagcccctcacacctgacacagtgagccagcacagaggcagctgggtcaacacctctcatcacagctgcctggctgaggtggggccatcgtgccattccagaaacccagaggagggggaagtggagtcactgggcaggtgggtctcctagaggattgcacaatgcaaaacctgcacccagagaaacggccctgcacccacaagaccaggaagccccttctgcaagtggatgtttgtggatagactcccagtccctggaatgggcattgttctgtggcccaggtactgacttagtggctccctggtattcatcaccttgaacccttggtcccctggaagtgggaatgagttaggaggctggcatgtgaccgagggaagtaagaaataaggtggcttctcaactagcaactaggactgctggatgccccgactgtggcctttcaggacctgggtcatggtcctcacttgattgggtttggtgtacactttggccaagtcattcaatgtctatccccccagtgagcatcgggacaacctgcaggacagaccagctgccatactccaccattctgaaaaacaaggagcttgaatggctaaatggcttgtctcaggcccaagttgcccagtgcatgtaacggcattttgcaaataaaggcagggaagcaggtgtgttgggctcagagaggcatccggctaggtcctgggctttgctgttgatggcctctgaagggggcagtgatctagtgggcaatgagagctgatggctaaatatttgagaattttctgagttagtcttaaaccaactggcagcttgaaaccagacttggtgggagcatttataccacagaaattggcaaattctaaatcaagcccccctttttctggaaagccagcttgtcatcacattcctgcctgcagaccttggtcactctctctggggcaggcaaagcaccacagccagtgattaacaagcttctagcatctccactcctgcccaaccacttgtgccccaagtcccctctccagccccccttgcctcacgctcccccacagcccttattcttctgggtccttggacctgagggcgaacccctctaggttagctgtccacacagtcccacctggggtccccaagacagaagcacacaggggacctcatggttattaggcgagctggcaagggttggattagggaggttctctcgtgaagatcaggaaaatagtgacctcagttctccagctcccttcagcctttgggagaggcccatccctgga

SEQ ID NO: 34146 - DNA, 1615 bp, Bovine  19866880472106
  misc_feature (1)..(1): n is a, c, g, or t
naaatgatgtcagttgtttttttaatgacatcaaccaaggatgttatttcatatgcacttggcttcaggactctcaattatagttcctcagctcatttgtatttttcagtaatgtgtatcttatgatatttcatcactaatctatggtggaacctcttcaaatgccaaattagtcacttattttcccttctattttaacattctaaaaaatttcaaagttggttttgtttatggacaaattttctattccaacatgtaaataagaagagagctaaaaatacacaactctacaaatagttttcaaaaatcagttagcctttagtaactgaacttagtaaaaaaagattaatggactttcctggtggctcagtggtaaagaatcaacctgctaaatgcaggagacttgagtttgatctctgggtggggaagatcccctggagaaggaaatggcaacccactccagtatccttgcctgggaaatccccatggacagaggaacctggcaggctgtagtccatggggttgcaaagggtcggatgtgacttagtgactaaacaacaaccagtgtgatgttacacatggtgattgtgtagatgttatcatcatgattagacatcttgataaatggagggtagaaaatggagggaattgtgaggaaagcacagttaacgttctgtggaaattagagaagagagctcttcctagcagctgggtcatttaacttggcctcgaagaatgcacaaaaaccagacggttgaaggttgaatgggagttgagaaggcagtttaggcatgaggaacagaaagtggtgagttcattttgctgaatcaaaagacccataaagaaattaatgaaaaagaaagtctgaggtacaagtgatacaacattagtatctgttatcctgattcttgatttaaaaatcaaaatttcaaagcctatgcaagaaatgggattagatatgaatggtgactgatttgagaatcccatcagttcaggtcataagttaaatttttgtggatatgaatttttctagaggagatatccataacttgtatctggttttgaagaattctctgaccagaaaaggtgaggctctgctacccactttccctgcatgccttgcacataatacatatgagcatttgttggtttgaatattggtatttctttatatgtgactataaaaatgtgaacaagattgtaacacttgagagttcctgcgatatcatcaggatctgaaaattcagtcattggactatgtcatgcttaaatgaatcttgccattaaagaggtctgtggaatccagctctttgatcaaggcatttaatatattctttctcttgtgtgttgtttgtttgtgtgtgtgttttggtttttgttttttgcttctctccaggggaaaaaggtggatggctctgtaaatgcctatgccataaatgtatctcagaagagaaagtataggtatgcatagctgccattattatgtttgaactaatataaattatatgcttgagaaagaatttgttatgggataatcatgtttgtaggaaatgtagcagttttccatacaatcccttactttagttaggtttccatattgttccttattactctt

SEQ ID NO: 34147 - DNA, 2477 bp, Bovine  19866880678354
  misc_feature (1)..(1): n is a, c, g, or t
nctcaatacaacactccaaatggtggaatttgttaatgccaccattacccagatagaaaaacagatgctccatgaagtcaaacaatttgttaagattacccagaacttgatttcaagactcctggctgtaaagttcacttgttttaaacaattacactccattcttaattggccttttggagaacttccttgaaatgcgaagagtagaactttgtccaggtttatctgagtctagactaatagaaatgcatttgctttatctgacattaatgaaatgactaagaacagtttcactttgctaaatatagtgagaatataaagtccttgaggacagagatcataactgatttttaatgtttatcacaggaatggattaacattgttagatatctggaaaattctcaatacctcctcatatctatagactattaatattgatcttcatccctcatctacatctcattctaacaagatcaagtggtatctaagaagaagtattctccactataacttgttagagttgtgccattcttagtatatttgtgaagcaatataacttgtatacctttcagaactctgatttcaagttcatgaaactataggacagaaaggaagacttttgttaatttaactttgatttagaaatatatttttgatgtaagtaaaagtagataggggcttccttggtggcacagtggtaaagagtctgcctgccaatgcaggaaaagagagtttgatccttggtatgggaagaagcgcctagagaagcaaatggcaagccactccagtatcttgcctggaaaattccacagacagaggagccttgccggctacaatctgtggggccacaaagagtctgacatgtctgagcatacacacacacaaggtagacatgaatccaggactttaaaataatctgttcaataagctattttctaatttgccagcatcctctccagaaaaatattgccagctcaactattaggcaaagttgaacatctgaaatcctacagaaagttaaggatagtatgagacatgttttcctatacaagtaccttgttatatttccaatttggacctttttggattagcagcaaggcaatagctttaagcccagtatcaaccctataccatttatattttagcacattctttcttcctgatacattagatctagggtttatacttttgactattaatacactttataagaatagagccttatcattgccttcccgtttcattgtatattgtatcttaccaaagttctaccactgttggtataaattatggttttatttcatttttatagttctggagtgaggaagagtgaggtggtaaaacttcatcctacctaaatgctatgctccttcgaggctgtaaactgacagatccactacatggctgattcagtgtattgcgtttgaaaatgatgtatcgattggtgtaagttacaagcaggtcaaagccaaagttaaaacctgtccaccgccagcagtactgaaatacaaaagagaaagatttacttcattttatcatattagcaagtcaaaaattaaaagatcaaaatgtcttttctttttaaaattcatttcaaatattcctgtatcatggtttcctaattttgtcagtgccttaagacttaccacacagaatacatataaaaggtttgctacacaaacatggtgtacatcaaagccagcaaaagcagcctttatgatcattattccttaaggtactttcttaatattgtctctttatgatctatttcatcaactctccacactgtaattttatcataactaatatggctttttactacaattctaaggaggtgtataggttcggaaactaggagtctagataaaggtagtaagaatccattaaaatttctcctgctttaaaaataccttaataaaaataccttatttatactctgaaataccttaagtgataccttgtgtgatctctcttacatgtaaaatctaaaaaaaaaaaaaaatatgtacagctacagagaacagctgggtagttgccagaggcaaggggtagggagtaggagaaatgaatgaacactgtttttttaaaaaaaaagtttaaaaaatttaaaaaatactctaaactaaccaacagaatcaccaactgagtttttttaaataccatcatgagggacttccctagtggctcagtggtaaagaatcgcctgccaatgcagaagggacaggtttagatccctgacccaggaagatcccacgtgctgtggagcaactaagcttgtgcaccacaactattaagcctgtgctctagaaccggggaactgtaaccactcagtccacgcgcccttagagcctgtgctctgcaacaagagaagccactgcaatgagaagcccacgcaccacaaccagagaaaaagcccacagagcaacaaagaccccagtgagccaaaaaataataataaaccatcataagctcacaag

SEQ ID NO: 34148 - DNA, 1040 bp, Bovine  19866880691748
  misc_feature (1)..(1): n is a, c, g, or t
ntgagcactcacacacactgactagggggaaaaaagcctcacaaactgacatttaataaaaccattaattaggtgatgaaaatcctttaaatcatcgatacatctattgaatagtgttcttttcaaattcattttttcttaggtaatacgaggaaatagtatcatcatgttagaagccttggaacgagtatgaacaatggctgtgttcaccagagaaatcaacgcttccatgtgtcccctctccacattttactaccagaaaaattgggttgtgtacattttcttacttttttgttaaataaacttttgtaatagccaaaaatgctttcttagctgttctcaacttagaatatctgctcttattctgatttttttctgtcatgacctgttattggttgagactgattagttcagaggtttttaatgcgttaaaatagaaaaatcttattaaatatgaaacattggcaagatacccttttcccatatcttttactactgaacaaaattaaagaagctgcaaacctgaatgggtttcttctaaaacattaactggaattttcaaagttgttgcaataacttggacagactctgactttttcacatacatctacattccaagtacagtttcactcaaacaacatgggttaaactgtgcaggtccacttatatactggttttttccagtagtaaatactacagtactacaccatccacggctgaatccacggattccagactgaaaagaggaactgcatatgcagagagctgatggctcagggtcagtgtccataaccccccagtgttttaagggtcaaccatatagtggaacagaagtaaaacacaggaagtaatgatgtctttgttttattttgaacataagtgggaaaaatttttgaatacaagagtagaaatacaattccggaggaaaacattccagtgcattgtggttctttgtgggatagaagatggtgataatgctgcccataatatactcacctagtttgtaaattttatggtgcacaaactccagtaagagaata

SEQ ID NO: 34149 - DNA, 1251 bp, Bovine  19866880739180
  misc_feature (1)..(1): n is a, c, g, or t
ntcaaataaagtcattctgtctcaaaaattcagaatgatattcctgttactgcctttcagtgttttcaaatttcactaattttgtatttcttaacaaatatttatcattgtataactgtaaaatatgtttcttcttcagttttgaaccacctaataccaactacatgtgggtaatgagcaacaaaaataaaatattctataaaatccatgatgctaaatcatgtcagtaatttttgttgcatttgttatttaaaagacaatttgtttgtgagcttgttttgaggcagtgggagggattgcacagatcttggccttggtgcttgctattgtttatctagggggacaacatgcaacatttcacgtgattatattcccctgggcttatttaggataattttccacctctttaccctattctgaggaagggacacttaccctgcctttttaacgaagaagcaaccacaggcttcttcaggccacttttccttagattactgctcactgtatctggaggtagcagggaactgttcgtctgtgcacctaaaccacaatcatcatagtgtttaacaagacgtctgcagagtataaatcaattcaacgttaatttctgaagtctaaaacatataaaatgcctgttaatttctacattagcttagcttcagtttctaaaaggaattagcattagcctttatatataacatttaaagtgtcttacactctttacaggaagttggtggggggactagaagtgaaaggaagaaaataaattcaccctttgttctacgtctcagacaatcactatcaattttctggtgaagcagtgttcattttcttttttataaatagtttattttgctggttttgtgattttaaggacctgtgattacatccgccttcatggatcactgccttgccgtggcgaaggggcttgcgtaactcaatgaagctatgagcatgccatgcagggccactgaagaccaatgggtcatagtggagagttcggacaaaatgtgttccactggaggagggaatagcaaaccattccaagtattcttgctgtgaggaccccatgaactgcacaaaaaggcaaaaagataagacaacgaaagatgagctccaccctccttgctccccgccccccctgagctcagaaagtgtcccctgggctaatggggaaaagtggagggcatcactaatagctccagaaagaacgaagcagctgggccgaagcagaaatgatgctcgttgtgg

SEQ ID NO: 34150 - DNA, 2955 bp, Bovine  19866880746553
  misc_feature (1)..(1): n is a, c, g, or t
naatctgaccaatggaatttcaaggaggacagggaaggctgagaggaacagatcatcaacaatagattaagaagatgtcccagaactaaaggacagaagaactttccaggttcagagtgccctgtgaaaccgaggaaaacaacagcatcactgtgcatttcagaactctgaggtccaagagaagatcctacaagcttccagagggaaaaactagatcacattatagggatgaggaacctgaatggcttggggtttctcaatagcaacactcaaatgagaaggaagtggagtgatgacccccaaattattttaaaacataagttaaaatttttccaatctagaaaaattaatatttctaacctagaattctataatcagtcaacaatcaatgacatatgaggacagaccacaataaaggcatttgtggccatgtaagttctacaaactctacctaccatataccgtttcttaggaagccattggaagctactggaaataaagcaagaaagataaggccatgggattaaaaaatgaatttcaagttagaaagaaatgaaaagaatcacccggaatatgatgaaagaaggttccagaaggatgtctggggaatggatatataaggtaattgtccagactggagaagtgttactcaagggacagacacgatgaggatggccctcactgtgccctccactgcgggaccaacttgttaacctggtgagacacctggagcatctactccatccaaataaggtattaaactaaaaagaggaagacatcaaagaaacagaagatgcaacaccaaatgagagccaaatagttctaaggatgacagcagagaaaagccagtcccagaaagatagttatccagtggagctagagagcaaatgtccagataggagaaagcaggtcttcatgacggatggcttcaacaggaaaaaagggaaaagaaggaaagaaagaattagattggctgatgttgatggccttgtagaaaaatattctgagaagcttttggaaattgtggggtgagttagcaattaagtacaaaaaaaaaaaaaaaacctaagtaaacaaagggccaaggcaattattaactacagataaaaactaagaaaggaaacataatcgtagtgcactacagtgctcagctgtgaataatatctgtctaagcatattatgtaaacagtcaccactgatctaagaactgtaatctaactacacagggaggagaggaaacaggaaacagaggaatgagcagggtggtgtaagagaattagatcctcatctaccataataggaagtcagtagatagcacctacaaatggataaagtaaaagataatagcatatacctgttattgagaaacatggaaaagagcagttgacagctgtggcctctggggagggggaagatggggaaaacatggaacagagagtcatatcttcttacaaatagtttagttcaagttgatgtttgaaactatgtgcactgttaaaacaaaaattagttttaaaaatggattaatttctcctagcacctttgcctgccaatcttgtagctggctgcctctgtatgctgtggttccttttttgacttctttgacccaaaggtaaggcttagaaaataactacaatcccacctcccctaccctccaaaaccacctcttatttttctataggtgtatgtttcttaaagtgagctgttatctcaaagaacaaactgtctgggagaataaaaaagtggtcacaagcaagaaacacataactataattttaaatatttgcagacaacactgaaatgcaagttaacaccttcctaaacatcagccatgttaacttatcatgtagctgatttccttttttttaaaagctatcccttggttttattttaacttaaccatgtgaatacgtcacaaaaaatacacataccgaagccaaacaaactatacagtcaaactaaatatccagtagataaaacatgtagtcagaaggtcaaagatgaatagccattcaggggctgatgaacttgtttgcatagtttttaaaaatctacttggaagtaatgaagtttatttcctttttgacctctcaggaaatcttgaatttccctctccctttgcatttcctgctcagaagtctaagtgtagcctcccagctcctggggacctgctctggggacttcaaggggtccaggctcctggctttagcccatgtccagtcctttcttacagtctcatccttcctttgagagacaaggacatacatccctgagagcaatgacctgcttgctaccccatgcttgacacagaatatactcaaagataattagctgaacaaatgaaccgtcttcctaacctcagaacaacccctaaacactattgaggctggagggatcctagtttatctagtccaactacctgattttgcagaatctcttaaaggagccaacatttgttaggtcacttggtgagtcagatactgaagcaggtgtgtgtattagtttcttagggctactgtaactaagttccaagaaccaggtaacattaaacaacgtgcatttattctctcatatttctagagcctagaagtacaataatgaaagtgtggtcgtgaccacattccctccaaaggctttagggaaaatccttccttaccccttccagcttctgctggtagccccagcagtttctcagcttgactccaatctctgcctctgccttcacatggctatcttctctctgtgtctggggggtcttcatgtcctcatatggcattctcccctttttatcttcacatcttctttttaaaaggacaccaatcctatttgattaaaggaccacccaactccaatatggagtatagcttcatctgcaatgaacctatttctaaatattccaaggtagccagggttacaatttgaacacacctctgcaggggtatgttcaatatataa

SEQ ID NO: 34151 - DNA, 1350 bp, Bovine  19866880838550
  misc_feature (1)..(1): n is a, c, g, or t
nctgccaaggtggccctgctatctgggagcgctgcagatagccccgggaaggcaggcaggtgggggacccggcctcaggggcagtgaagacttactgtatcagcacacatgtgatgatgaggacagccagggccacgatggagaccaccaccaaggcggtgatggcctgcttcttctggctggcagccaccacggccaggaggtctgcgtgttcacagcgtgcaccgacgtacccagagtggcagctgaggaagacagggacatcagcatgctctccaggcagaggtctcattcactgtactccccaggaggactggactggagagacccaagccctacaaaaaagcccaaaggggcccctccagccctggctattggaggcaaaggtgtcggtaaaatcgccccgactcccctgcataggcttctcttgcttggagaacgaggtaactcatcagcttatctgcggaggcaaggtgctgctgaagcactctgttatcatggttactatgccagatcctgggggagtgaggaaggcagcaaatgtgtctaggacgtgaagctcattttggcagttcataaaaaaccaggttatttttaaactaaatgtgtgtattcagaattcccagtgatgagagaaagaaaacacgctaaaccatcaggagacaaagactgtggcttgatttttatattctttgtcagggttaattagtcctgcaagcatttaccaggtgatccagcgcacaggggcacgtactggagtagaaccagcagcactgtctcgtaactgtagggcctgaaaagccccaggggtcttacatttgtgattcccttaatctgggggcttccagaccccagatgccaggagtcacaggataaatacagggtatttcctggaggatagcttttgctccatgttaacaaaatcttaatcattttaatgttaaaagaacaagtactgtatgggtttaaaattaaggcaaacaggagatgttgcaaaaatggctgcctaaggccacagcctgggatactggagcatacagcttcagtctctaagactgcttaatggtaaagtttcccactggtgctctttattccaaagctcaatcgttatgtacctcatttaaaggcatttttagtttgaattcaggtacttgctttcagttaaagattaatttacatttgacccatgttttctcatttagtttgcacagaaaagtcaagtcatttgcttgtgaccaccatgccagggaggctcaggaggtaaagaatctgcctgcaatgtgggagatcctggttcaatccttgggtcaaagagatctccggagaagggaaggccactcactccagtat

SEQ ID NO: 34152 - DNA, 895 bp, Bovine  19866880921984
  misc_feature (1)..(1): n is a, c, g, or t
natagatgagagaaggggagggcaggcccatagagggatgagcacaagttgattaaaaacatgatttcctcccattatgctgcttctacctgcattattcttggcaggttgaggtttgctaaggctggtccccactttagttgttctgatctgactctgattgtacaccaggaaaagaggacctccgtgaaccagtcaactcaaagagtcagttttgttgcttattagcaaatcactgaacaatgcagaagtgacaggagaatttgggcttggatgtcttcctggtagagttttgaaatagggaaaaaaagcagttcacttattttgtgagcttgtggaggcaggatgactttgggggtcaagaacaggagcttttagcacacctgattcacatctgtgccccttgcttaacagttgtatgctctaggccacacagcttcttcaagcctcagttccttcatcaagaaaataagaataatactccaaatctaacacaaactttaaaaacttgatgatgcaatatatgcatggcatatgcatggtggtcaatcagtaaatgatacagccaatagtaactgttattgcttatggccaagatttggataaaaaagatatttgatagatttaatgagatgggccatttggcaaagaaattcattataatacttattgggggcttccctgatagctcagttggtaaagaatccacctgcgatgagggagacctgggtttgatacctgggttgggaagatcccctgaagaagggaaaggctacccactccagtattctggcctagaaaattccatggactgtatagtccatgggattgcagagttggacatgaatgagcgactttcactttcactttcctaatacttgttactaaaagtgaa

SEQ ID NO: 34153 - DNA, 1423 bp, Bovine  19866881140774
  misc_feature (1)..(1): n is a, c, g, or t
nagacagaagagacctagcttagggggaaatttctacttgtttattcacttctgtactgttgagaaatgtaattatgttcataaagaaggctcctcaaagtcatgtacacatcttactaggctgtgctaactgatcagttgaatcgacttctgtgctctactggaagaaaatccaacgtggaaaaattcagattcctctgtacagcagaaatcaacacaacattgtacatcaactatgcttcaaaaaaattgtttttaaaaattcagattcatgacaccaataacactgggaaattactgaatggcttccagcatcaccagagtaaagtaaaacgtatgcacacattaggaatttaacttggctctgctatgtaagctgaggaactcagtctttgggcctcggtttcgcctctgtagctgatgatgacaacagccacctcaggtcacagggaggagcaggtgacacatggaaagccccactactcattgtcagatattagtaccatgatttcttaaacatcaaaattccctcaacaacttgattgactcccttggttttataaaaacatcatcattgcataaaatcatctgagaatggtcctcttagtagaaagggttctgccagagagatttgacacatacctgcccagatcacttttcctactgaaacctgtaaaacttggatgagccggtgaatgtgtgcaaatgatttctttccaccattcccaaggcctcccgcccattcgccccaagcctgctttgtgtgggtgcgtctcttttatggtctgtgaaaggccttcgtcttgtctctctcacctccctgtcctcagacaacaaagccggcttttctgtttgcacaaagtgcttgttgctctcttgagccatgagaaaacatggagcagaagagtaataatgtgctccttctttctgctccaataaaaagttatgaaacagaagcctggggccaaggcaggctcactgttgtgtgtgttgacaaagaaataatttctgtaagcacagtcccggggcagatggcggtaaactagcctgtggcccagatcacataatggagaggctcctatcctgtccatgagatcctggtctctggacccagtcggtgccagagcagcagacaggatcccgaccttccattcagaagcccctctctccactcagggaagaggagtggagggggctgccctccactgcaagagattgaaggcccctggggctggccccaattgccagcccttcagggatctccatctggtcacagggacagttattgggacaaatacaggcatattctcagttttccccactgcagtactaaattgatcggtctgagaaagagttcaggaatcagtgttgttttgtttttaacatcttcagttgttcctgatgagcagccaaatttaggaag

SEQ ID NO: 34154 - DNA, 1828 bp, Bovine  19866881165080
  misc_feature (1)..(1): n is a, c, g, or t
ntacttacaattgcaggcagattcgatgagtaaacatctgagctaccaaggaaacccttagatataatgttttagcttgcatggagtgtcagtattactatggatggcatacagtcatttacaaaattgtattaaacttcctgtggccggttgcatttttcaaaatcggttgaaatagtatattcagtctcttgtgctcttccaaccccaccctccttacctagtcaaaagatggcatctttgttcctattctttggacctgagtggacttcttgggtgagcttctataactgcacaagaaagtaatgcttttgaagctggctcttaaaaattgatacagcttccatctagttcccttactcagagcatatgcctgcggacccctgaagtacaggtgccccgaagtcaccatgctgtggagaccacacagcagacaacatgtacgcagagaatgtcagaggaaccccagctgtttcagccccagcaatttgaacattcccagactcaatggcaaacgtgctaatgaggaaaacagatgacccctgcatcatccctgcctcacggcaaccaggtgagagaccctgagtgagaaccacctagcggggcccagcccatctccagattcctgagagacgacaatagtatatgattatcattgcttcatatcatcaacgttggggtgttatttcatgtcacaatagattaccagaacacttctagatagaagtgtggggggcgtctagcccagacttctgaatatccctccccagtactcactgaaatggcccacagcacatagaggggaaatttttaccctgagtggcaagcgcctctctgatagccagtctggctgctggcccagaaggaggtgaagacaaaggcaagataaccttcagccctttggggcagtggctttgcaaaacattaagaagaaaccttgcaggagtgacattccttgccagatggctctcttcacaatctttataggctgctggaaggtaatcgatcgtccagcctaagatattagaagaagattccaagggcatccaaatagacaggcagggagccaagaagaattagctcatcctctttgggaacaaatgcaaagcatgtattaatcttttaacattcaaggatgagtaagcataaaataggatataaaaccatgaaaaaattctggaacatagaaaagagcatctaagagacagaagaagaaactaatttttcaagttttacaatatgaagcagaagtaagtttgaaactgtttcttctataactttgatagactgaacagaacaaaaaacatagacaggatcggagtataatattatttgtgaggtagaataaatagttatgaactagattggattattccatattctagagagaaaagagttttttacaatcatctactgaatagtcacaaaaactgacaaagatatttttctgcaaagaaaacctcataaaatttcaaaatgaaaaaagcatctctggacttgcctggtggttcagtggttaagaatctgcctaccaatgcagggacataagttcagtttctggtccaagaagattccacatgcttcaggacagctaagcccacacgccacaattactcagccggcgtgcctcaactactgaaacccatgggccctacagcctgtgctctataagaagagaaaccacctcaatgagaagtctgtgcaccgaaactacagagtagcccccacttgctccaactagagaaagtccacgagcaatgaagacccaaagcacccaaaaataaaaattaatttattaatttaaagaatagcatctctgtccctactg

SEQ ID NO: 34155 - DNA, 1796 bp, Bovine  19866881308814
  misc_feature (1)..(1): n is a, c, g, or t
ncttcgaatcaagtttgagtatgggcacccccgcaacgggcatgtggcagagtaccaagaccagcggccccccttggaccagcccttggaactggccccgctgaccaccatcacttttccttgaagcaaaacaagagtcttttgctgctaaatttgcacatccccaccctttgacaactttaaatactagttagacacttagatggctctgttccttagtgaactacttttagctaagatgcagtttctcagtgcattcaagtgaattcttttgaagaaaaactcttcttgtaaatagcccttttggtgctgctctgtatagtctacatttaaccttggatgatattcctaggtagagtttttaaagaaacaaaaccagctcacttatcttcctgaaggactcacctttagagtttgtttcaacctcttcctaattctctaagaagtcagcagcactccaccttatactaacatgttggaaaattaataataccttggttagggcaaaatgttgaagatcatcctgacagagttccaatcatatccttttattttcttctcaaataaagcacagtgtcactagtttttataaattatatcttgtattggcctaattataaaagtataaaccttttgggagatttaggtgatagtgaactaggaaaaagagattcaggtgtcaaggcaatattgattgacgtttcaaactaatgcttgtaattgcttgttcacttcatttttatttccttcattactctccaaaaagcttaacaggtggtaagattcagtttctattttttaattcactgatcacagaatggagatactgaaagtcacagaatagaagcctgcctttaaggagaaaagaagagaatggaacatttcctatttgcctgttacatcccaggcattttcatttataatctcacttaatcatttttctcatttagtcctcatcattatttgaatttagccaccactccttttataaagttacacagtctctctgagattaagtatcttactggaaatagcattaaaaatgtttcattttattccaaagtgcatgttctttccactttatcatattgctttataattataaattcttcataattcattatctttggaagacaagagaagtgtgtaggtaggcatttttgattgcacataacaaaaagccaactctaaccagctcaggcaaaaacaggaatgaatgactggttcatgaacactaaaatagggctagacaactatccttgggtggagcgggggtgtggttaggcctcagaacccctgcagccagggtccatctgacccatctctacctctcctgaggcttcattactatcaacacagtgcagctccttctggtaggatatctggctcctaacacatcctggacagcaaagagatcaaatcattcaatcctaaaggaaatcaatcctgaatattcattggaagtactgatgctgaagctggagctgcaatactttggccacctgatgtgaagagccagctcattggaaaagactttgatgctgggaaagactgaaggcaaaaggagaaaggggtggcagaggattagatgctaagatagcatcaccaagtcaatggacatgaatttcagcaaactccaggagatggtgagacaggggagcctggtgtgctgcagcccatggggtcacaaagggtcggaaaagacttagtgactgaacaacaataaatgcacctggaactatggctatcacttccgctctagagcaggactgactgctctgctcagcttcgaaagt

SEQ ID NO: 34156 - DNA, 1649 bp, Bovine  19866881469029
  misc_feature (1)..(1): n is a, c, g, or t
nacgtgggagaagactggaatctggagtttcacagatcgtgtaaattaacagatcaggccttccaggagtaaggtgtgcttgcactggatggttttgagaactctactattcaaataatctttggcagacatatatcctgaatcatatttatgcataactatgtacacatgcatgtgtataacatattaaaagatgttaatgttatgactccccccttctattaacaaaattttgctcatttttttccctattaccttattcttttttaaagatttttaaaaatatggaccattttttaaagtctttattgaattttgttaacattattacttatgtttttggttttttggcccagaggcatttgggctcttagcttcgccaccagggatggaacacatatcccctgcattggaaggcaaagtcgtaacctctggaccaccagggaaatcccccattaccttattgttggtgaagaatcatgaatgagaacctccacttatgaaatgcccatggggtggtttgggaaccttttaggtatctgtagttggaatctagaatcattactctagagcagtggttatcaaatctgagaatgcatcagaatcatgtgggggagcctcttaactccacctccagagttttggattctgtaggtctgaggttgggcctatgaatttacacttttaacaaattcccagttgatggtgatgttcctggtcatggaaccacactttcacaaccacttagttgtagtaacttcttataggttgaaatactggtctggatataatgaaaatataaacataggggaattttaatcatgcacacgggatcttctacctttttcagattcttttgtgctccctattaaagttgcctgtgacctcctcactggggccatgctttgggtggacttgattccctgggttttctatacgttggtgaatctgaggaaggcttatacctcagatgtgagaagacggagcgacacccacacactctccctccaggctgaacattcatggtggccttaaatattggtcttaaaaccctgcttttaccttaagaaagagtgaatttctgatagggactcaaacatagttgaactttgcgaacattatgccaagtgaaataatctagacacaaaagaacaaatatatcgttccacctatataggataaaattcaaattcatagagacagaaaacagaatgatggtttgcagagtctggggtaagggagaaatgatgagttattatttaatgagtaggaagtttctatgtgggatgatgggaagaagttctgggaatggatagtggtaatggtgtacaacattgtgaatgtaatcaatgccactgaattttgaaataagtagaataaaatgtagaaaataggaataaaataaagcaaatattatagcaatggggaagagatactcttaactattaaaaactattaaaatggtaagttttgtcatttttttttaaccacagtttttttgaaaaaatattctgcttctgttactgttctcccagtggtatcttggggaattcttgtatcaacccatcagagtgcatgctctgtcactcagtcatgtccaactctgcaactccttggactgtagcctgccaggttcctctgtccatggg

SEQ ID NO: 34157 - DNA, 1192 bp, Bovine  19866881498269
  misc_feature (1)..(1): n is a, c, g, or t
nacttatatgagagacttaaaacagaactatgaaacaccactctctcctttatccctctcctggttccaaatggaatatcactggcaaaaaaaaaaaaaaaagaacgtagtctgaacagagatgattttgaatcagatatttcaccattatcatcatttaacaaaataatcccagtgagtcatgagaaacgcaaggttctaattaagcatgaaggtaaaactattgcatcttcaaaattgaactctttcttgaatatccatcagcagcatttcgcaaacttgtctgatcataagaatcacctggagtttgttagacatatgaattctctagctcctctggaggttctgatttaataggtctgggatggggccctggattttgaacgaaactttaaagcattttaagctgagcccttgaggaagacttaccttttagttcagggctagttcatttgcgcttcacggttggatgtgatcttcattcaggtaaaattaccatggtaactggtatcttatgcctggctttagtaacttatattttgcaaaggacgtatgcccatgctcgaagccttgactttcagaatgttcttttgattgcttctgtctctatttcattaggggtgaagttcagaagtcttagtgcagtataaagatgtcacacaaaaatctcatgtaaaatgaaaagcaagtataggctattgacttaagaaatttcttaaatttgtcttctattatcaaaccctcacctgaggagctttgaaaaatggtgatagagccccacaacagagattggtttaatggactgaggacaggacctcagctttttgtagctttttagagttcctaatgtggctcagtggagaaggcaatggcaacccactccagtactcttgcctggaaaatcccatggacagaggagcctggtaggctgcagtccatagggtcgctaagagttgggcacgactgagcaaattcactttcacttttcactttcatgctttggagaaggaaatggcaacccactccagtgttcttgcctggagaatcccagggacgggggagcctggtgggcctgccgtctatggggttgcacagagttggacacgactgaagtgacttagcagcagcagcagcagcagcaatgcagctcagacagtaaagcgtctggctacaatgtgagagacctggttag

SEQ ID NO: 34158 - DNA, 1010 bp, Bovine  19866880385303
  misc_feature (1)..(1): n is a, c, g, or t
nccctggtttattcctggcttgggaaaatcccttggagaagggataggctacccattccagtgttcactggcttccctggtggcttagacggtgaagaatccacttgcaatgcgggagacctggattcgatccctgggttgggaagatcccctggaagagggcatggcaacccacttccgtattcttaccttgaagaatccccttggacagaggagcctggcaggctacagtccatggggccgcagagtcagacatgactgagcacacagcctccctggttcctgaaggtgggtagacctgcctcatttcccttcttatacaaatagagtttgtctctagtcttacagaacaatgctttttgtaaccctgagctggcacttgtggattctaaatataagccaagacacttctcagagattataatcagaattttgctttacgtgtgaaatcttattttgaattcaggtacacaattactcagagacataattatactgccttaggatagtataaaaacaacagttttaattttttttttttggtggggggaggtttacaaaagtaaccttgttaggaatcggaggtgactacagtctgagaacttcacagatacaaattaactatcagctgtgagatttgcctatgattccttcatgtttattcagaagtaaagatacttgcatgggggtcccccctcctctcattatacttaatgtaaatctagtggtgcttgcatgtatctttaaaaattgtagagaagtggaaagagaatccaaccagggatggctcatgggccactggaggtgtggccccctcagtgctttggaaaatattctgggttttgaacagcaacacctgtaattatggaggcgtcatcctttccataaaaaagaaaacaaaaccaagaaagcaaagcccttctactaacaaggtatagtcatagcatgtgttcagccttcccaaaacctgtctggcatttgtttctggcctggtagggaatatcttccat

SEQ ID NO: 34159 - DNA, 1925 bp, Bovine  19866880420994
  misc_feature (1)..(1): n is a, c, g, or t
ntctcaaataaggaggaatatacatatttatgcatctacaggtttttatttgaagaattccaatttttaaatgttggcaacacattccttttcttaaaaaaacatggtgggagccaagtcaaacatggctttaggcgatcactctgctccctccgcagagcccagcttgtttgcctggccctctgcttcctccatgcagaagggcatcactgagaattcagctcaaggcccacagtccagacagtcacctctggtccacttttgggcttggaacctgggaatagtggtaccctttgatccagatgatcagggctccactggtcccacacttcagagggtcacctcccgctgtcccccctgcccatgaagaagaggagggtctgctgggccaaggtgtctgcccacccagagctcacaccccttcttctagaccagcctctgactcctggcaaccccagaagtccctacatcagaggcccagagcccgtttgccagaccagtgtatcagttttccattgctgtagaagaagccgcatggcgttaaataacagtcatcccattgttattacctctcccggcgctggggctggcaggatcagtgcagcggtcacccctcgggtctctcctgccgtctagttggtggcggccaaggctgaagtcatcctgaggttcttttacccacacgtctgcggtctctggctgtcagctgaggtctcggccggggctgtcagccagaacacctgcacgtggcctctccagggcccctgtttcctcatcacggggcgaattatgctcagagcaagggtcccaagatggggaaccaggaggaagctggatcacttttaccatctagcctgtggggtcacttctgccgtacttactggtggaggcagaaacgaaagtctgcccaggttcaaggggagggatgtgaactccccctggatggtggaggggcaagatgtcatggggagaagaacctggatagtgggagatgcttccttccggggccgtttgggaaagtcttttctgcagcagtctgcttgtttctcttctctgcaggcctcctctgaggactggctagcagtgggagagtccctggggcggtcgcaggggctgggagcagtctggtggggcataggccggctgtgctcaggccagcgcccaggccccctgacccgcctgtgtcaggggcaggttgcctggagggcagggcaggccctctggatgcgctttgaggagcccccactgagagccacgtgtggacaaggcagaggccagctcctgagggatcagagtgacaccgccgctgagcaggaagggccaaggggaggagagagacggagataaatgagcccctgtgtgtccactgacctcctggccgagcatcttgaccgagtgtgtaaaggagaatcagcacttggcttgcagggagccgtgagggattctacgtggtacttcctggccagaacttggttttgctcagatgggacaaaaagacacacaagtcagatatcacataatgcaagtcactgggtaagtttgggtcaaagcataggcctttctaaagatgttgttttctttaaaacaaaaatgatttatttatggtcatacttcttggcatggcatgcaggatcttagttccagaccggggataaaaccccggccccctggagtcttaacaactggatggccaagggaagtcccagacctttctagaaggaagagatcagagtcctggttctcttatacccgctgcaaatcaaaatcacctgggggagcttggtgacctagtgatgcccgggtcctgtcagctcagttctgaagcaatctgtcccttggaggcctagacttgggggatttttctgaacttattttttataaatgtaacactggtttataacattataaaagtgtcatgtgtacaa

SEQ ID NO: 34160 - DNA, 1333 bp, Bovine  19866880444764
  misc_feature (1)..(1): n is a, c, g, or t
ncaagacttgtccaggggctgcattctgcccaggagggcacaggtggcaacgcctgcagcctcacaggtccccggagcacaccgtccacagggcagttggctccagggggaagctggggtcaaacggatctagtgggaattcaattatggtttggagacgagtctgcgaggtcgctaattaaacaagggcagagtctgtaactgaggccccaggctccaggagctatgtggcagcccccacacagagccaggccaggcccaggagaaaacgcaaattcaaggcaagaggtagattggatcagttgagacatgcctctcgactaacaccccagcctacggttatcaatactctataaagcatgttggaactgctgtttacaagtatctgttaattattaaaatggaatctattttccccccctccatctagttgagaaatctcatgttacacagaaaggttaattacaaaccgacttccaagaaccctttgttggaagcttctgtttcattttctccaagatgaatccttgaactccatatttgggaatgcagacacaggctggcttagcaaaatcgtttcctcattctagcagcccccagctctagccaacctctcagatggcctgatgcagctaggattaaccagaaaccacttcaaacccctcccctccacacaccatctaaaatgtggttttgttgctttttccgttgagaccgaagaccaccatgtttgccacatgttgtcctggttgcaaaagtaagagggtctcaagtcctgggaccacaatgagacatacaatattccaggggctgcaccaattaggtccgtttgcccccagccttggggaaggtaaatggcctattacttggtgggtaatgcattccacatggcattcctcagcctcgaggaagccggagaggactcattttcctagcaagcactggaggtgtgcagtacagagcaggcccccagcaccaaggcttggccccttccccaccatcacctgtgccagtgagcttccctgctcgccaaaactccactgtgggcttcccagaattcagttctttatagccatgcttggaaaccttgtatatctctatctgtagctgactcttgaacaacacagcttgaactactcagatacacttgaactactcaggtagttcacttacactcagatttttttcaataaatactatcaatacaacactacacgatttgtagttagttgaatctccgattggttgaatccgcagatgcagaaccacagatattaatacccagggctgactgtgagttacactggattttggagaagggggcagcagagga

SEQ ID NO: 34161 - DNA, 947 bp, Bovine  19866880475150
  misc_feature (1)..(1): n is a, c, g, or t
ntctgcaggggaggcacgagatttaattgcacactctgagggacagttacagcagtgaggaatgctgaggggaaggtgcaggcgccatgggcatacacaggaaggatgctgacacgtcaggacatcagagaagtgtccctgaggaagtggcacttcagctaagatctaaaggatgggaaacaaaaagagagagggggctggggaagaatgttcaagacagcgctactccctgtgccatagttcgggctctgcaaaaacagtcaaggaagcccggaggcgaaaccacagcacgtggagtgagagaaggccgtggaggaaggaagtgaatgaagggggccaatgaaagatgctcttctgcttgttattcttgtgtgttattctgagaacaatgggaccacatcttgtttggagacattgttccaactgtgattcggagaaggaattgggggatgcaagtgtgtgtggagagagcagggcctcagcccctctgagaaggtggctggagagcatgtcagacatgccgaaggagctagcccttcccactcctctccatgaggaccactcccatctccacttctgccacatggttagggggtgtgttgataaagatggtggtgctgctcatagtaagggctcctcatccacaggatcctagatcaagggccagatgcctggggcgcagaactgagggagccattcattccctgtctgtgctgcgcacccctcagagtgaatgcctcccttgctccctctcctcccggccctgccaggagggtttatctccagcctcacattgtatggcaggaagctgggaaggagaaggagggggcagcatgccccttccttgaaagagcgtgacccatgaccggacctgtcgctccccacacatcctgcaggccagcatggagtcactgccaccgctgctgcccaagaagctatgcatgtcc

SEQ ID NO: 34162 - DNA, 3686 bp, Bovine  19866880483164
  misc_feature (1)..(1): n is a, c, g, or t
natgtttgtaaccttggacccttgagttaatccttttcttgattgagcccacctcacctttgccctataggaatgcaactctatccaatgctttttggaggctggtgcctgactttagaataatcacctttacagaaaaacaagtttcttaaaatgttaacaggcctccgggccagaagatgatgtaaatcacctaaacttttgcatatgataagtttgcaggaagaaagcctggcttactgcatgactctacccttcccccattatcctctatgcataacttaaggtataaaaactactttggaaaataaagtgcgggccttgttcaccgaaacttggtctccccatgtcgttctttctcttaccttctggctgaattaattgttcagcctcttttctttactgaattttcctactgagctatccttatttcagcctcttttctccactgaatttcctcactgagttatcctcattctattactttttatatccttagttaacgtttaattaagcagttgtttcctgatcctcgctgatgccatctctccttcgaataccctggatcagctggggctggaccccggcagaagttcattatgtttattaccaaggtcaagctcatactgcttgatgcatgacaggccagtaaattgagagaccagttgttggggtaaggaatagtgactgtatttggaaagtcagcaaacagaaaagatggtggactttgttgtaaagaaccctcttgcctgagttagaatttaggcttcttgtatactaaaaggggaggaagtaacttcaaacatttcctgattccgatcagcctccagaggagataagttaatttctccctgcagtcattcatgggtgggcctggtcaggatgtttcctgtgagctaaagaaaagtatttcagctgatactcattacctgggaagcaaggttcccagagatggaccatcatgtatgtatgtgtgtgtattagtcattcagtcatatctgactctttgcaaccccccatgaactgtagcccgccaggctcctctgcccatgggattctccaggtaagactactggagtgggttgccatttccttctccaggggatctacccaacccagggaccgaacctaggtttcctgcattgcaggcagactctttaccatctgagccaccagggaagccctttatgtatagtttaaacttagagatgacatccctttagtggttaacttgtaatagaatgcaaaggtttttccctattacatgctcattagagagaataaaccacaaatgatccctttcctgtaaaatatggtgctgttcaccagtttctggttcctcagaaaacagagggtattacagactcacattcattgcctgtcccttgaagacagactaagtcggttttggtttttttttttttggccattaaaacatgagcagaaatgatatatgccaatttcagaggctttttttttttccagatagaggcatttgagagctggtgtgcacccttcccaggtggctcagtggtaaagaatcagcctgccgatgctgaaggagcagtttcgatccctgggttgggaagatctcctacagtaggaaatgtaggatactccagtattcttgcctggaaaactctggacagaggagcctggtgggctgcagtccatggagttacaaacagttggacacgactgagtacacatgcattgtgcacccctccagcctccctcacctggaatagaaacttattctctgacagttttggaggctaaaagtccaaaatcaagatgtcaataagactatgcttcttctgaaggctctagggaacaatcttttgttgactcttccaggttctggtggttgttggtaatccctggtatttcttgacttctaccatgcattactccagtctctgcctccacctttacctggccttctccttgtgtcgctttgtgtccaggtatccctcttctttctcttataaggacaccagttgttagatttaggatttaatctaatctggtgggcaagacagaaaaaactgtgttggctgaagttgtcagagaacaccaaaggataagacttaataggaggctatgcttaacaggggcttccctggtggctcagatggtaaagtgtctgtctgcaatgcaggagacccaggttcgatccctgggttgggaaggtccgctggagaaggaaatggcagcccactccaagtattattgcctgaaaaataccatggacggcagagcctggtaggctaccatcggtggggtcgcaaagagttggacgcgactgagcaacttcactttcaccttcatgcttaacagggctcctagtatgttctaaagactgtgctaagcatgttataggtattatcctatttaaaccccatggaggttgtttaccatgagattggtatttttatccattttacaagtgagaaaacagaggtttagtgaagtttttaaacagcttgcccactggtcactgagaattccaatccagctcagtctaatttacaatcctgaggtctagggactttcctgtactgctccttcaattcacctgttcccttgatggtctgctagaaaacaggaatctagattctaaactacacaaagtttggttttctttctatagttatcccaaggctgcattgatcacgtggcaaaattaacagtaagaaagagaatagaatagtcaaactactcttcaatttctatttcaacaatggcttccctagctgatgtttatgaactagttaaactcagctttccatctttctctttatgagatgcaaccaactttcagacttcaatattttaacttggccatggatacaaagatctgtcatatcagaggccttcatttctcctctaagcattaaaacaattagaagaaacagcaggatcaaaagaatcaacatgaaaccaaaccaactctaagaattttaagtgtttccaactttgtttcaaaacatctttatgaggattgttttccaaacagcagtgtgtgaagccttctacttttgaaaactgactttactctggagacatagcctgttttgtatgcctggagaagcaggggatacccaaactggcattcagcagtaacaaatataaattagaccattaaaaaaaattgtaggaatgttaaaatccatgttgactggtttttacatttacccggcagcattcccatgctaccattggcatggagattggaaaatgaaactttccacggatctgtcacttgctactgtttccacttactttaaccgtgaacccaatttttacaaatttttaatgtaaaaaaaaaaaagtttgatatttttttgttttctctttcaagacatttctcaaacataaaaacatgcatgaaaagggtttttaaaaatcagtcaaaattttagttttccaaatactcagctgtttaacattcggataattgccttaaaaaaatttttttttccacatttagtctgaatgctttggcatggggggagccccacagtctgaaagtaactttgtcccgactctccccactgcatttattatagaaactggaagacacatctgcttttcaatagggccagggaaagctgaggtttcaaggaataaagtcgagcttcccagaacttcggggaaacaagtcggagggtcacacctaggat

SEQ ID NO: 34163 - DNA, 2457 bp, Bovine  19866880585103
  misc_feature (1)..(1): n is a, c, g, or t
ntggaaatacctggtagagcttgaggtattttatcaggtcggatgagaaacgtcttcccttccaactgtacagagttgtaagcatgtaaaattacaaaactgccccattggtttttacatcctcggtgtgaggctgagtgaaggaaaaaaatagtctatataacagctggacacaagagtgtgctacttccagtggacagaaggatttttactgcacctttccaatgcccatttagctttttatacaaatagctataggcaagcaaccttaaaacagaaaacgttcctgaaatttgcaatgagacaagccttttgacattaactaaagattgaaacacacgagttggaaatgactccagggtgttcggaaatcttgctactgtagctctgaaatcagacagaattcaaaggatggttttccacaaaaggcaatttgaatatcaaccagttaccataagtacttccatccagtgtgtctccagatggagagtcaagagtgttttaagttcaagcacttgaaccgaggcttgatttctcttagctattgaatggtgacatctgcctaggctctcaagccatcagtgaagagccagcttgaaaaggggctgccagggactcaaggggtcagagaccaaggggcttcacatctgagaacctcctactttcagatgtcatgaaacagatggagggaaaatctgtagaaagccaagggcctaggacccttacaacagtacttttcacacttttgtgtagatttgaataccatagggaatctttaagaatgcaggttctgatccaagggggctggaacagggcctgggagtctgcattcctaagcagctcctgaggtgatacagatggctgtctgactgcactttgagtagtaacacgttcaagacaaaagactgtataactgactccctgtagtcaagatgctgaagctggtggaagtttggttcccctgctggaagcttgttaaagttgtcaaattgccactcaaggtgtgtaagagagggaggggttggagagagagaaagagagggagagagactgcatgtaactatttttcctttagcaaattcagagaacagagctaatttctcctgctactattatggtttctctactgagaggtgctttcataagataaacacattcttagtgaccatttcctaagtaaactgtcagtacccagcctctgttagcaagagaagcagggagtgttggttctggaaggacccttagagattaatttcttcaattcccccaatttttcccaaataaagggcctaaaaagcaaacttaaggacaatcagacgactgaggaaagcctttgaaaggaaatcattcattacaagaggaatctcagcctacacatcttggagaataaatacagaccatttttacttttgcaattgctgctcccgccagtgctccatcaacacccctgctcccaactgaccctactgccccaagtggttaaagattccttaaataacttttaatctcattctgtaactttgccatcacttctgatcactacatcagtctcactttgcatcctaaggtttttcctactcactgtcaagcttgatctggcgtttgacttagagacttgcctgctctttcccagagggcacagagagcggtccagcaggaggaaggagtctttgtgcatggccagggaggttttttccgctttcccacagtccatgggtgatgaggagggaggaggaaatagatttcctttgccttcccagcctggcagaggttgtggtcctttacttcactgctgtttctgggttttctgtagggcgattctgaaagctcagtcttggggaagtgtcttggtggaggttttaaaacatgcccacaggtttgacagcttatactttcattttacttttgttagcttatgtgtgtgtgttagtcattgggtcgtgtctgactgtgtgccaccctatggactgtagcctgccaggctcctttgtccatggaattctccaggcaagaatactggagtgggtagccattcccttttccaggggaatcttcctgacccagggatgaaacatgagttcctgcattgcaggcaaattctttaccatctaagccaccagggaagcccttgttagcttattctttagtctatatttttaaacatgggccagtgtgagtggagagggcaatggcaccccactccagtactcttgcctggaaaatcccatggacagaggagcctggtgggctgcagtccatggggtcactaagagtcggacacgactgagcgtcttcactttcacttttcactttcatgcattggagaaggaaatggcaacccactccagtgttcttgcctggagaatcccagggatgggggagcctggtggactgctgtctatggggtcacacagagttggatacgactgaagcgactttgcaacagcagcagcagtg

SEQ ID NO: 34164 - DNA, 1877 bp, Bovine  19866880658551
  misc_feature (1)..(1): n is a, c, g, or t
ngggaatatgtgggaataatcctgaccaaaacaccaccccctcccctaggagcccaggagagaaagggtgacaaggatatagaatgggggctggggacagggtggtgggaggggggtggaggcggaagaggaagcaacagaaaatacaaaggaaggaaggagggcaattggaggaagcaactccaccctcttacagcttcaaagagggcccttctctgtccctgagccttcagggaaccaagagggcagggggcccatggaggagacagctgcacgcagtcctggctgcacgcatggcaccggctgccagactggaggggaagcaggctctcctggctccagaaggcagagggctggtactttgtgcttttctctgaagagttggagaaaacagagcccagccctgtgaacctagccaggtccaatttcctcccacaaggcaaattctttcctgtgcttgggaaacacacctggctcgaattctcaagcccgggccaggagctcagagctttctcccagtggatggtccctgggagaaataaaatgcttggctgaagcagaacattttgatggcaaaaatcctcagagggagacaaataagctctccagggctgccccatctgctctcggtaggtagcagtcacagtaatggtcatggcaataaagatgataggaataatgatgggcaccattaaatgagcacttactaagtgacaggcttttttttttttttaatggcctcctcatgattcaaggccatcagcatcagagaccagagcccccatctccacccttaggtacaggatgctctggttggtatcatctgcaacccctgcgtcactttgctgaaggcttcctcctactccagctgcctctgcccactcatcagcaggctgggagtgccagagaataaataatcccaccccccagagcaaccttggccaataaggaatgagttggcggatcaataccccagctcctctgctctttgaatgagagaagtctgtgtggtcttcactggctcccagttgggcttaatcctaataggatgaaactctggtcacccaggatggtcatttgcttgatatcatacctggtgtgggctgccttcctttcctgtctcacccactccccaggatccttcctagtgtttccttggatcaccttcccaagaaacagcttgtgctagaatccttgtcccaaggtcagcttctggggggaatccaacctatgaaagttataggaccattttacatgtgagaaaactgaggtccacagggtttaagaattcaccttcttctgcctgactcagagtactcatgactattctctactgtgatttctatgactttgctgaattctctgggtgccaagtaaactgtagttcaagccagagaaagcccagaggaggcacccgcattgagaggctgtggatctgcagtgccctgaagcagctgaactaggcctaactggttaagaagaaaggctttgcatcaggagacctgggtctcccttctggagatgccacttagttccatggccttgagcaagtctttcaacatccctgtgcctcctcgggaaagggaggctacaacaaatacctggtgaggtgaaaattcagagcagtggctgcccagtaggtagctgccccagaccctgtatccctgtgagaaagagaagagcagtgtgggaggggcagggccagccaggggagccccagtcactctgccgcttgccagccctgagccttggggcaagtctcttgccctcttgtgcctccattcccacctgggtcaggtctgggtatattgtgtcgtgtggatgaaatcagatcctgaagggggggtgggacatttgatggcagcccaaatgccttc

SEQ ID NO: 34165 - DNA, 1671 bp, Bovine  19866880736639
  misc_feature (1)..(1): n is a, c, g, or t
ntttgtaaagcactttactgttgacaaagcccttaaatctctttgatatacctctccaccatgactctgtgatctggacaagaattattaggctgcagtgctcagggcagtaagtaaacagtagtcactggtagtagcagcattgtgttccttttacatgtgagggaactaagcctcagttcaagtgccttggcagagacacccgggcgagtgaggagctgcgtgttaggacctgcgcatagcttgccctctctctctttctctttctctgtccagtgaccagtctggtacattctcccagcaagtccctggacccctgctctcttcttcaaagcctgttggctgattttcagcggaatacacagggctttcaaggaagtatttatcccctactttcagctcagcatggaaatcagaaacagaatgtcaaaaacacaaagggttcaggttgcactgctgctggaatgcaaaatcaggaaactttgcttccttctcttgagaggttgtaacaagatggctggaaattaacttggaattttctggggcatgggaaggaggagacagaagtacagaaatggttcatcggtgcctgctctgattggaaagctggttccatgctaagtgatgctgtgtggacatatctttcccacaatactggttggggagcccacaggggtgagcagggagaaaaagaaaaggtttgataatgttatggtccacatttcctatctttccaatgtaagagcttgactatcctcagcagtggttctcccctgaaggtgactttgcctcccaggggacatttttggttgttacaaatagggcatgggggtggacaatttggtagatagaggctggacatccttcatgcacaggacaaatcatctgattaaatgtcagtagtgcccaagtatcttgaatattcttcccaaattaatcctaccatcagagagtagtggaaacagaaaacatatactgtgttttgagggtgccaaggtgatgtatctttgaagtgttttatctgaaaattgcagtgttactctgatattgtgatttataataagaaatttatatttggtcttcatgccttttcttatcatagagctcctaagattcttggaatttcctatgctgagatctataaagatgtcttttgttatattaattaggtgactttgtggaggtgcctcagaatgggtgaatggggagttggttgccaggggagtcagccagtgattagaggactagaactcaagggaggtgagaggagctggagactgagttgagtcaccaatggtcagtgatctaaccaaacttgtctatgtaatgaaggcaccataaaaccccagaaagggctaggtttgcagagcttctgggttgatgactacatggaggtgctgggagggtggcgtgctttgcccatctggctgtttctgagtcatatccttttataataaatgcatgacctagaagataaaatgtttctctaagctaccttagaaaattaatggaacccatggaaggggtcattggaatctccagtctgtagaagtagagaatggttggacctctcacctttagctggttggtcaaagtcccacagatgataacctggatttgcaattggcctcttgcctggaaaatcccaggacagaggagcctggtggggca

SEQ ID NO: 34166 - DNA, 1518 bp, Bovine  19866880739403
  misc_feature (1)..(1): n is a, c, g, or t
naaggggagctagaattctttcagaagagatcatttcaaccccacttggtcgggtttggagttgggttcttagatatcttccactagaatccagagacattcttgcctaaatataaacttaagcttttgtattttgttgtattctcttccaactcctgagaacatttcaggctaacatgaacactcaatcaagcaacatctctgatcactgttttctgctgagacctgtatcattaagacccctcaatctgtactcatgtccccactgaacagatgaggagactgcacctcagaaaggaatgcagtggcttgtcaaagggcacacaggttgcaaacggtggagcttggatttgattccaggcccttcaacttaaagtccacattaatttcctcaatagaactgaatctgctatgcatccggctctgattgggatactggggtgtgtgtggtagagtatataaaatgtttcttgctttcaggcaatttacaacctagaggaggagaagcagttataaacaggtgactaaactgtaagtgtaagtgcaaatgtatacttctaacgggtgcaaacctcacactcttgggactgcagggaagagagagagagagagatgtccttataggtgggactgaggggcatgtggaaaggcttcagggaagaggtggcacttgagctgaaacttaaatttcaggcagaacaaaaggccagtgccccaaaccaagcagtagatacacttgttaaaagtggtttctggctccagatgctttttaaaaaagttcctcattcaactttcagccagtcctccatgacagagctctggaatttcacacatgttctgattattgctcttttttttttttttccctttcgtaattgcacaactgagcgaccaagttctctaagcttctgttcaggcctgaagatttgccgtatttggcatgccttgtgctttccgtcatcatcctgattaaactaagtttatgagacaagcctcttatcactgctatcagcacttttgtttccccattttctgctcattttccctaaataatcagagctaagagctcttaaatagtcaaataatcactctaacagtcactcacataacactcactaacacattaagcgatgtggaaaatggaaccgtggatgagaagaccctaatctctcatcacttgaaccatccattcaacttctcatgaacataaacctgatttctgtgtgtgaaggattatgtgggggctttggaagcagaaagcatgaatatgcagatgatataaattcatttatttattcatccactctataaatatttattagatacccactctatgctctgtttcagggactggggatgaagccacaaaccacctatcgggtagtttcctttgtggagcttccagaccagatgcggaagatggaccataagtaagtgagcaaatctataaataaggtaaattcaaatcacaacaagtaggacttccaggtcaaaatataatatgtccagttaacataa

SEQ ID NO: 34167 - DNA, 1005 bp, Bovine  19866880786279
  misc_feature (1)..(1): n is a, c, g, or t
nggctttcttatttcttcttgctattctttagaactctgcattcagatgtttatatctttccttttctcctttgcttttcacttctcttcttttcacagctatttgtaaggcctccccagacagccattttgcttttttgcatttcttttctatgggaatggtcttgatccctgtctcctgcactgctatgggcccagctaaaaaattagcagagatgtctactactgtagaaaaggatggggtcgggaagccttgatgaatattggccatcaacaatttatgccacactatgactccaacacaggactaaggaggacccagcccccttgaagctatggttgcctcaaacctgcagaaaatcagggtgctgctaacagggcaaggtggagaatggggttggctaggaaacagcaggttcctgagactaggaaatgcctatcactccttaccaggttacccatcaacagaaatgagcaagcccagtttttaaaagagagtaaggattccttttgaccttttcaagataccaccttcctcctaccttctccctttcctttctcctctagaataaagtctgcaaaacatgctgtaggcattcgccttgctcatgagtcaggcacatggttttggtgttcagtgagtgcctgaatcacttgcaagacttggagcacagaacattccatctccatcagagctccttggggggaggaggtgatattatcctgaaagtcatttgtattgtattcatccacctcctttgccaaaatgattcattcttaatcctcacaatcattcttacaagaatagcactgcatgtgtgtgggagggggattctttacctctctcaaagcttgacaactgtggatctgtttatattatttctagaactcagaatgaactgaatcactgggataatagaaactgagattccacgatgacagacagctggaggagagggacactgactcagtcaaccagatgctttacctacgtagtatttatgt

SEQ ID NO: 34168 - DNA, 2041 bp, Bovine  19866880832888
  misc_feature (1)..(1): n is a, c, g, or t
ntttagcctcatcacctgtgtctccccaattccattatttcactcagtctgtctattctttctgataacagcagatgcctgccctttctcctggataaaccatggacttgccatcctctgagatatatctcatgatattgcttctgcttggggtgcccttctctccttcttctacctgaaaacctgccacgcatgctttgaggcctttctgagatgcccgctctgtaattgtccttaattacataatagcccttggccccggcggggttaagtgcacctcctttgtgtccctgcagcatttttatagcctgtatttgtgttaaggatcgttgatgcctcttctgtccctcccttctgatcatgaggcgcggaactgcctcgtgtcttgactcccagaaggaagtgcgccttacagtgtgcattgtaggtacttagtgagtatttgtgtccttgtgtttttgatcacaactgtgggccctctctacgtcgcccactgactccaccccgtcacggtttaactgcacccagtcagttgaaatgcaggccctcaccctgccctagacctactccatcagacctggcgtggcatgtgcatttggaaccatggaccctcatgtgcatttgtaacggatgcattaggcgcctaacgtgccagttactgttgtccttattgatcaaattacttaagcatatcagctgccagttactgttgtagctgctgagaatgcaaagatgacagcatgggcctgggcctcctaggagttccaggaggagctctgtctgcctcagtagcatcgatgaagagtttgatgagggacctgccttccagggtgaaaatgtgtccaagggcattccggtggtggctccatagtaacaggcatgatgggggcagggtgggaccaggcttgacacagaggacccccagaatgtccttcctcatcccagagtggcctgctgggtctaggcacgggcggctgacagggagagaggaactggcgtttcgacttctcctattctttttctccattcttgcccttctgaacccacaaactcttacttgccaggattttattttctgtgaggcaagtgtttctgggtacttcaggcagggaaaggcccagactttggggctcacagcctgtcacctgtgggtcagtagctgcttcctgcagacaggcctgaagaccttagacatcctcactcagaaaacttaccagtccttacctggtatatagtggcttcttgaaaatatattttcctgctttcagtgtaacggatgccatttccttatttccaaacctaaggcagctggtgagacctcagtgacctgtcacgatgacagttcagagcctggcctttttcacttccgctgtcagctctaacactgttaaacttctttatcccccatcctctgtgtactaaaggattcatcagatatctagatcaaagagttgtagttgctaccatcagggagctcataggccaagagtgacagcagatagaagcagggaaaaatcaaactcaaataaacatgcaaagataaaatatttagattatgtggatagtttcagtagatgcgctattaaatgttattaataggctcttacccatttttgcaggtgactctcaaacaggaagctgatgtagccgcaagccacagatctatctaaaagtgattaaactgcaatcatctctaatggagtgaatgatagacaagggacgtccttcctcatgtatctgggcttgtgcaggttttctctgtgacagccgagcctggcgttagtaaattcagcaagaagactggcttttaggagtcgtatccctggctttaaaaatttccccatttaagttattctcctggctgaaatgaaatgatctcttgtaaaagtaaggtgaagtcacaattcatcttttcaccaatgtttattgtgtacacatgtgcactgtacgtgtgtttccataacttggctgtcctgtaccatatgtaaagctttaaacaccttgtttgtcacttttaaccaattaatatttactcctgttt

SEQ ID NO: 34169 - DNA, 1454 bp, Bovine  19866880864762
  misc_feature (1)..(1): n is a, c, g, or t
ntgtctctagagctgaatctcatttgtgatccctggagtgctggggctggcgatgctaatcctccagatgagtccacagggacatcttgggtgcagggatcatgagtttctcctggatctggagtctgcactgattattgctggaaggtctgttgttgtcaattccctctaactcatggagacatcatttttctagcatcagggaaacacccatctgggtgtgactctaccttctgccagatgggacatgagaggtcatctccccatcagcccctcttgagtcatggagccctttctttaaatcacaacttagaaggccaaagttcaaaacaaatcgaggtggaattcctgtggttgatgtggtggtaacagtctcaagccagagtcaatcaacacctcctcagctgctgcatggccacagaaggacttcctggaatcttgggcttggaggggcagtggaatataactgatcttataaaagtccagtgttatatagatggtgagtctgatgcccagagaagagaagtaaactcacaggtcagtaagcaccagacaagaacccaggaatctccttgctcttaatccaaacacccaacccagtgtcaaatgttcagtcccttcttttctcaaacgatactgtctccctgagctactgcagccactccctggcttccagtcttgtttgtctgcctgcacctcccatgtcttgctgttgttcagttgctaactcatgtccaacagctccagcctgccaggctcctctgtccacgggatttcccaggcaagaatactggagtaggctgccattttcttctccaggggatcttctcaacccagggatcgaactaatgtctcttgcattggcaggcagcttctttaccatctgagcaagtcctcagtgggtggatggatggatgaatggatgagaagcaaggagtaagggcaagggagagaagtaggggaggggagggaactaggaaagacaaggctgaatcagggaaagaaggccacaacagtaaagaaaatgtgctcagtacaagctgggccactctctggactgcagtccctggcacaagcctggctcagcccagcagctgctggccactggctcccagcccgagtgacacccctgcctggcagggccccgttgtgcttggcagcccagcagcccaacccctcagtgctgtggggcatatgtgagccaggaaccacctcaaagacttgactctctgccttggggcctccttttaccctgcaaagccaggggtgggatcagcccttgacaagctgccaggttaggggtgttagggagcgtctggtcaccctggagaagggcagcttctatcctcttgatctaaaataacaactcttcccgtttttttgccttgttttccttcccagcactcaccattgccgctctattgattagaggcaaaacagcctgggttcaaacc

SEQ ID NO: 34170 - DNA, 2018 bp, Bovine  19866880871927
  misc_feature (1)..(1): n is a, c, g, or t
ntcaggtaaccatttgcaagattcagagattaggagacacatatctttggaggctattctgtcttccataatgctacaggggtccaggagaccacccacaatcattaatatttctttggcaaaatgtatgaagattcatactaaattgtacacctcagtggttagcaaactgcagttgatgggtcatgtccacctgtttttgtaaatcaggttttattggaacatagtcatgcccactcattgtggctgctttcatgatacaaggacagtgttgagtaaattgggatttgcaaagcctaaaatgcttactgtctggccttttacagaaaaaaaattcagacccctgctataaataatatctctaaagagtttggcttagttttgccaccaaacaaaatttccagaaacctacagaaaatcttgtggttttcagtgatgctgagtttcagaagtgtaagcaagggagcatggacagcttgttagtgcctgaaccaaagactcaactctagtttactgcaaagcctaagttcttaattcaaatagccccaaattccatttcctttgtatttgagccaggagtacgttatgtgtatacactggacccattttgtgatctcagatgctcagagaattagagtagaatgtggtcatcatccggtgcaaagataatagttggaaggtcaccctgggtcagaggtgtgtcagctagaactgtgctcttacaacaaggcactgaaagccgttagtcaggagtatgcactctgattaaccacagtcaccaccattccctgtcttccttattgcctcacctaagctcctcctcacatgggcattcccagcctggtccctgaaggcttttaatacttacatgtcgacctaagctctgccttcctgtactagagaggaggaaagcaaaggtccagagaagcatctgtggaggtcagggagaaaacaggtggcagagctgaaagcagaacccaggtttcctgccctctctgcccattttcttttacttcactgtcaggtacttggacttgaccccgggccagttatgattcacatgctcagccttcgctggctgttctccctgccctgtcaatccacccacccctggctctactttgttttctccacaggtcagcagtaaatcacttgcctaaacaatcatcaccttcaaatgctcagctgcagtcccagatgttgtaatctctcttggcttcctttgatactctggagagaagtttccttggagatcttccaaattcagggctgataatttgttatcacatgaatttcagatcatgctaggctttggctttcaaaatcatcagagctcacctttcctctaggtcagggttgagttgtaggctgtgcccccagtttttggctggtctgttctagatgggctgctggagtctggttgttggaaagaaggacttttgacccggggatgatgatccactgacgtcattttccctgaaggcattccaggaggagggaaacaaatgcatctaccttgatgagaaagggcgtaaaatctcttccagctgttgaagttttgtaaggacgataaagtttctttattgagtacccctcctctggtttgagcttagccaaacctcatccataaagaatccactattgggatacaaatcactttttaatcagaatccctaaccgtgggttcagggatagggccaagaacacccttgtatactccattacatcttcctttgagagacattgcagagagctggatgtttctagaagctggatgtctgctttccctgtatttgaatgtaggtattattttcattactatttagtgctttggacaagtatatgaccattgatgtagactgaaagttatacctggaaggggttcactggagggaggaaattttaattcttccattatttccatcaactaaaccctcctccagctattccaagtgaacacacaatccgagtaaaaacaatgagcttctctgcagacacacttccatgctaaaactcca

SEQ ID NO: 34171 - DNA, 2361 bp, Bovine  19866880927735
  misc_feature (1)..(1): n is a, c, g, or t
nagccaacaaaggtccatctagtcaaaagctatggttttccagtagttgtgtacagatgtgagagttggactataaagaaggctgcgtgccaaagaattgatgcttctgaattgtgatgctggagaagactcttgagagtcccttggacagcaaggagatcaaaccaagtcaatcctaaaggaaatcaaccctgaatactcagttgaagggactgatgctgaagctgaagctccaatattttggccacctgatgcaaaaagctgactcactgaaaagaccctgatgttgggaaagattgagggcaggaggagatggaggcaacagaggatgagatggctgaatggcatcactgactcagtggacatgaatttgagcagactccgagagagagtgaaggacaggaaagcctagcatgctgcaggccatggggtcacaaagagtcagacacgacttagcgactgaacagcaacaatcctcggaagggagtgaggaaagggtgttattacacagcaacaggcagccaaagcaacgtgtttggactagcacagttctcaatacttatatttatttccagttcaggacagtagtgtgtccatgggggtgttctggaaattggcagggggcatatttttattgccacaatgaccaggtttgtggggtggaagagagtgtgctattggcatttaatgcccatgagcccaagaatattaaatatattaaatatccaaaaatgtctgagatagttacctacagctaactgccccacatgaaataataatagtgctttgactgaaaaacagtaagtcacaacattaaagacctgtatagagaacttaaagatgaaataaaaatataagcacttaatgtaaactgctttctcagcaaggaaaaataagatccatcttgatgtcaactttaatcactagagaggctgcctggaagattgtattgagaatgccttggaggatcatcaaggactggatgccgtgatcaactagtgatgcctgtcattggcaggggaagggagagtagtggccttgaagtacggtgatcatataatttaacatccaaactggaacactttggggagtaaaagggggcagtgttagtacactgggacgacaggcataacctgggactgtcccaataaaaccaggacatactgtcactctacttccacgccgtggatgtcgtctctgacacatcccaatatgtagctcagaggtaagcaaaataggggcttgtctggacctacaagcccttgagatcttgaacgttaatttcccttttaagtactcagtttcagtgtgtggttaggtatgaagaattgttctaaagaacgcattaaaaattaattaagagtttcctctaatatttaatcttaccagccatgtactctgagtgatgtattcccagtcagcgtgtcaggccatgaataattaaaagaggaggggagtgtgattcagcccctcgatgagcctttctggggttttagatgcagcacagagcctgggactgtatctcccaaggaaaagttctgcattgaacagcagggtccagtgccatccaaacccctaatactggcattcatcatgagtcagcctcacagggagatggagatggatttgcctctgtggagccatcagcccctgagacgtgtcagccctgccttcttcccaggagggaggagggggagttggtggtgagttatagaaaccttcccagggctcctccacgtgctgagagcttccatatttcctcacctctaagacacatgcttcttcattctgtaacattttggaaatcaagaggtgacctaaaatcaatgggaggatttaaggtggtatttcttgggaggtgttccaacgtgacagttcagagccaggctctgaagttgcactcagcgctctgccatttcccaaccgtgtggccccgagcaaatttcacccactctattgcctcatctgaaaacttaatctattcctaacagtcccaacttgataataaatgaaaaagggcttgagtatagtgcctggcagatagtaagctctcaacatgtcagctattctttcttttggttttccttctgcgtgttgttattaaattgccagtctatctagaaactgaaagcattttcagtgtttctgcagtactgtcagcttcagaaagagttcaaaaacaatgacttctgagcccactctattgtgacacccagcacaccgatggtggcttatctttgctgcatcaagtaagggaaatacatatttgacagcaggtgaaagcttatttgatatcatttctatttagtcaaatgtaggaaacagaagattctctaagaatgactccctcccaacttccaa

SEQ ID NO: 34172 - DNA, 2613 bp, Bovine  19866880936834
  misc_feature (1)..(1): n is a, c, g, or t
ncctccctggggattaagcaccctccctgcttctccgcactgctgagctctgcccaaaggcttcaggagagcaggggctccatcctatcccagtgcctgccgtgtacctgggctcaaccactgtttcttaacttacaagagtcaggccaggcttcacctctcccggaagggctgtcttaatcagggatcatttactcggcaaaaacaaacccacttgagctaacttaaataaagggaaagcaattatgaggagttaggttatctggcaggccccaagggcaagaaatcattcgggtactcgctcatttaaaactagaaattcttcacaaaagattggtactgggaattgggaagctggcagggatcaaatctgctcttgatcctctctctcttcgcgtcctgggggaacacttgtctctttctctgcttcattctcctgggttttgcggcagaccagctctccagctctttttgcttgcacttcccagaactcacggcctgaaagcggccacccagcatgactgattcagttcccttgggctgctataacaaaatatgacagattggatggcagaaagaaatttatttctcatagttctggaagtggggagtccaaggccaaggtgccaggaggcttgggttctgggaaaggctctctttatgggatgcagactgccagatcctcactgtgtcctcacacagtagacagggcacggaagctctctggggcctcttgtagaagagcacgaaccccattcgtgacagttctacgcacatgatataatctcccccaagatcccacttcctactttcatcacgtggagtagtaggtttcagcatatgaatttggggggaacttgtcagctgctccaacatggcagtcaaagtccaaaggagtcaagtcagagcctaataccaggtaaccatggccaataggctatggatgaggaggcagaattcaaggaccatgaatccctcagcaggagtaccaagaacaggaggaagtgggctagaaagaggaaacaaacaactgacaaaggaatcgaagggcagggacatttgtggagaaggaatgatcaggcagaagaaaggcctggtgtctctcagattgtccttagggtctcctaggttggggacacatttcctctccaaagaatggccttgtccctcttcttgttgacagagctgccatgcctgagtgaggcccactcagaggccaccacccctgcttgcactgcctctgcctctccatccccacacttgatggcaattagtagggctgcaggtcaagtatctaagcgccttcaaatctcagggaagatatgtaggtgcagacaggatgcaactgggttccaatagccatagacaaagtctctggagttgtattctcaacctctgcttacttctggccactggcttccagcagctgatgggatggagtacaggcaggtcaaccaaacagatcagattccaggtagttaaggtgaagtcagagctgaacactgtcactgaaatgtggttcttcccctcctcctggggagacagaacattaaaggagggtctgatggcttctggccaccctaggttatgggtcctgtgcagtgtctttacggtacaaatagggcttgcatcttctacccagaggagggcatctcccctactcctttccaccaccatcagagacagcacacagatggctggttgcaagcaggaacttctgtcttcttcctccccttctggaccccactgggcttattatattcagcaggttgccatttagggcctgcagtttggaagtaaatcttgtgagtcactataactgcaggtgtagtacagctgcaatagacacccctggagagctaatgaagatgcagactcctgggccctacccctgacccacagaatgagaacggctgtagcagtgggacccaggagtctaccttttcaacaagcctcctcacccagtcaccattgccaccagtgacactgatgtaccccagagcttaagaatcaaccatcaataggagctgtggttaaaagctaggtgactaaactcagagcctggctctgttcttagctgattgtgcgaataaattaatttccattcttggcctcagttctctcattgggaaaatgggcataaaagcagcaagccctccctaatgactattgtcatgctctgattcttggagacaggagggaggaagcaaagagatgacagctatgaaggctgaagaacaggacccagcctagacttggggggttagaggaatggggtataggggaagaattatcatgcaggggaaagcccggagaaggcatctggcagtatccctgcagtgaaagagcatgggatgcagggacagccaacaaaaggggaaggctagcaccagagatagtcaagggcaagacagaaacgtgggtaggagccagactgccaagagcctggtagaccaagcagtggggactcaatcccatagccggaagagagccattgcagggtgttatgcactgaaggcaagtgtgttacatttctagactgccctgccctcagacaaaggcacccaaagtccttgctcagggtgcccttcaccgtgtcccatgctgggcctc

SEQ ID NO: 34173 - DNA, 1261 bp, Bovine  19866880966847
  misc_feature (1)..(1): n is a, c, g, or t
ncaagatgaaactctatcatttactacaattgttaactacaatagtaatagcttctgtttattgaaagtttattttgatcaaatatatgcacagtgcctcacgttgggaaggtaaaaatcaattatcccgtattttccaaaagaagaaattgaaactcaacactggtaataaacatctccaaaggtccccagctggtacagaaaaaacaggactcacaaacaaatcagtccagttccaaggcttgtccctctccagctatgctatgctgtccttgtggcctctgccttcaagatgccctcctccctcaagatattttatgtggccaaatccatgaagaaaaaagaatcaaactgactgccaaataccgtgtagacataacaaaaagctaattgactgcaactcttattttccagcctactcttgcggtttcaggggaagtcatctcagccgtggagacagcgacccactggtttgaaggggcgccaggggctgtgttgtccagctcagtggagccaggcagcagagtctcatctcctgcttaggtgctcatgttccctgtgtccctcacgtctggctctctatcaaacaccactgggacagcatccctgacaccaccccaccatcacaaaccacaccggcagcctcacaatatctcactctatgacacatgggatgtgtcaggcaaacagtgctatttaatagagaatacagggctatatattcgatgtgactgttctcattctattttccccatctctggaagtaagtcattttacacactaggaaactgaggtttcacttgggtctgtccaaagtcacataaaaagtaaagatggggactggaaggcaggctgccatcccatagcccaggcacttaacctctccttgtagaggctgaggacctttctccaaaggggcaaagtaacatccttccaggacaaacctgtaggtggtctcagagctggggcaagaactggggctctctcattctagaagtttctccaccattctctctccctatttgttcccacagcaactagacacaggctgtgggcctgctatacatcaggaactatgccatatgctaacagaaaaaaacaacaacaaagcaaaaacaaattgaaagaagttgtggctcctgtcctcagcagccccagagtcagactgccctgtgttagactcctgcctttgctaccaaccagctttgcaaacttggacagatgacttggcttctctggacctcagtttctctatttgaag

SEQ ID NO: 34174 - DNA, 1728 bp, Bovine  19866880984173
  misc_feature (1)..(1): n is a, c, g, or t
ncagggaaaggggcatccagctgtacacccacaaggaaccaagttctgccacacaatgtgaatgaacttagaagctgattcttccctggagccttgaaataagagccagcctacttgtcaccttaattctgaccctaagcaaagagctcaattaagttgacatcaacttctgagctatacaatggtgaactaataaaaaggtgcaattttaagcccctaaatttgcagttaacttgttatacatcaatagaaaagtaatacaagtatgaacctgcagaatctaatagtttcttttctgaccagccatagagcatggtggttaggaacgtggattatgacttggagccacattgcctatttcaaatcttagctctgccattgtcccaggtgaaagatctgagcaagttgtttaatctccctgggcttcagtttcttcatgtgtagaataggggtgataataataatatcttcgtcctggtgccatggagaaccaaatactataaaatatgtaaagttctgagagtaatgtgtggtacattattttatcagccctgtgattagtactatttaaaaaaaataaaggtttctagaatctcccctcaaggcccaggacctgggaaagctgagccatagacccacatgacaaccatcagctgaaactgcccccttcttctggttttctcatatgcattcctcttggcaccgttatgcttcctgctggcccctgtaggcatttgggtttgcaatctctgatccaggattgattagctggagagtcaagcaaaacctcaattctgaccttcacctatgaaaacaagccaagatctttattcattagctgagcggatatagtcttctctgaagccctccttaatttttctttggaaggatttagaagctggctggagtatggcttgaagagaaacatgcaaggactcttgcgggtctttgaactgaagatcccaacggacggaggagaagtggctcagaagggctcttgagcatctaatccatttgcggctgtcactgcctcctggctttataaaataaaggacaacatgaagcctgtaaaagatgccatccatccttctggtggccccaaagtccaagcccactagactctgcgaattgtaagtgctggccactcaagagccctcatgcctctctcttctgttgtcctaaatgatcccttggctctggatccttgccaagaacccggagcacaatgccacttcaagcccaaagtcatctccctgtctcagctccaattagctcagagcttttgggaagctgtgtgtgagagcagcagggcaagcaaagtgctgtccagctggcgggcagatggacagaaagagggccaactcttgtttttaatctaaaaaagagcccagggtagggaactcaggcagctcccctcctgtctctgaatggtaatctcttggggccatgagaaaatgtttcactgcaacagtacctgagttttcctctttagaccctatgaccttcccaggctgtgcaaatggactattgacaacaactcttcactgtctgttattcagtctccctttgaagcaaaagcagccagggtttgaccagttggctacacacaactctctctctctctctctctctctctctctctctctttgtcaaacttgtttctagaactcaagtctgtgtgaggtacaagaatgtcttgaaatattagaatcatctaatattctatta

SEQ ID NO: 34175 - DNA, 1700 bp, Bovine  19866881062969
  misc_feature (1)..(1): n is a, c, g, or t
nagtgaagaacagggaagtctggtgtgttctagtccgtgggcttccaagagttcaacacaacttagcaaacgaactacaacaacaacagtatatgcaatagaatattactcagccacaaacaagaacgaaataatgccattcagcaacatggatggatctagagattatcacactaagtgaagtagtcaaagagaaatattaaatattatcatttatatgtggaattttaaaaaatgatacaaatgaactcatttacaaaacagaaagagactcacagacataaaaaacaaacttatggttacccaagtggaaaaaggggagggatccattagaaatgtgagagattaacaggtatataatactatatgtaaaattaataaacaataagaatctactgtatagcatagggaactatattcaatatgttatacaaaactataatggaaaagaatctaaaaaaggatgtatatatgtatatattcactgaatccctgtactatataccagaaaaactctaaatcaacgatagttcaattaaaacaaacaactctacagagtgagtactgatatttacatcccacaagggagaaaacaaagacccagagaaggcatgggcttggcctcagagggttttgctagtctttaaatcctagagaagaattcgagttctgcggtcctctgtgctacctctttcttctctgaggccctgtggagtgatctgcgtgtgcctaaattcggcccaacatttgcagatggccacaggtgaggtgaaagtgagacctccgagaggagagtgaaaattcaggggaaggattactgggactcaggtgcatcccacttctcccactccctttcttcctttgttctttccattagtcctcattttgtgagtattttcatgcacatccaatcaaattttattttctcctcagttctttgtttctcctttttaggatttcacgtttgtttgtttgaggtgtgcttccctacaaatgaaaaatgttctcaaacataccatccattgaaaaaccgcccactgtaattatgaaacacttccatggtgccatcatttgatcctgtctaaccccatattcaaaagccatttagaaatgggttttctcattcataccttaaatagttaatctagccacattgtttggttattcttgtttgattgattcactctgttttattatactgaacttatttaaaagcttctgttttataattgtgtgggacttgggggcaattcattcaaaggtctgtaccctataaataaattactctccttttgctactaacatgaaccggttctattgaaaccaggggggaaaacgcaaaagaaagctgaagacacagcttttgttaaagtgaggggaaaaagcacacctattctgtttagagaagacctttaaaaacccatagtgattatataaaagggagcaaaagcagtttaggaagagatgaaataaatggtaaacaatcgtacctccaacatagagaatgcgtcatttcctcatttaaaagaaggtgttagaagtcaagaaaactggtgtcagtcttaagaaaaagaacagaggttggccttttttttttttttttttctggattttgcggcatatgtagtgaccatcctgttaattagctatacttttaaaaataaccccatgaatcaggttttaaaactctggaaacgaag

SEQ ID NO: 34176 - DNA, 1309 bp, Bovine  19866881178213
  misc_feature (1)..(1): n is a, c, g, or t
nctatggcagctggtcaggttgggcagtttcagtcagtgtgcttccccctaacagagagatgggaccatgtgacagatctggtccatggaatatagacaacagtgacagacccccccttcccagcctggcccctggtagatttgctatgtgacttttcatgcttttttccccagacattaaggggagaactctgagaccctaagggatgaaaaacccaaagatggagagagcctggatccctgaatgactgagtggaacagatgttcacttctcagctccacctgtactggactatgacctgggagagagataagcctttagtatgtcgcaccatgaggctgaggtgtatttgttacaggaatgtgttatctaacacaaaggtatggggtggagagagtgttgtgctcttctcctgtctccatgaagagcaaactggagagtcagagcacctttgtcagagaatttacagacagaagttaaactgtgtcataactcccagaagaaaggaaagagactcagaaggctggccctgccttccctggtctcctaagagtatgaagcaagaatcttctgttctctttctctctgcaggggaacagcaggcagatatctaacacatcatgttctgctggctccactgacaaggagacaaaattctatcactcagccgacaggagacctcacaggtgactaatttaatccctgaggcctctttagaaggagaaatgtctcctttctcagcaactcctccctttccttagcctgatttccacgaagcaagagagtcccttgcgctcagatcagctcagcagggaacacatattcttggagtgattcttccacaatttggtgggctgaattgaatagccatttattagtattcgaaaatagtgcctttggcataacacagccttgggactacaccctggaaatcactccatcctgcacatagcagggttttgagaggggtaggatataccaggacctgggcaggaccaagtgagatgaaaagctttggtagaggaagaaattagcatctgctactgccttcttcacctttgggcactgggatatccttggtcaccatttcttggagactgaaatcccagaggttaatgtagtggttgacttagaaaaacagagagctcaaatctagagatcacatagaccaaggtttgtctctcagctttagcatgtactaccagctgtgtggggtggtgggcagcggggggcttccctggtaactcagctggtaaagaatctgcctgcaatgcaggagaccccagttcgattccgggttgtaagatc

SEQ ID NO: 34177 - DNA, 1500 bp, Bovine  19866881250543
  misc_feature (1)..(1): n is a, c, g, or t
ngggagcacttagcgcttcttttagcatcatctttctggagctgagagggctgcccagggcctccacacatagccgcctctttggtctccaactcagttcttctcaagacatttttagggcctcctccagaggctcaggcccaaacagatgtccctctcgcccccacttcaaactggtgtggtgtgaagaaacacaagagggaagaaggggaaaaaagctttggtaaccatgtgtcacagtatggaaagtggttcatatattaagagaaagtcaaaatgaaaaaccagaaaatatgtagctagtttatgagtatcacaaaaaacagcttctagcagcttctcagttgaaccaagcaggtgtgaacctagaggattagactgatgatatcatggtacacaggtggggcttttgactgtggaagacaaattgaactcccaaaggcaaagtttctcaacctcgacaatacaagaaaagcacagtggctcatgctcagtgtaggggatgtattaatactacctgctgcagggagcatccctggcctctccaccctagagtcccagagcactgcatccatggtaaccgaggaagcctccagagttgtcaagtgtctcctggtagcaaaatcactctcaggccagaatgtctgatttcaggtctgaatttgaattacagactgtcccaacttaatgatggttccacttaacgatttttgactttactatggtgcaggacagggaagcctggcacgctgcagtcaatggggtcacaaaaagtaggacacaaatgagcgactgaactgaactaatggtgcaaaagtggtattcgattcagtagaaacagaattatgaatgttgaccttttttggggctagcaataatcttttgtgatactgggcacaggcagggggcacagctcctggtgagccacgtgatcatgagggtaagcaatcgataccattcatctgtacctatacgaccattctgtttttcatttctgatactgtatccaataaattatgtgatattcaacacaagtataaaataggctctgtgttagacggttttgcccaacagtagactaacttaagtgttctgtgcacttttatggtagactaaggagatccaaccagtccattctaaaggagatcagccctgggtgttctttggaaggaatgatgctaaagctgaaactccagtactttggccacctcacgcgaagagttgactcattggaaaagactctgatgctgggagggattgggggcaggacgagaaggggatgacagaggatgagatggctggatggcatcactgactccacggacatgagtctgggtgaactccgggagttggtgatggacagggaggcctggcgtgctgcgattcatggggtcgcaaagagtcggacatgactgagcgactgaactgaactgagactaagctgtgatgttgggtaagtcatgtgtattaaatccattttcaacttacagtattttcaat

SEQ ID NO: 34178 - DNA, 736 bp, Bovine  19866881295326
  misc_feature (1)..(1): n is a, c, g, or t
ntagaaaacctttagttgcaagtcattgacaggagaacaagaggtagaaagtgtaaggaccagaaaaaaaaaaaaaaaccacatcgttcctgctggcaaagcagttccctgactgctcctgggtagaaagatggggtcagagaatccaggcgtggggaagctcttgccttggggtccccttactcctgaaggcaaggggcagcttctggctcagacccccgggcgccaggccatggatctgccagctgtgggggctctgcctcccccgcgccctccgcctgtcacacgcggggatgtcacaggagacaatgtgcttttgctagcgccctggctgcgttggcagaggcctggcgtcaggcatcacaatgactctcatttcctaggaaacagggagtcgcacttgtacctttgctgagagcctccgcatttggagctgtcatgtgactcagggagctatttttagcctcccccagtcctgtgttgtaggaagaatgatttgatgaaaatactaaactcattaaaagcctgggggatggggagtggaggaggggttgctagagcagaagctgcaatctctaagattctggcccggggttgagcagcatgagggaatgacagctgggacctggcatttccttggcgtctgtgccctgggggaggtggtggggggagggactattgactccagtacctggtactgctggtatgtactgtgggccaggcgctgggctcaaca

SEQ ID NO: 34179 - DNA, 1230 bp, Bovine  19866881351059
  misc_feature (1)..(1): n is a, c, g, or t
nttttattcagttcccatagactctaaactaggagacactggacttatccagggacataataaggtgcaaaaatttcatcatctaaaggtattgaaatcatacacagtttattctcttatcgttgtactttccataacttagttctcatagaaacagcaacttctattgccatttcaatttttgaagtgagtccccaccagtaacactgtcccttttaacaaataatagtgttaacgtggtcccctgcagaagggaatggcaagccgcttcagtattcttgccttcagagtcccacaaacagtatgaaaagtgttgttaaaacaggctgcaaaaatgggctaagtgttcatattctaagagagactggtcacttgaatagtcactatattttctcaattccagaacttgtccagatgaaaagttctgaaatcaagtgcttaaagactgatggagacacgtccaaagaacataggagccaggtttacagggttcccactggccaaacctgggatcattttgaatgttgaatagtaaacaaatataacaacacagaatagcttaagaatccatgagtttgtgtaagtaaattaataaatggggaagtttttatgcaaggatagttttgcccctgcggatatttgctgaggtctggggacatttttaattgtcacaacaggatagggaaggacttgttatggggtagagactagggatgctgctaatcatcctgcaattcacagaacagcaccacaattaagaattatccctcccaaaatgtcggtagtgccaatatgaagaattctttcccataggaaagtgtccacagtttcccaaagtgtgatttgtagaacactaatcctctaaactaagattatggcatctggtcccatcacttcatggcaaatagatggggaaacagagacaaactttatttttctgggctccaaaatcactgcagatggtaactgcagccatgaaattaaaagacttttacttcttggaaggaaagttatgaccaatctagacagcatattaaaaagcagagacattactttgccagcaaaggttcgtctagtcaaagccatggtttttccagtagcattgtatgggatgtgacagttggactataaagaaaactgagcactgaagaattgatgcttttaaactgtgaatgttagagaagactcttgagagtcccttggacctgcaaggagatccaaccagtccat

SEQ ID NO: 34180 - DNA, 1525 bp, Bovine  19866881424989
  misc_feature (1)..(1): n is a, c, g, or t
nccttagagatcaaagggcactcaggtaagctgcatgtgttttctgacacatgaaagccatgggttaatgaagacgtgttttaagctggtaaatttggggcaatttgttatgcagcagtaggtgactaacacaccatccaatgcattttgctcagttagattgcagtgcagaccccaccatgttggtccacctgtaagtctgcttttcaggatagaaaagtgtatgtatatcatggtaggtcaaatagtagaaaccccaaaatgatccacatcctaatccgtggaacctatgaatatgttagatcacatggtaaaagggaaattgcagatgtaattaaggttacaaactttaaaatagattgttctggatgatccagcgggcccagtcaaatcacatgcagccttaaaatcagagaactttctctggctggaggtaagagagatttggctgaagtcaaagttggagagatttgaagtgtgagaggaaccctgccattgctgtgctggggagaatgtgtccagaatgagattgaatgtgggcagcctctaggggcaaacaccagctcccagcaaggactgggacattggccctgcatctgtcagggactgaattcagccaaaaacctgaatgagcttggaagcaatgcatccagaatgtctccaggaggaatgaagtcctgctgacaccttcgttttggccttgtgaaacccagagcagaggaatcagtccagccaactgggaccgtggatctaaaaggtatgaaaaaatacatttgtgttattttcagttactaagtttggggtaatttgggtagcagtggaaagttagtgtatttacattctgatattacactatgaaaatgatatttattggctttgagtactttcctatcaggtatcatagctatgcagatgtttcacaatataatttatcattttccacttaagccactgaagcactcattcactatctcagtgcctctctctacggcaggcttgagtgttccatgcattgtttttcaaggctctctgggaaagacactccttctttgggaggctggcgtctggctggagaaagactgagtgcctactggttgtttctaaggctactaatcaatacttaccattaggacgacaactccatgcatcactaagctttgacctctgtgccccagagcagtcccaagatgccaattgatgcacaggcaatatacatattcctcaaatgccatacccgtttcatagacttccctgaattaaattttagaggctttagtgatggcaaaataatgttgctaatgtaccagcacgcccagaatatttagaaagggtgataggatgaaagtaattatgtttgtgccttttaaaaagatgttttggatggatgctgcatttggattgatggccagctgttcttgtcttctacacagctgggtggtgctggcatagactgtctcttaagtcagccatgaaaataaatacatacctacaagcccaaaacctgaaagcaaacaattggctccct

SEQ ID NO: 34181 - DNA, 776 bp, Bovine  19866881442663
  misc_feature (1)..(1): n is a, c, g, or t
nttggtgatggacagggaggcctggcgtgctgcaattcatggggtcacaaagagtcggacacgactgagcgactgatctgatctgatctgatctgaaacacacacacctgacctagccccttgcctcacattgacagggtgaattagcacaccaacaacaaagcctgtgtggttcaaaactgctgcttccccccttctaccctccaagcctcagagaatttcccttgtggcccacccgaactggaaacatacaaaaggggggattctgtagttcaccctagtcaagctgacacacggcaaggccatcacaccatcccaatcactcctgagactgttggaaggctacactggcctttgacaggtggccttagttcctcactgcattggcctctcactagggatgcttgagcatcttcatgtcacggtggctggctgcccccacagtggattgtccagagagagaataaggagcaagccacaacctcttttctggcatagtcttagcacatactgtcagatcaccatatgcagtttattacaataggtgactgcattaggaacacattcagaatgaggatcattaggctccaccttttgaaaaaaaagtatagaagactttggggatatattttaaaatgcagtaactcaaagagccagagtcaagtgttgaaggcaagggtgacagcaagaggccctgaggactttgatgtgtgcagttcccctcctgagggtcagtgtggccagagattctcaggcaagccctggggaagagcagc

SEQ ID NO: 34182 - DNA, 1488 bp, Bovine  19866881560368
  misc_feature (1)..(1): n is a, c, g, or t
ngatatctccaaaagcaagacagaggagctggtcacccgccagggaatgaagatggtaaagcttattccctcggctgtgaacaagcgaatcgatggtgaaggaaagcctcgggtcctccagtgctctaaaagccgataataaaatttaaaatcaatggcaaagctgacagcaaaccgatggcagggccagaggccaggaatgaagtgtctctgtgcaggaagcaggaagacagcctgggcagcgatcctcagaacagcatgctgagcatccaggtgaaagcatctgggtgcctagatttcaccgagatcctgcctcctgggctggcgcccccccatggacgcgggaggtgcatgtgggaaaggagctgtcgaaggagtaagacctggaccccagtactgtgctgccctattcactcagcttttggaggtatggagccagagcctggggaattctatcttacactattaatttcacctacattaaaaaaatatggacaatgcagtccagctacattgttatgggccaaatgcatcctcttcaaattcataggctgaaactctgatccctaacatgatggtgctaggaggtaggactttggggaggtaactgagttatgaggtcatgagcgtgggagccccatgacaggattaatgtcttataaaaagaggaagagactagggctctctctctctgccatgtaaggacacagcaagaaggtggccatgaaaagcaaaccatgaaaagcactttcatcatgaactgcagcaaccagcaccttgatcttgaacctccaaccctgcaaacctgtgagaagtgaatgtttgtcattgaaatcactcagtctctgacattttgttacagcatcctgaatcaaccaacacagtatttctcagattcatctatctgtgcaagcgtttcttgattcccctcgatgttggggactaatggtgaaataggacatttggaaagtagtgagtttgggactggcagggaagacacttagcatccagggtactaggaacaacaatgcccttatgagaccagaggggagtgcagaggcaacactacctgacagggaggggagtgggtaggcagggagatgatgctcgagagatgctaagccttgttgtgcctgttctaaggacgtggtggagcagtggactcggggcggctgccctcgtgatgtgtggtgaaggggaaagcgggccagtcagagggtctcaggaatttcactagtacgtttaagtgtaggaatgaaacctgtaatgggctatgaaagctgaagaatggaagagcgtagaagagaggctcagtgaagcagagaggtgggagcgtgagagggagaaagagggagaggaaaggagagcgagagagcatgaagcagggaaggagagagggagagcatgacctaacttaattttgaaaactgcacagttctatttttccattcccctgcaacatggttatatttggctatttttgaaatg

SEQ ID NO: 34183 - DNA, 1350 bp, Bovine  19866881695925
  misc_feature (1)..(1): n is a, c, g, or t
nagaaggcaagtgacttggtcaagacacaagttcacgggatctcaatccagtaacaaattccaaaccaagccccgtgcatgctgcccagtctgcttcccttctagaggctcacacccaagcctgagtcaggcatcccagaggggttcaacccagagagaatcccagagtctcccagcaaaataaccaaacgtttttaccaggatgcttaaccttctggtcaaggaatcaagttccatcatctctgctcttctttgcagtctctggtagaagcatttgcaaacacaaatagttaaaggtcacgtcagaagcagaatagggattctgcatgatccatctgtgctgggataatccagaattggccatgaatatgtggaagggcctacactacaccagtaattctttttcacctgccatccacaccagtcaaatgtgttattcttgtacattctttggagaagagtgtgaggcatgtgcatccacagattgggcactcaagcgaggcaggaaagcaagcctcgaatataaactttttaaattcccagttaaaatcttgagaaaataagcaagtgggtggtgcatcctagttataaactggttgcaagtcaaatctgctcatgtggaaatgatgaagagaagcagattagaaaacgtgtccttttttccacagaaggtagggaatgaaggaaagatcattgattttaacagccacaagatttagggatctgcctgcaactttgccaccgactgtttttgtgaccttacgcaaattctttatactctctgcgtctggaaaacagtgaactaataaggccagtgacttttccatctttttcttaaggctgtagatcctttcctttagaggcaaactcatacagaatctcagacatcagacacattatcttgcctctctgaacctcagtttccacatacagaaagttgggacaacaatgagatctacctcttagagtttcggagtgaaggacattcattaacccatgtgattagagtgcatggaactccatacacgttagctattattttcagtgatatcatagctatgaccagagcagcatacctcagaaggagccttccaaactctgcccaacggctaacttgtagatagcaactgtttacggagtgtcactctacacttaccttttgaagggcttataaataatttttctgaactcaaccttctcaagtataacggagcttctgtacacaaaaatataaagtaaggtttatcacttgggtgataaaaccagaaagaaatgcaaggaagtgttactgtaagtcgcggtaatggttattttagtggggaaggtgggggccgtgaccaggaggagact

SEQ ID NO: 34184 - DNA, 1116 bp, Bovine  19866881731530
  misc_feature (1)..(1): n is a, c, g, or t
ntcttgaaaaaaaaaaagagggtgagacttgtggattcatacagctggaaggaaggaagatgggagttgagggcatgaatggagatgcaagagaaactggggaactgagcctttacatggaaagatccgatcagtatttagaaataccacttgccctatgagcatgaaagatgaacttttttttttttttttggttgggagtgcagtggaggaggaaaacaagatgagaagtccagttaggctgctccagcaatccaaggatgaaaaagagacatagtagagaaagatttcaaaaccaaaaccttcaggatgggtccttgccacaaggagacagaaaaatttagaatgttgtctgggatttctggcttcagccagttaaatagatggaggcactattcaacaagatagaaaatcttggctaaaggaagtcctcttaattgagcacaaaatttgattctaagcttcccagcagcaaaggcaaagaaaaaccaaaataaatgacctcatctcactgctcctcacaggatgcagagctgtgcagcacggaaaccaaattttctcatcaggtatatgaggggattccaatgagggaatcttcatggaaaggaccacaaaccaaagacagacaatagttttataaaagaagcagaaatgttcttgcaggactgttctgtgtattgacctctggtaagagctgagaataagatattaaatcacagctgtgtagtcatttgtgcaaggaagtctgtataatggccttggggtctctcatttgctgaagagctttgagttcttggcatctagagaagtgaggggttggatacaaatggaaggaacttgcactgataaaaacattttataaacttgaaactaagagttcatgaccttagtgtataagttagtgccaggataattttaaaggagaaaaatacaaaagctccaattctagcaaacaccattaacaacataatcaagtaacttagagtttcatttttaaatgttgaaacagaatccattgtggggtttcttttaattacatttcttcctgattaacctgggtttattatagaaatttggaaaattcagagaagcagaaacggaaaaacctcaaatcac

SEQ ID NO: 34185 - DNA, 1503 bp, Bovine  19866881940706
  misc_feature (1)..(1): n is a, c, g, or t
nattggagctggctgggtgggtgccctactactgctgggatcctttgggctactagtttgggaagtaccagagcacaagggaacatgcccagcctcaccgatgcttctaagcctttgttcgtgtgatacctattaacatcgctttggctagaacaagtcacatggccaagcctgaagtcaggaggtcctcactctatccatgacaggggtaggaaatgggtatttctgaacgatattctaatctaccacataagaagaagggtcagagaaaaaaagaagccaaaggagcccacagctaacttctttcctgagctacacagcattatttttcttgtacccttgattttccaagccctagaaagggtgccattgatttgcttagggttggaaatggcaacccactccagtgttcttgcctggagaatcccagggacaggggagcctggtgggctgccatctatggggtcgcacagagtcggacacgactgaagtgacttagcagcagcagcagcagcagtgtgagtggattagacagaactagctacatggcttggctgcttcctcttcagaagaatgcagatagggatgtcagacaattatggggagacccacctcacagtggacattagctttgaatcccaacttttgcatgccagcatcatgggtgtaatttgagaggccttgcaacttctgagtacagtctctctctccacatggctgagagctgatagagaaggtattggcaaggttaagaaatagggagaattgatgatttggaatagttgttatctcctctttttgtcacaagcattcacaattctttatcttctaaatcttaagtttactaatcagcctgaggcaaggagataaagatatgctgatacaattacggggcgggggtggggggcggtgagctcataattatcatcaaagagtacgattaaaaacactttttatttaaatatttatcttagagaatttcggcttgtgagtttacagtgcttctagggagcatggcagtttgagagacaatgacctcttccttctggttcttttgatgactgtcagagcctggaagttttcttcctggaatctgttttccccagcagtgccaggcacatggtaatgactcgataacgttttcatggagtgaataaactgtaaaattggaacagaaccgtccatggatatagtaaggatatgaatgaaatgacatttaaaagatttttagtcttaaaggtaaaaaattctgaattcttcctgctttgagtgggatgtaaattcaagagtatgtgattttgtacaatgtagggattgtaaatatccccaaattatataaataagctttttcttaccccttgcaacctcaggtacaggattttatgggctcttccaaatagagcatgttttatgcacaaagagttttgttttttgcagtatatattttttattgacagctttgatgatgcagggctgattcctatgttaagagagtgtcagtta

SEQ ID NO: 34186 - DNA, 943 bp, Bovine  19866881988865
  misc_feature (1)..(1): n is a, c, g, or t
ntccaactcaggtaattggaaattgtcacatgccctccagaagttattttgtttcttgaaatattattaatgccatattcagatactttagcatccgccaacacaaccaccatggattgggaagatatgatgactgagagaagacactagtaggttttcacttctcaatgaaacactgacattggggtgtgtgaagatttgtgtatcatgtcctgctctacatagagtttccaggtctcggtgatgttaacatttcagtgcaagttgagggttgtagccatggtgctggtggatgactaagctatggttagttataaaggtgatggaagcaagtgtcaagagaatgtaataatcagctgaggcttttgaaattgtcccatgccaagtttatatccccaattttctgcacttagagccgtgtggctgaaatagatggatccaacattattctgcagagataaattccagtatctcccacactccaaggatgtgtggcacactttagcatgcccaagggttgctgcacacttagcatcagcagctcttagatgcctgcctgtaactgagatttttaagacctggcatttgaagattattctgtgtatcaatagaaaatgtttgtcggctcaagatatatcactgtctgaatcccatctaggcagccaatattttacctcttttctcgatcatatttttcctcaaacatcaccagggtaatatgaatagaggcaggtgattttgaaacacacttctaatgcctggttttagacaagacgtcttttcttacttttcaagctcattgatcctcactatgacacatcacatctggtcgtgtctttcctgttctgtttatgtaacatagcatggtgtcaagtggaactgtattctggcacagtcatcagccaaagagatcacaaacgttacttctgaaactgcaatagaa

SEQ ID NO: 34187 - DNA, 839 bp, Bovine  19866880052555
  misc_feature (1)..(1): n is a, c, g, or t
nttttttgggtgttagttctaaaaggtcttgtaagtcttcatagaaccattcaactcagcttcttcagcgttactggtaggggcataggcttggatcacccgtgatattgaatggtttgccttggaaacaaacagagatcattctgtcgtttttgagattgcatccaagtactgcattttggactcttttgttgaccatgatggctactccatttcttctaagggattcttgcccacagtagtagatatgatggtcatctgagttaaattcacccattccagtccattttattttgctgattcctagaacgttgactgtccgtcttagcccctcttaaattccagtcattgctatggaatcttcccagatttctccagctgatagtagtttatccaaactacaaatttctgtagactttcatttgtacttttctcatggaacttagttcaagaaacagtgagtatcttcaatgcactattctattcgtttactttaatatgtgtatttgtcttatatcctgttagctttgctcttcttgaggataaatactcttctttgaacctctttttttcttatattttctctcttctttttcttctcttcaggaatgagcataatcctaaagtgcaatagatattccagaaatgtttgatgagtgaaagacttagtaaatatagtcaatagggtctgttcctaataaacatttctggaatggtgttacttattaagatctattataggataaagtttaaggacctattgtatagcacaggggaactatactcaatattttgaaataacctataaggtagaagaatcgaaaaacagtgtatatata

SEQ ID NO: 34188 - DNA, 669 bp, Bovine  19866880353310
  misc_feature (1)..(1): n is a, c, g, or t
naaattgtaagacacagtaaaatatatgaaaaatcaaaatctaaagagacaatgcaatcatcagaattgataggctaagagaggggataaattgaatcctatgaacttatttaaaaccaaagaaggcagaaaaaaggaggaaaagaacaaaggacaatgcaataaatttaaaagttacaaacatggttggtattaatccaactatatcaataatcactttaaatgtgaatggtctaaatacactaattatagagattatcagaatggattaaaaaaacaacagaatttgactatatgttgtctataagaaattccagggagggaaatgcaatgaaaaatttaaaggatggaataaacatgtttgttcgccatcaaaaaagatatttagaggataaagaatggcatccaatgaagagatgtttaaaagattaaaagtgtagttgtaaagcaagaaatcttgattgggaggtgccagcgaattttgaataggagctagaggaaacatggaggcatggtatttaaagaggtgtagactgagaatttctcaggactgaataaaaggatacgggtgatcagaaacaccaagggcataacaagatagatgaaaacaaatctgcacctgtatacactgaagacaaactgcgcaacatacaaaggtggtcttaaaag

SEQ ID NO: 34189 - DNA, 2901 bp, Bovine  19866880426791
  misc_feature (1)..(1): n is a, c, g, or t
ngaagcgtggggcactgtttgaggaactgtcttaagggtgggaacttgtgctcagttgtcctgtttctggtacacagaagagtccctgacacaggggtgcatttgtaggccctcacaaaatatttgaatgcagagcaagttaatttgaactttgagtgtggtgaatgtgaggagaatagcaacaggcccagaagggaggctgggcgcttcgggggagaaatgttctgatatcccatttatgttctatcttaaagtgagagaagataggacttctccgttagtgtctgttgccttgtagaacttatgtaattcactggagttttatgtttcatatgactgtttattaggcatattttatccttttattctgagatttctgtagttggagacagttgtgaggtatttcaaaccctgacactgggattatgaaaatcatatgtcatttctaggagaatagtaaataaagaagattaaggaaacttgtccaattatatacattattgagatgctaagcagttatcaaatactaatggataacatccttgaaatgttcgcctatgtaaattgtttggaactcgaatgcatttttcagtaggaactgctgtgatattggctttctaggtatttcccagtgcttctagaatgtaggagagaactgacaagatgggaatgagaagcctgggttgtagcctcagctgcatacagtgtagcttggctaagacattttatctccgactttctcaatgtctttatttgtaaaaactggagagaatgtctctggcagcttcacagagtagggatatgtaaacaagactgtatgaaatgctacattgcatatgaaatgctttattgatataaggtgttccagtgtcaagtattattttcgtcagtgttgagcattttaaccccagtgtagcagaaccacagttctaattagcacatccgagcatctgaaactttatctaactttggatctttaaccctttctaatgtttaaagtttttcataactgaaggacttgctttcggagattagcctcatgtttccacccggttgttaagttaaaaattataaacttacagaaaattaaaaggatggtacaaagggattttcctggtgctccagtgctgccactgcagggaacataggtttgatcccttggggatctaagatcccacaagctgtgagatggggcaaaacaaagatgaaagatggtacgaagaacaccttagttttttaagacagcaaatcgtatgtagttaagccctcttttaggaagcagtctttaaaaatcttaattttaaatagataaaataagatcacttttttattttacaaaaggaatcacttgaattgtgatttgagtgtgtagtttgttattatcttgaaaagaccaatttgttgaaaaaagtcctgagttggaagccaagagacagaggagcttgtcacagctgtgcctcttgttccttttataacctgaaactgaggttcctaaactccagtcatttgacagtcacctttatatcggcatatcagtgtataatctacactgttatttttctgatactttctttatatgatgcattgtagtatatgtgctgccaaagtgagcattatgtgatgcagaattaaaatagatttagaggtataattgacatgcaataatctgcatatattaaaaatgtacaattcatatactttggcatgcataatgtacttgtgaaaccaccacaatcaagatgactaactttttaaaagcttgtgtttatttaaaaggaaaccatatattattagtttttgctaattatattttctaaatcagattggaacaaatacataaaaatatttatctgggacttccctggtggtctagtggttcagactccatacttctgctgcactgggtacagtcttgaactcttgtcagggaactaagatcctgcatgctatgcagtgtgacccccaaaaaagtatacatgtgccacttaggttataagtccaattataattttttatcacattttgggaaaccccatcttaagaaacttgtatttcttctttgggtcataggttcttcatttgaaaagtaaggtagtggggtcgtttccaacctcagcattttgttatttataaaaagaactgaaatgttaaagacacagaaagtataattttgtttgacaatatagatagtactaggaaggcagggattcttgtctgtctctgggacctattaaaacagtgcctgggacctagtaagccttcaataaatagttgttggatgaatggatagatagttaccaattaggaatgaaattatttctgagaagtatgctgtgagtgaatgagaaaaacctgttatattcattccttcatagaattgtcatagaatcagctcctgggattctataaaattccttaagtaatcaagaaagaattaaggaaacacatccaactatatacaagtgaaattttctagggcatttgttttctcacagttttcactgcaggaatctttatcacaatggaagaagagggaaataggtagagctcagagagatagacattatttcatatttatttacttatttaaaaagctggtaggagaggaagatgcaagtataaaaatgatgatatggaggtgattactaataaacatgatttctgtaggctctcccagtaccatctcagtccagcttactaagagttgattataaattctgtttgtcttgaaatatttccacttgaaatggtactatattgaggagttggggatctctaaatcaggtaggatggtctttgtatttgatgtaaggatttacttctcacccctcctttttcttttttaagcctcactataatgtgactacaaccagattagtgaatccagatcaactcttgaat

SEQ ID NO: 34190 - DNA, 1583 bp, Bovine  19866880471472
  misc_feature (1)..(1): n is a, c, g, or t
naataaagaggcctatccaaagttatttacctggttaagaaacacatttccctgattctcaaccaaacgttcactaacattaaaaaattaacaacttcaaataaagattaaaaaaaaaattccttcaaagctatatatgcattggttttaacacctaaatttatctcacaaatatccactttatttcccagtagagtttaaaaactatgaaagaggcattttaactggaaagaaaagcatacattatcagtttactatccaagaacatcccacgtttgtattcagacaataaatagcaatgccacaaccaaaaaagatggctcttacataagagagaaactgcaaaagcctctcgcctttcaaaagtaggagcagtattcattcactgaaattttttgaactaggtaacttaaagcttatttaagctttcagattttactatacaatctttaaaaccaacatttctactcttacagtctactaactggtcacttctttggaaggaatgatgctaaagctgaaactccagtactttggccacctcatgtaaagagttgactcattggaaaagactctgatgctgggagggattgggggcaggaggagaaggggacgacagaggatgagatggctggatggcaccactgacttgatggatgtgagtccgagtgaactccgggagttggtgatggacagggaggcctggcgtgtgcgattcatggggtctcaaaagagtcggacgtgactgagcaactgaactgaactggtcacttcagtcttgttatttcttttcaaagaacttttagcctatgtttctttctgatgagacagttatccatctcaaggaaatttaaatgaaattcacatcttgattttaagcctagctttcattagaacatgattaacagtttaattttaacttaaaatttctgacttactcttagtgagctatcctgacagtgacagatttgaaacactactgactctagtgttatattttctgtccactcttcaaataagattttcactaggaagtaaatcaaactgagatagagaatccaaatgtgggaaacaatggtcacaaaaaaagtcagaatacaagatgttggtaggagaaaataatgcttaatttattcagacaagtccagctgttcctgagataaagtctttacaggataactaattttatcacaacacttccttcaccctcagcctttttccttttgctacacagttatcttaatctttgaagctattttacaagcctcactttcatgtcttccttggttaattccccactctcagattctcttgaaagcagccatagtgagctgtcctcaaagcacaatactgtctgaaatatacacagcctaaatatttaaaacccaaagagttttggaagagaccctgaaagtcattaaattgaacgctctcattttatacatagagaaacaggctctgagaagcttatttattcattgagcctaaaagatctcctaattcaatcctgtaatctgaaattaaggtaaatacacgctaaaaagatttctaagaattttcgactcgccagcgccgagttggtg

SEQ ID NO: 34191 - DNA, 1819 bp, Bovine  19866880530445
  misc_feature (1)..(1): n is a, c, g, or t
ntttttttttaattatgctgactagtataaagaaacacaactgatttgctgtattgttgctttaataatctgggattttctacctgtatgattatctcatctgcaattacttatgacgctatttgctcttttcttattcttaccctctatcatcagtcctggcctgttgttgtttagtcaggtctgactctttcacaaccccatggactgtagcctgccaggctcctctgtccatgggatttcccaggcaagaatactggaatgggttgccattccctttctctagggcatcttcctgacccagggatcgaacccacgtcttctgcattgcaggtggattctttaccacctgggaagcccccagttctggcttagattccaggatactgaatagatgcagtgatagtcatcaccctggcttagtccagctatcagcaagaaagcactctaagttttaccattaattatgttgcttgaaatgttatgtgaactcagtgtggatctatttctattggttttcatttacagtctttctttcctcatgtatttggttaactttgtttcctgcttactgtccttgaaaatttagttgaggaaattctctgaaaactagaatgaagatttcatcctccaaagagaatatgcatgttttctaggcccctgcagtcccaaatactttgagtaacttcacagttgatgtgaatttgactgcaaattacatttggtgccagttacttttattctgctgaagctgaagctccaacactttggccacctgatgtgaagacccgacccactggaaaagactgaaggcaggaggagaaggagaaggaggtaacagaggatgagatggttggatggcatcatcaattcaatggacatgaaactgagcaaactctgggagtggttatcctcaatcagggggaatgctctcaataaccctcactgacagctccagaaaataaaactccccttttccattttaagatattttattggatatgatggcaaaactttatatctttgcatctatcaacaaaataaaacattttccctttatactgaagatttcctagtgttgaatttatcctgcaccatcaggatagactattttactataacactatcgtttattatttaaacatctgcatctgtactcaagagggaaagtagttgaaaggttttgtttgctgtactgtctatgaggtttgattattaaggagcttcacataatatacttggaaaatttctatctgtggctatgatttttggtctggcaaaccctcttctcagctagttcctcagttcctggcaggaacaaagggaaagaaagctcggtacttgtcgtctcagtggagacctaggaaaacttgaaagcaaagctgcacccaactgtcttgcctactgaattactctagaagaaactggaaggaaacagaaaacaggagtatatcctcaaaccaccagctgactgactggcgttgttattaaattctctatcagtcatttgaaatcaactattacaatgaagtcattctgagcttttataaccctgatctaaattttttaaagttcaactttcttttaaggaagctgtgtagaatttaaattttaatcttcaatgaagaacgatgaacttatctccaatagattcattttaggtaaaactatttccttttaggtaaaagtaatctacaacaaaaaacaatcaaactaaatacactgctaccaactttaagcatctgtatttcctggatattctgttactatacctgatcatgtatgtcaaccattactgcattctgctggggtggatgag

SEQ ID NO: 34192 - DNA, 1460 bp, Bovine  19866880614118
  misc_feature (1)..(1): n is a, c, g, or t
ncagagcgcagacaaacccacatgagatcccttcttgcgcataatgtgcatccgaggacaaaattagattgagaagtaaatggagccgaaaatttctaaagcatttcccatcaagaagctgtttgattgcgtgttttaattctctgagtcctcctgcccagtgaggttcattttggtggggatggctggagcagaaggagcttgtgatgggagggggagtttggggacctggggcctgggcaggagggagggaggaggccttcgaccacatgctggttctgagtccagactccccgatgacctggttgagacctcaaacagctctgtgaaatgggtgttatatccattttgtagacaaggaacctgagtggcagaaattagggaacctgctgagactacatgaagagtgctgggttggcaggggtggcgtgcaccgacccacaggattttaaaactcaagctggtgccacgtcgggttgcatgcttgaatgtttccatttttcaccagaaagctagacttttcctccttctcattcctgtttcctccatctctccttcctccattctcaaagcctaggaatcctggcggacagagcaaagggtaacatccccattctccagatttggaaagcgaggctcacagaggtgcaatcatttgttgggagtgcagagagaagccagtggcaaattctgggaattctgattcttgtgtgtgttcccctacctggtcctgtctggcaggctcaataaatacaaagatgtgacaaaaatcacacacacacacacacacacacatacatgcacgtgcacacttgcatggcaagtttagatccaggtggacttgttcaccagtgcccacccctgtttggatcacggagctgaggggttgtagggcccaggcctgactgtgcgtggagctctgggcctcaccctcaaagggactttttcatttacctgccaatagtgattttccaacaattgttaagttttagtttgtgtcaagaaaatttttgttcagataagatcttcctgggaagcgtttatgtaaatagtcagaatcgaggttcagtggttgaggggtggccatcctagaggcccccagtgccccagggagccccagggaacatggccggaacccctcctggtcgacctttcatgtcctttggatgctggtgctccccaatgctgatgctccccaaagttccagagtggcctttaagactgtgtgaaggctactcaagaactcgtgtgttctctcctcagcctggctcttaatcccacctctgggaccctggctctccctccttacacctcagctgcccacccaccttaccccaacttctgccagttcctgaggatactcataccagtctcaagcacgttgcccctcgaggctcattcatggtgataggacccaccggtactgcccaccctgcccggctcagcctgagccctgctcc

SEQ ID NO: 34193 - DNA, 994 bp, Bovine  19866880617901
  misc_feature (1)..(1): n is a, c, g, or t
ntctgattttagagcctgtgagtttacccgctctgttagtggcagaggtagcatataaccccagcccccagcaactcctctcctgctctcactccttacctagttctacctcctgttttccgagctccaaagctcattctgcatgtttgcagggcagcaggagcactgatttgtcaaggtgtcttttctcccctggctttctgctctttgccttgatgccgatgaccgagaaaagaccgggcaggagagagaagctgctgcagaagctgggtcccgtcttgaccgtcctagctagattattctatctggaatttagtttttaaaaaggaaagggggaatccagtgatgtcttttaggaacaaactcttactattcatgcctaaagtacctttatttatagtcagttttggcatctgtcttcctgttcctgaaaaagggtctggagagctctttctctccctatagctctcccttttcagaaagacagggtgacagtcttgagatagttttagtggacagaactgaaggggccttgaacccagtgagtttgaatcctgtcaattctatctagcctctctaaaacaaatatttcgtagtgcttcctttgctatactaagatgacatttagagaaaatataacctgcctagacacataatttaaaaatcaatacaatgctccaattgtaacaaaaaggggaaagaaaaataaaatcagagtaaaatgatgtatttcattatgtaaatgctcagaagacataataaagtagtcagttgcttgcacttatgcgtagaatcaccatgaatacggcagctacaaatgtggacagctgtgttttctggcaatacaaatgcctctggtggtgttgccatcagcaaactgattttctgacattgtgaacatcttgataaaattccaaccaaaccaaagcataatcttccctcaatttatgtgagggttgcattccggaaaattcaggtaattaaacaccaagtt

SEQ ID NO: 34194 - DNA, 2163 bp, Bovine  19866880714140
  misc_feature (1)..(1): n is a, c, g, or t
nctcaaagtagctttatctttattgcttgtcgatcagaaaaatgccttcttgcatttggttcccagacacaagactcgactgacaatctctgaagagccaagggaaggacaggaaaatcagaaagaatcagacattcagccaaaggggcaaaatctgcctccctttgcacccaggtaattctgattggggcaggaaataatcatgggactccaaggggctgagacaagtctgaaatttcaacattcttaatgagggtagacagttcattttagagactgtaagtaccatcattagaggactcaagaggaagcctccaacagcagccacacaggagaaagttcaaagtcacctcaaagagaaggaatgctggagaacaccagtacttaactatggagtgcaaattaaggaaataattcacggtataaattttaaagtacatatggactttttccttcttctttttataaggaaaggggactgtctctcaaaatgtaactaattgttacttatataaccatttggataataaagaagagattttcactagatttcctgaaatgcatatctaaacaaagaaaggcatcatctaacaggaacatactccaactgcaaacacgtggtcaattcagcattcatactgtgatggcttcccgacactccagtcctgcaaattccctcacagcatacccatggggttttcagcaggaccaaccctggacctagagcagtggttttcaaccttgactacatattaatttcatcaagagaacttataaaaagcgtgaaatttaccattcttctcaatggatgcaaccaggctcactaaatactaaatggaagttagtgtaagataacaggcaagaggtgcactggcaaaggaaataaactcatttttatctctgcacttaccttgggttttgcacagagaccaaagtcaatcagctttaatttatgatattcatcaaacaacaaattttcctgaaaaaaaaaaaaaaaaaaaagacattttcataactatatacagtcttccttatattacatcccacctctagctattcctaaaagcactttaaggttgggtacagggtaaaaaaatcaattgagaaaaaaaaagaatgaagtgacaagaatagaaggaaagagaagaggagaggaatgttgataactatcctgcttcccctcaagtcacattagcataaaccaatttctccttggtactctgaggttcaactacaagcactttgatatgtgccaaaggcaagtttgaacagaaagagtgaacgcgaatcaaagagttggataaaaacaaagggaaaaggacagaaacctccatatcttgttagggaaattctagatctcaaaccctagtaccaaattacattgaaattcatgttcaccagcatgcatattagccaaagcctacacacttaagagtatcaaatttttattctgcccttgaaaagcagagtctgcccatttcattgaactgttcacttctgaagcataatggaattaaaattaaaggaagatgatgtcaggaaaagagtatcaagaggaagatactcaaagacaatattctcaaagaaaacactcaaaactcttctttcctaggaataaaacctgaggtttatattctgcatctgattacaaagacatttataatgtcacacaaaattgacaaagaaatagaatgccaataataagtccatccagaagagcccagcaggagtcaaaagtcaaaaaggaaaaagaaagatacattaggaatggaacaaaaaaataagcaaaagcccagataaattctaaacagaaagaacatttggaaactgactgatggcaggtaagtgatgtcaagttctcaggtgagcacccgtaatgcagtcacttactggttttgaggtccctgtgagcgtagccctggctgtgcacataagcaactgcagacactatctgacggaagacaatgcgggtctcctcctctgacaggcgatcgtgggaaattatgtagtcaaacagctctcctccagggcaatactgcaagagcagcagagtcacataaatatcattattacttgcaaaaatcagaggagtttaaaataaaaaatcatacttataagcaaggaatgaactaatttaggtatattcaaaaatacactctcagt

SEQ ID NO: 34195 - DNA, 1828 bp, Bovine  19866880739463
  misc_feature (1)..(1): n is a, c, g, or t
nccctgaagatggtgattttagaaggtggaacctttgggaggtgattaggacatgagggcagagtcctcgtgaatgaaatcagtcctctcataaaagaggctagagagatccctagccttttccatcatgtaagcacatagcaataaggtatcagctatgaaccagaaaaaggaccctcacccgaccatgctggtgccttgatcttgggattcccagcctcccagaactgtgagaagtaagttgctgttgttcataagctactcagtctgtgatactttttatagcagcccaaacagactaagacagtgacaaataactttaggtctctggaacttactactgacctcgagaaccatgaatattttgttggctgtctctatcacatggtagagttgacatatatgttgatgtctcaggttcttcaaggcatcaatttctgttttgacccgaggcaaatcactctgtgacaaaacattttattaaatgagcaataaacttatttggaaaatattccaagccccaatatcaacaactctaatactaagtagcaaaagcagtcaatggcctcaaaacaatttgctcaacaatacagaaatagagaacagaaacttatttctgtgtacattttcaaaaggccctgaggattttacaaaagaaaagtccaatctgaggcaagagtacaacatccagaaaaaataaaataatctcactccctttagaaggttagcattccaaacaaggaaactgacaggaacactatccagcatgcatgtctaggctaccacttcagtctctacaatgtccattaagaagcatgatgaaacctatggctgatccatgttaatgtttgatagaaaccaatgcaatactgtaaagcaattatccttcaatcaaaaattaattttttaaaaaagcctgctgagctaaaaattggtgaatgtagtaaaaggtattcactatctcagtcttccaacttttcaaggagcttgaaatttttcaaaataagaagttggctgggaggtggatagacaagttgaaaaaattttaaagttcacagtaaagataaaaatccagatatccatgtagtaaacaagtaatattttattataaaaagggactcagtctaatgatcagtggtttaagatccaattaacttaatatcaggccatgcaacctgatattagatcttaaccaagaagttgtaactttaactatgctgatatgatgatctttttttcttcttttttgggtggatgtgggaatctgatgattaaaaccctgaaagtaatcaaaataattttaaagtcctaggaagtaactaaaataagcataataacaataggaaatacaaaaaccagtttagaattaatgaattaatatcatcatattgatgctttagaataagttttgagtactagtatgttatatcttaataataacaattcacattttatctgctattaaggtatttgctgggtcaagtaaataaggtacactaaagttataactgaagtttaaattgcttaagggaattaaattaatcaattttgtaaccaatgtttaaatgatcaggaaaaatcattcttaatatctttttattagtttaataaacataatattgagcactgaaaacaaaaatactgagggagagctgaattatcagttgacaggttatttaaaataattctgatacagatcactttgtgattttggcatatatttcagaaggagttcagagaattgagtgatactgctgctgctgctgctgctgctgctaaatcgcttcagtcgtgtccaactctgtgtgacctctgagacggcagccca

SEQ ID NO: 34196 - DNA, 1801 bp, Bovine  19866880755672
  misc_feature (1)..(1): n is a, c, g, or t
nattggcacaagtttatcatttgtattacgccttccttgggctaatggactaaaatggacgtgagggagaaaaagagaatttcccaaagtcacttaggaagaattgaaaaatgccagaagagatatgcttgtagtgagatgagctgatctgtgagaggaaacagaaaggcacagctccttcagagactagaaaagagcaagatgaaaagcaacaagggggtcagacacttcccagtgccagccaccaggtggcaccatcgacccaagacagcttagttgctgtctagggttagggacaagaggggtgacagggcagtgtgtactgaccatttgtgagcttggtatgcttgtaattcggtggagggcagcagtgcctaggcatgtggaccatttgtctgagtttcacttatctgccagcatttaatcagggaagggggaggctgggacattgctgttgggggtcaatcttgtccttcctcacctccatggtggagatgtcttgatgcaaacctttttggggagtccagtcctcggttctcagcttttacttgctggccgtgtgaccttgggcaagtcacttctctctagtcttgttttccttgtgttaaaatgagatttggacagatgagctgagggatcttttgggctctaacattcggtggtgtgccagagaaagcattggagctggagttgcattcaggatagttctccattggctgtgtgatcttgggcagctcacctcctgtctgtggggataatagtaacatctgcctcacagcccattagccaattggaaaatgctttgacatttttttggtgctgtaggagagggaggggttgctatttattatttttcttggcaacttaagttagccagaagcaggcctccatcctcactactcagaaagtttgcacctctgcctgtgaccacaaaccagtccttacagtaggtgttttctcaatgtcactgcatctctggcctaactatctcatgaaactgctgatttctctcagttctcactgccactgtcttggtcaaagcaccatctcctttcctttggattattgctgtagcctcctagcgggtccccacctccaatgtcactgacttctccaaacaacccacctcctgaatagcagccccaggggcacttctgaaatatagttctgatcagtgactcgcctgaagagttttcactcttcaaatctgcccactgttctcagaaatcatccaaacttcttaacaaggctgctagaccttctgtggtcagatccacgcccatctcatgagccctgttcctctccaccctccttttttcctgctcaccccagtcataccaaacctctttccatcccttgaataccacctgttctttcctgcttgcagcctaagggtcacatgcatgggtggtagagccaggcaaccagggtcctggtgctgactccaccagtatctacttgtgtgactttgggcaggttcttgaacttcagtttccctctttgaaaaacaagggcacccattgtgccatgattgggtggttatgtggactgaatgagctaatgcacgccaggtgcctgggaggacccgtatgcataatacgtgctcagtaaaggacaccttttgtgacaatgctgttcccaccacctggaaactgccccctcccccaccctgccatttacccagctgagggcccacaacttcaggatccagctcatgtcacttcctaaaagtgaaggcttccccggggcttactcctaactgtcagctcccctggccccatctgcagcacacagaacctgc

SEQ ID NO: 34197 - DNA, 980 bp, Bovine  19866880791913
  misc_feature (1)..(1): n is a, c, g, or t
ncccacaacacctctaaaacacataatttttaatttctaaagtacaacattcagttttgaatggctgaatgcgtgaatgattatacaaacgggcctccatctacagacataaaacagacccatagaggttacctggcttgcccagggtcacccaagacccagggccaaaccaggactgtggcccagccttctgagctaaaatttccccagaaagttgccttgtgtctttctttcgttggctctcccattccctagcagactcacctgcttaacttctttttccataagagaaaaacaataaccctggcataaaatttaaaagaatgtcagattccagaattaactggcaatatgagttacacataagtcaaaacgcaagcaatcaaaaaaaaaaccaaccaaccacaagtcactgcagctcttccagggacctcctctgaggtaaatcgctgtttctaaggacatttccatgctatcagctcttcctcgttaacgcaaataggatgtcagggttttacagtaaaaccgaaaccagggagaagagagccatgaaagatcatttcaggggaaaaaaattacttgatttcttttctgaatctaagccttcactggatgtctctctcaacatttacagaggaatttttgacttcctcttgaaaaggagattatcttgtatttgggaaaaaaatttttttaataaaaaagacattttggagatgactgaaaaaatttaaacctaacgagtttacaataagcaaaggtgggtctatgatgggtaggaaagataacacaggacaatgagtggttccattgaaagagatgctgaaattctcagcttgggtaagtctggttagggccaagttagcgaatatcctagaaacagaagaaaccatttgggaacagtgatatggatgcacaaattttattttccattgagaagactgtcatgtacaaatttgggaccataaagcaaaactcag

SEQ ID NO: 34198 - DNA, 1321 bp, Bovine  19866880826230
  misc_feature (1)..(1): n is a, c, g, or t
ncccggcagaacagctgtctctctcccgctcccccacccaatagagcttcagcgctttctccacttctgctcatagtatggtacctaatacagttttcccacctgtgcctctcctgcatagcctctttaccttaattttaacatcccagtcaggtatgccatgccaccaagactcaatttatagatgaagcatttgacatctttcaggcataaatggttaatttttgacctcctacaacttggaagaagaatcagttgttcacttgaaagtatgttgttcacttgaaagtacgctgttcacccagggtttccttgttgagtcctaataatatgatgtgatttggtaggcaggactaggtgtgagattggtgttatttagtataaaaattaaagtttttccaaggctcaaatgagggtgggaactgtgacttctcagccagtggtcgaatggctatcttacgtaaaggttaactcatttctgggattttgagatttgtagggctatttgtactggcaggctaatttctagccttgatccttgaaaagtcatttgttgaactttactaaggtttctctacatagagaggactttacagtgcagcttagtcacatttgcaggttatcagtagtaaattttaaaacttgttttgattttctcatgcatgtttacataatcctcatatgtaataaaccctcagtagcactatagttttctctttcagaatcagagacttagcctcatcttcttccttatcatgcccaatccagccaactggaaaagattttctattaagcattggcggggagtgcactgaactggaagtcaagagacctgcctgggtggcctgccgttggctgggtgactttggatgagccttccttttctgggcttcacactatagaatgagctggttgaactggatgatctctgagttcttttccagctctgtaaagattctgtgtactgctattttgaaatgtgttctgattttttgtcttttgatttttttctcctcaggcagatgtttggagcatgggcatactcttatatgtacttatgtgtggctttctaccatttgatgacgataatgtcatggctttgtacaaaaagattatggtgagtattacaaggcatagaatttcattgtgagagtttattatactgcaaactatatgcttctatttataaaagtacagaaacaggcagaagtaatctatgctgttagaagtaaggatagtggttactctttggaggtggatagtgacggaggaggcaatggcaccctactccagtactcttgcctggaaaatcccatggacg

SEQ ID NO: 34199 - DNA, 1274 bp, Bovine  19866880908067
  misc_feature (1)..(1): n is a, c, g, or t
nacttctagtaaaagtcagcctttgcacaggactcgtttttgtttgtttgttttgttttgcctttcttcataaaaagcacaaataatcagttgtaaaaacccttctatctacagagttggtatttttccagacctaagaagaaactaaaagatttgtctttacttttttttttaattcttggcatggcatgaaatttaacttgcatagtagttattagtgctgtttgctaagtactttcggttttcccacctctgggcacaaactgacattgcacttcccagacatcttttagttaggtagggccatgtgactgctttcagccaataagtgagtgctgaaatgatacgttttacttctgcaccaggaccttgaactactactgattcaagagtctccagaactctctttttcctctagcataaccaatttcctcatacattaaccagtgatgcttaggatgaaagttactccatcttcttgtatctctgaatatctacaattaacagagcccttacttctgacccacaatggacatatggcttgaggtagaagtaaaatttgttgttttaagacactgaggtttggggataatttgttacaacagcattatctagcttattctgatgaatacaacttgcatgaagttttcaaagagaggtggctaagcaaaatattaggtagaagcaatgtaaaagaacatattgtttttcttctctaagtgagacaaaggctatatattcccagagaaaccagcagtgaatcagaacttagaatcttactcagatcttgtgtataatcagatccccagtgcccagcacccagcacatagtaggcattcaaacagtatttagttgattcagttaagtcagagttctcctttcaggctctgctttgtaaaatagaagcacagcattttctgtcacttttctccactagcatcacattgcctgcaaatgggagtgacaaaaacaacttgtcctcgagaattgttgggagaaattgagctgatcacaaaacactttgcaaaatgtaaaatcctatctaagtggcaattttctccattgctatgccaattgtaataaatgtttttaaagctggctcctggcttgcttttccatggccaccctgtaaaacactccaacactctgggggttattgtttattctggatttgcgtgtgtgtgcatgacacttgtgtaatactatttttttactgaggagttgagtaaaacccatcttgtagcaataaaacttgagaatgatgtcatacccca

SEQ ID NO: 34200 - DNA, 2843 bp, Bovine  19866880940067
  misc_feature (1)..(1): n is a, c, g, or t
nctgtgtctgactgtttgccatcccacggactgtggcttaccagtctcctctgtccacttcccagacaagaacactagagtgaggtgccatgtccttctccaaggggtcttcctaacccagggattgaacccacatctcctgcattggcaggcagactttttttttttaaccactgaaccactagagatgcccaaagctgggcatacaaagagttaaagaacttatctggggcctcatagctcatccggggagatgagaaatggatggagagacgtccccagccatccaggggttaaggctcctccttccaatgcaggggactcaggtttgatccctggtctgggaactaaagtcccacaagctgtgaggtgcggccaaaaaaaatttttttaaagaaatgaatgcgaatacctgtttcataggtatgaagggctgaatgtcttgagacagggacagaaacaggaaagaggttctgaccagctgggaggttctgaccagctgggaggttctgaccagttgggaggttctaggtttcttggaggagggagtcctagaggtgaacccgaggaccaggcagcgttggaacacatccgcttgtccccgtttggggtttcagtgtccccctcttgctgctgacaagataacttcttactggagggtgaccttttacaggaaattcagaactcaaatcgtcagtgttcagctgcctgcagtgctgagtcctggtggtcacggcctgactgctggtgaaacgcaggcagttgaggcgccacctgcttcctctgcgcactgatcttcagactcatcaggaacagcaagagcttccctctgagtcccaaccttcagcacaggccttgcccacactctgggcacccggattccttggaacctggctcgggggcctgtccagcaaggcttggaagcccaggtccctgcagacttgctagttaatgagttctgcaaaaactaggtctgtctgtaatcgaaatgggagtacaagggtcgtgcagtccctgaattaattcagccctgttagaaaagaagcaaggcagtttcagctgctgcctgcaggatccacagagaggttctgagcaccattacttccatttggggacccgttgtttttcaccacttcagcataatcgggaaaacattctccaagtctattattcttgtctcctgctgccacactgaggcagttgttaacaatgccctctgcccaccccagacccctcctttatttaaataccagtctgatgggcaaagagagcatttaatgactactccaggctaaaaagttcctattattttattcccttcttactttcactcgatttccttccagatggggacaggtgggtataagataaatgaagctggaattacaaatgcaaaaagacagatctagatgtggtgaagaaattggacgtgcctcaaaaatttgtccaggtccttatgggggtgtcctctgtgtgtgtccttggtggccaccagcactaccactctagcctggctatcctctgaatggtctgggaatagggaattagagtgaccgaaactttccctcccattggagtgatcagagtatcaactgaaagggagaaatttactcgggcgtggtgggggcgggggcgggtagggtacttatcctagcagcctacaaccagggcagacaatcctagcctcaggctaccttgatccccaaaccttggacccccagtataatagcacacagcctttgtaccagtcttctctcctgtctttattcaaatgccatctcctctgggaaggctcccttgattacccatcttcagtgctcccttcaaagccctgtttgggtcccacttactggtctatggtgtccttctacattatggggttgtctccacttcccatggctagtgattcttgtacaggggggatttgatgctgctgcttgccatgtgaccttgtgtatatctgtctctggtcctcagcaacatcatttacattgtggggatgctaagacctacttacaaggctgtttaggaggagtaaaccagagcccagcttccctctctgctctggggctctggaaccagactgacccggctttgaatcctggcttcatcattttctgtgtcttcggtcctgttacaatctctctgagcctcaatttcttcatctataaaatgatggcacctaacccctatctcatatacttgtggggaggatgaaaagggataaaacttgcaaagtgcctaccgtaggtctggcacagaataaacattcaaaagctcagccattattgttgctgtctttactaaatttgtgagttggttggggcagcaaagtcagcctataatagtccccaagggccagttagtgttgagtatacaaagaaaaggaaaatgttttcaatctgagctggggagtattgtacaaatgtaatgctccgtgttacacttagtcactcagaagtgattaggacatgatcagagaatatgggcctgagaaggtacctgagggtcccttggtgcccctccccagctgttatagcccccttcagccttccagctctcccaggctctgccagatgcaggtgagcaggaggtgacagaaaatcatgcactgatagccagaaatttaacccagaaggaaagaaaatccatggctgccagctcacaagcagccaggagcaattgctagtgagtcaaggtcgatggccagacagacgggaggaaccaagaggagggttggtatttgctgaggttgctgatttccaggctctagcctgtggtggagcagcggcagcgtgctcatggagactctggccttccttcccggccgagatggtctgggg

SEQ ID NO: 34201 - DNA, 4718 bp, Bovine  19866880957137
  misc_feature (1)..(1): n is a, c, g, or t
ncatttattgaaaggcatttcccagggctgtatcttctatccagatggcttttccacaaaccttcacaaggcttctcctggctggggtctcagatcaaaaagccacctttttagaggctgtacttcatctcccatccctcttgtcactgccccccaaccccagtttccctctcctcctgtcttctttcttctgtgctatgaactcagacccagacaccagcacttctttcactgccagtatgaaattaccttgtatatcttttttctgtgtttgctgtgaattgtctggctctcaccggcaggtaagctcagcgagaggagggactatccaccaaggcctcgatggtactaccagccaagccccgagagatagcctgatatacagtaagtattaatattatgctgcccttccaaggcaaacaacttggaggaaagcttaatggctgaacacctggttacggagtatcatgctgtattatagcttttattgtcacttttccagcaccttttggcagcctagatacatgaggcattctttgtatttttgcttttgttttttattatgatttcactttgagtgaagaaatatttagttgggtctgattgaaccacataaaggctcataaaacacaggtcaaaggaggtgttccccacagagaggtcattcagagcaacgtggcatctcgccagactttttggtacaagagcccaggaacgtattaatagctgccattcattaagtgtttacgtagccaagaatcaggctaagactgcatggaccatgctcacaggcttcttgcagggagtactatcttgggccccattttacagatgggaccttggacacggaggctagtaaccgtgccccaggtcagagaagctggctttcaagagcagacagtctggctttgctgctgacattcccaattaaatgctaaaagatatgccttctggaaatttaaactgggatttttttggttttagtccatcgaaccacatattggcagcaggctgtggaagccatggccttggatgaaccccagttccagctctaactcactggatgtggccttgagcaggtcacctctgccctctggacctgggtctctccagccatgaagtgagcagttgccctgcaggaccctcccacctgcacatctgtggtcaggatgtttgttctgaagaagactagaaaaagccaatattgggtcgcagacctccagatcccttgtcctgcccacacacactcatatggccccttagtggctctcaaatcttttccattcactctccttatatcctcacaatggcctttgtggcaggtgggccaggaattgtcatccccgtttcacagataggaaaactgaggctcaaagaggacaacctatttgctgaaggataggacagttaggtttgatccctgggtggcgaagaccccgggagggggaaatgataaccactccagtattctttcctgggaaatcccatggacagaggagcctggtgggctacagtctatggaactgcaaaagaatcggacacagttcagtgactaaacaataacaggacagtcaggtagtaaagtccaggcttaaacccaggctgactcctgggtctaagtgctctttcctcagccctcagcttctgttcacatgagaaaggcagaagatagacttacaatcctttctttcaagtaccaagtttgggatactgggggtctaaacattgagcctgggggataccagcaaatcagagctggtggtttggtgatttggaacatctgtctgtctttgtgggtgctcatccactggtccctgtatgggctctgctacttagaggggatgcgtcaagggaagccccagaccctagggcctaggtcattcaccaggcaggtgtttctcaaagttgtttaaccagaagacacctctctcagtctcatcctgccattccaaccgcagatgcaaagcgatggtcctcaggggaaggtgccaataaggacgtgggctggccccattcctttgttctctcaggcaaaatgaggaaacactgccaggtcctttgctggcatccgcccgctgtcctccttggcaggtagggacagtggctgttccatcatcaagcctgtgacccaaggacacacctgtagataactagccccaatcaggacccaaactgctgacgatgcaggaatgggcaggtcatgtcactgctttgcaaatggtgagccgtttctgaaacgtggccccagctggtggagcagtttaacttaatattttatacggcataaaatgatggagagacatggactccttctctaatgagatcttccctgggtggcctggagtgtgaggacttgagtggaggagaacagagtccacccacctcctagatcccaggctggccgtccagctgagcacccactgcactctgggccttgtgaggaggggagaaggggagggtgaggctggaagactcagctcttccccgaggagctcagaactgtcaacacatccacgagggcaggtggaattaaattaacaccacgtggtgacatggagtcccaccctaacagctttcaggggcattccttccaggtgttctaacagctctcggtggggcgtcaactttcccctagaggatgttttgaaaatttgtgggggcttttatccgcttgacaggcatgattgatttggtgtggaacagtcccacacaatgaagaatctgcctttcattctgcatgattgtccttcctgcccaacatacatggaggtgagaaatctgcttataattatttaaatctagaatggaacttcatttacatataaatgtggacttgcagtttccatggtcttaatatacactgaattttctaggaatgcaactaccgtgtaaatcgagtaaagctcctactttgttttacttggaactttgccaagagttcctcacctattcgtaaattcctgctcacagtatgtcagacacagtaaatctgtgttcaggtttgttgctgagttcacggtgattctgtgcaccaggcaagccctgggctactcctttatgtcttgcagtttagacatgcaagagtatttacttatcaaagtacatagcaattaattaaaagcaatttcagttgtttctcctttatctaattagttcagttcagtcgctcagttgtgtccagctctttgcgatcccatggactgcagcacgccaggctttcctgtccatcaccaactgctggcgcttgctcaaactcatgtccattaagttggtgatgccatccaatcatctcatcctctattgtcccctcctcctcctgccttcaatctttcccagaatcagggtcttttccaatgagtcagctcttcgcatctggtagccaaagtattggagcttcaccttcagcatctgcccttccaatgaatattcaggactgatttcctttaggatggactggttggatctccttgcagtccacaggactctcaagaggcttctccaacaccacagttcaaaagcatcaattctctggcactcagacttcttatggtccaactctcatatcctttatctaatagttgagcattatttttattttatttgaaataaaataaagataggctatattttttatgaacttaatttcaggagagtaaaggggcaccatgaatatttgctactgtcaggggacaccgggtgggactgagcagagaaccccggtctcagcacagcaccacagtgcccactgagcaggagaaggggccgagcagcgccccctccaatcatcatacataggcatctgctctgcatacgtgtgtccatgcctttgtgtgtgtgtcctttatatttttccactaatgggatcatactaaacacattattctgcaaaattgtttatttacttaaacgtatatcttgaatacattcatgtcagcacagatagctgtacttaattctttttaatgttgcagagtagtttattgtgtgaaggagccataatttattaaaccaccctcctagtgataaacactgagttttttccatttgtttttcatgataaataactctgtcattattatatagatttaggcatcactgtgtatctgtgtgaaaatatctgtgaaataaagttcttaaagtgaatataaaagttctggattagatggcaggtatgtccacttaaaattttgaaagttattgacaagtttctttccaaaaaacactgcactgatttatatgcctataacagtgtatgaaaatatctatttccgaaacctctccagttgggcctcaagaaacatttcagtctttgataagctgataggttttattagagtctcatgtttattttaatttgtagctttaaagttatgaatacagtgcatatcttcttatatgccatgggacatctgcatttttcctgttcatttgctttacccatttttttctattgatttttttctcttttgtttctaaaaacctcttaatatatattaaggaaattagctttttgtcacctgtgtttcacttaaaaattttttattctttgtcttttgaatgtttttacatacatatgaaacatttatattttaagcagtaatttatatgatttttctttgtcttttgtatttggaacaaattttaaaaggcctttcccactctaaggttattaaaatatttcccttgtgtttttttcctagcttcattatggcctcatt

SEQ ID NO: 34202 - DNA, 1657 bp, Bovine  19866880976072
  misc_feature (1)..(1): n is a, c, g, or t
natggtcataagtgcatgaaaaggtgctcagtgcaattagtcatcagcaaaatgcaaattaaaaccagtgatataccactacacacaattgagtgattaactacaaagactgacaagcatgtaaagcagctagaattttcatacttggctggtgagagcagaagatgatgtaactacttctggaaacagtttgacagtttcttagaaagttataacccaacagtgccattcatagccaggggaaagagacatgaaaactagaagcaaccttaatgtcgctaaaccagtgaatgaatgaataaaccagcatttctcaaagtgtgttctgttttcccaaaaccccatgagattaaaactatttttataataataccaagacattatttgcctttttcactcacaagagtgaatagtgaagttttccagctgctttaaggcgtgatatagcaacagattgaatgcaggggcacatatgaaagtgcagctgtctttttaaagccagacattaaaagagatttacaaaactgcaacagacctacccttctcttccttttgttaacgtgaagtgggtttatcattttaaatggattaataagtactttaaaaatctctcagttttgatttataatatgataatgggatattggtgtatatagtctacataaacaaaagctttttgagaactctttagtttcaaaagtgtaaatgggtcctgagatcaaaaagtttgggaaccactgggataaacaaattatgatacatttattaataaaatatgactgaacaataaaaagaataagcaatttatatgcataacatgagtacatctcaagattctttagctcaagacactagacccagaagactacatacagtatgattccatttgagaattaatctctggtgatctgaatatgagtggtggtggcctctggggtgcagtagcagggaagggcattgactagatggggacacaagggaactttttaacaggatagaaatgctgctcattgatttggatatgcccatatgaatgtatatgtttgtcaaattgaactaaccataagatctataaattttatttttataaattatacctcagtttttaaaacttgaacttatttattttatgagatgaaagaaatagtatggtctgagatgatagtctacagtgttttgaagtttttaagtgcctcacaaaaatctgtattttaaagaaaaatttcaatcagagtcttagtgctgatgtctactttgaatcttcatacattcaaagctgacattctttgatgggttgtatgcactttcttctttaaaaaaatatattttcctgatacactggcatgtcaagattttacacgtagcttctttctagaaaataattgcctcttgattccttctggccttttttctcttcaggccaacagaacttttcaggagttgcaatgctcagtcagatcaaggagccatgaatgacatgaagctgtgggaaaaaggaagcataaagatgccatttatcagcatacctgttcttgacattaaaaagtgccaaccagaaatgtggaaagcaatagcttgttcgttgcagattaagccttgtcatagtaaatcacggggcagtattatttgcgagtaagtttctttcatcataatgact

SEQ ID NO: 34203 - DNA, 1004 bp, Bovine  19866881041532
  misc_feature (1)..(1): n is a, c, g, or t
nctgtttggggcaactctttgggaaaacttcagcagccatcctctcattagcctgcagaggaagctcagcaggttagtcttcactcaccaggaccagccagcaagtgccggggaagtcactactctcaggcccctgcgtctcacccagcggatgggagctctcagcacgcaggagtcaagtctgagccacctgtgcctgtgaggtctccagcccagggcttgtcacatacggggcaccaggaaacagtcgcatgaatcgaatctggtactcaggggaaaccttatccaggccctgagagcctctccctgggcagagcctttctggtccctccgttctctgcagccacaggcagtgactgcttctcagcccaggttagagcaggcggatgctagcaagggatcatcctgctttcttccctctcttgcaaatgacgcagctgtgagtctgtccagtgaaacacttcttcatctccagactcttggattcaattctaaaagcatgacagggcaatgtgacaagagggctgacggtgggggacacgccagtgccatcatcaccgggtttatggccatacgatgcttacgtatttccacctgcatcctgactcacaggataatgacccaagaccacctcaagtggctcaggagatcatcacaccaccctgtgtgaagagccccaggtaagcacagcaccactcagcaatggcagagcaaccagacacagaacacccccgctgggcccaagagaccaggcatcggggccagcaatcgcaagagccccagatgcgtcctccagacatcctggaggccgccactggccaggtatggctctgagtaaaacctggcactctcacccacaccccgccagatgcctttgagtgcgtcacctaggcctgcatacgggtggcggatgttggaggcagcaagtcggggtcatacctgctcgggcttgatgggctctgcggtgtaagatgtccgagtagtgctcctctcaaacacgcggt

SEQ ID NO: 34204 - DNA, 1865 bp, Bovine  19866881056208
  misc_feature (1)..(1): n is a, c, g, or t
ncaggagaccttttttaaacgagtgcaggctacctggttgcagagcaaggtcactgcacaagccagggtgtacagggaaggaacacaggacggggaggcagatggcctgagctcaaagcctcctggttgggagctactgtacagccttgggcaagacgttcccgtgcaaattagtttcttcatctatgaaagggatgacacgttctgtctgtatgattactgacaagcttattaataaggtttcaatagtacatggcacataaagcaacttaccttagcaatagtatccaatttttctttgtcaaacaaaactcttaacattccagcacataatgggcaacaagcacctgtataacagaaaccattctgtttgtgttcagaattagaaataaagaaaattcaaaacagttggtgaaattaccagcccttcattttgtgctgggaaagttaccgaagtccttcctgatgactgcactttcagatatgttccctgatcaacctggagtctaatgatctacacatttaccaaaatccttcctccattcctgctttcctcctgtaccacttctcaggtggggcagctgtggcttcatatagcacagggagagctggcctttccagagacacggggcctagaccctgccctactcagaactgtgtcatcccaggcaagtgtttcctgtcggcaaaacacaggagcaagtgtttcagagattccatgggtgtttgattcaaactgaattttaaaagttatttaaactgttaaaaaaacaataataacatgtcaaaccatggtctccaggaggaaggaggctatgttagctcactgctgtgcccccagcacctagacacttgtctaggacatagtagatgctcaagaaacatttgctaagttcctggacaaaggaatgaatttgttagactccaggtaatctgttctgtgcagacttgggataaagcctcttctgctacctctgcttaactgaagagtatgaaactgaaaggtaagctgtttgaaaactgttactgcttataatagcctgtttgaaacaagacttcttgattatatgcaactgaaacaattaaattagacgctaaggccagtctaaggcaacaactatcttgtttttctcaatttaaaatgtttgtgttcatcaaaaatacttcaattgttcattaatgtccaattctttattcattaactttataacaggcaaacattatgcctttgaactaataaccataattctagcagttaaatattgctgtttatctattggtgcttgaggtaagactgaaataagttttccatattgttttaaaaccactagactagatgatgtctaagatagatccactactttttaaggtctgcccagagaaatgcatccaatcagcattaggtagagtcaagactttctgagaagtttaaacacacttaagtcagctttatttttagtgactcactctctgaagacagataagtaaaatccacccaatcctgcccctaccccacccccagcattgccagcctaccaggtgggatgatgggtttgcactcagtcacccgagagtgaaggacacttcacagcagcacactcagccacagaactgtactcggagaggactccgacagccttggcagggcccatagtaatcgatggccacccggtccgagtaggcagcacacacgctgctataggtcttccccgttgtgcccacagacgagctccggggccctgcaaaaaggctgagggcaagaaagcatacttagctgtaaacttctatggcacacttttcctaaccaagaaataggtctccctactttcaagaaggagaaaagacagtataaatttttggacact

SEQ ID NO: 34205 - DNA, 860 bp, Bovine  19866881072886
  misc_feature (1)..(1): n is a, c, g, or t
ntttgtgtttccctgatatatttgtaagaccatttttatgcaccaggaataaaatggttccccatcatcaatagggttcctcactttgatgatgaggaagctgaggttcagtgagggtaagtgacttgcccaaggtcactttggcaaatcagtgctggaacggagtcctccaccttgagcttagcagtcactctttagtactgtgcccactatgtcacgctgatagatgaccctctcctatggttctgggggaagaaaatcaggcctgccttttttcaatttagtcttgattcttaaaataatctatcctctaacacagtcgtgttagcagagaaaatatgttccaccacttaccgctaaaggagtagagatccgcagtgggctatgaccctttaagagcgtgccctccatcctgataaatcaggtcctggaaggctatgtgggatattagcactgacgtgtgtgagaacagttagcacagttattaacaggacaccatggctggagacagctggctcagcatgcacctgaggtcctagaaaccccagtcacgggctgtcttctgagagttgcctggactgggagactgtctgcccacccagccatgtcccccaggatggctctacagttcccatctatccaccctgttctgctctgttcatcttgtggccacttgcaaagcctggggttagaaagagctgagtcccaaacctggctctgccatgagcttatttggtgccttcagaagccccttgcttcactttgtccctctccagccaacggcctttctgagtcttggttagcctactctctccatctctccactcctgtccaccctggccttttctgctggccacctg

SEQ ID NO: 34206 - DNA, 918 bp, Bovine  19866881106324
  misc_feature (1)..(1): n is a, c, g, or t
ntggttagggcagtcagaagccccacccagactcaaggaacaggaacacagacacagtcacattgcatgcagagaatgtacaataggatataaatacactgatgcagccatctttgagaaaaacaatctgctacactctttagcttttgtgttgtagaaaatccgagactaactggcttaagcaatgtagaaatttattgagtcacatatgtgaaaactccaggggtgggcctgactccagataaggcttgactaaatcttaagctgtcatcggaacctggtttctctttcttcatctctgggctcagcatcttctgtactagcttttgtctcagaagctccccctcataatgacaagatgttgccacatatcctccatccacatatcctctcttgctcaactacttcaggaaaagaaaagtctgcttttctgatatttcacacaaatacccaggaaattgagtttctttagctctaattgtcctaaggacttggcttgtgcccatccctcaacaatttaccgttgtcaaggaaatgttctgtatgaaccagctcagacttgaatcacacatccacctctggagctaggggcaaggtcagcatcacccaaagtcacacgtcttctgcaacagagattaaatcatccttacccctggagttttcacatatgtgagtcaatacatctcttctttgtttaagccagttaatcttgggttttttgtaacatgaaactgatagagtctgcagcagactgttttttccaaagagggctgcgtccatctatttatctcattgcacactctcctcttgcaatgtcactgatacaccacccactgaaaagtgaggttttacttctcagacatcaggagtttatatttctcacatcataaaaaccctagagtcatgacttgcctggtg

SEQ ID NO: 34207 - DNA, 1958 bp, Bovine  19866881114185
  misc_feature (1)..(1): n is a, c, g, or t
ntgagttttgaactttcagggtatggcctccagtcaactagcagagacctgcatcagtgtaagactgaattcacatccctcccctttttttcttccttccattttcttatctactcccttccctctaaacataccatgtcttcagagaagtaaaactaatgtgggcctaaattatatctatttaattcaggtaacattatttttgctactgtataagaaaactagtatttatactgcaaactgctataatgatagcagattttacttggcttgtggaagtagaattggttctaaatattcttaagtctcctgtttatcctctagagttgggaaatatagaataaggacatgtgactggagttatccagctgctgctaaaagaggtatatgattagttaaatgtggaagggaacctccccatctgtggataaagaaggaaactagaccccaatcagacacctgattgtccttctgaatgtgactaaatagaactggagctatatcaaactgtggtcctgaacttttctgaggaaacaaggaattgcctagatagtgggaggaagtttatcagtaaattttataggatagcaacaaattgggggcattgtcttaccagcatagtcttctttgggcaatgctacttcctgctgtgtagtacatttacgttatctagtgagcttggtaagacactgatgctgaggatatttcaaatgagaagcagcatacagaatgtcttacaatgtgaccttgtaatacatttaattaacatccagttctgctcccttgcagaggcttctgggagcaccaacagagacattcattcccaaaggcagtaagagattgatctgatcatctccttggtccacagcagatatactgaaaggatagatccactggtgagacaagcccatgaaggtgcagtgagggcgtttctgatttatcccacacagcacagaaatagaaaccaaaatatgaacaaaaaagtgaggaacactagtcttagcaaaactccaggcacctgtgatgctgccctaccttccccctttccctttccattaccaaagagaaacagcgatggtgaagctcaatagttactcatcctaggaatgagagaggccggatcactcccctgggatgccctccgttgaagtctccctttccctactggtctttcggtgagggccacttcttttactgctatagcattcggtgtatactctccttttagtgtaagtctcttaagccactactttgagaaggtgaaggaagaggaagcctttggactctgaaagaggggtgataagacataacacatttcctttttcactgaactgccccagtaaattgagttgtacgaacagaaacaacttgaaattcttctttgaatgtgtttctcggagacggccaaggtcgtgcaaacgtggaatgggaattcacatctatccctgcctcctaggtggcaagcgcttccactgcacacctcatcgataacccggaggcgggtacgatcactatccccacttacagcggagaaaaacgcgggtcggaaaggttaattatctcatccagggagccgaactcttaagactggggctccaggaagttccgcaaaactccggtgagccagcagcacactgggcccaagccgctgtcccccacactgcgcactgccgggacctcggccctcacccacgccggacagactgacctgagggcggagggctgggagggactgaacccgggcgaaagacagacgcactggactgcaatcccgaagaaagcgacgagtgcagaaagttcctaagaatctttgggatggtcaggttctggccgcttccgcccgccaagggaatcaaacctcgcgcgccggaaggggcgggggtgcggcgggggcggggctcatcggggacggtgcggtccctgcgaggcggggcggggtcgctcgccggccgacaggg

SEQ ID NO: 34208 - DNA, 698 bp, Bovine  19866881178983
  misc_feature (1)..(1): n is a, c, g, or t
nattgatggttgtttgcagagcagttgatcagggaggagtgggaataagagagaggatgatgtcatagaatggatgaggtcatcacaatgcaggccccctccctgaggcctttctcagaggcacagggcttttctcccctctgatggctctgatctgccaaggccagataccctgccaggacctagtccagggcccagaactcaggaggaaactcagagatgggtcacaactcccacctgggaccttcaacctcacttcaagggccgcttctggaatgtcagggccagtctgggcagggctagtatggggagggctattaggaaggctggggtaaggatttttacatcatctagaggaatgtacattgcacaggagggaaaccgaggcccatagaagagcatgaacttgcccaagatcacgtagctagttggaagcagagcagggcctgaaacccagtccttctggaacccaccctcccgggatgctcctaactactcagctttcctctgtctctgattctcaagccccaaagcacctttcactgccaaggctcctggatattagagaagaaaaagctctgtcctttggtttctgacctttacggctacagacatcattcttcacattgggctggcccaaaaggtcgttcggattccgaatgaactctttgacccacccaattaaacgggagaggtgg

SEQ ID NO: 34209 - DNA, 1467 bp, Bovine  19866881215523
  misc_feature (1)..(1): n is a, c, g, or t
ntgaattttagcaaactctggaagatagtgacggacagggaagcctggtgtgctgtagtccatgaggtcgcaaagagttggacaggacttagtgactgaacaatgacgaagaagagccactaataaattagcaaaaatatttaaatggaacagtcaacagagagaagattttaagaaagaatcttttgcaacagtaattttacttttcattatctctaagtgttggcaagcactacttatgtgaatcctggctttcttcttcaaatgtcattagaacacatctaaccctgacttgctcttcatgcttggggtttattcacagttgcagaacctctcaccaaatctatatgagaaagctttcaattatttttcctttagcatataatctgccggatcactaactggctattaactaataatctgttccttgaacttccttatccacccaaaggtctgccttgatcccttatttttctttttatcttacctgtttttactttctttgtgacaaagcagagtaacgaacttttcagtggaatggtgtcactaatctctgtcatattccattgctatctttgtccaatgaggaagaatcaacgttttatctttgatgtgactgcattgctctgtgcttcatcttcccatcaggaaccttaactacagggtataccttatggcatttctggtatctactgcttatttttaatagatcaagccccagaggacacaagtaagaaaaagagcgatatattttataactctgccctaaagtgttataatgatcataacctcttattactattagaaaatagggcttcccttgtggctcagctggtaaagaatctgcctgcaaagtgggagacctgggttcgacccactggagaagggaaaggctacccactccagtattctggcctagagaattccatggactatatagtccatggggttgcaaagagttggacacaactgaacgactttcacattcactattagaaaaacctcaaaaacgtgtttcttactaacaggttggtggcttcagcttaatttatatgaaagacagaagttctgatgaagtgcacaaaataaaatattcttcatcttccctctgctttcttttgttgtgaacattgtggaaatggcctgatgttcacaggttataccattgaaagagttgcataaaggatgccaaaagatttcttaagcatgaatggcttgtatagctatgaataaagcacttttctttggagcaagggagaattctgataaagccttttcagctttttttttttttttaaagattctggttcagcttttgggaaaacactagtcatactccatcactaatgcatagctaggtcatctggaaactataagcagtactgcattgcttaatatgaaatcagggttcattttccccactggcctcctagaggcttagaaatctcttgtattatacagaatatt

SEQ ID NO: 34210 - DNA, 1094 bp, Bovine  19866881226459
  misc_feature (1)..(1): n is a, c, g, or t
nagaaaagtgaaaggtatttttttttttatttatagtcctaatttaacttaaactttactttgctctaacttaaaaatcaggcctttaatgtactttgctcccacgagagactagagattttctttgtccagttattatccctaccactgttccacatgaagtaaagtaaatccttctcacatcccctttgagatactgtcaggtactttcaactaattctgacaccaaaattgagtgtgatttcctagttccggttatggttctcatcattataaaacctagtagccatatgaaaaggagaacctgtgcagccgtatcctgtcctcaaagtcactgccttaatgcattgtttgctcgcagctttgctccaagttgtttccctcccaactctttctacttttcctttccctttttactccatccattccaaacaatcaccttaccttttccatttttttccctaaaacaccccctctacttcatattttagctgaaactagtctcttttgtgaggactcatttctcctatagccttctctaggagtaaagaaatgattggcttttcttgcttcaagcgtggaattggatatgtgacgagtaagtaggatggtcacagaggtgaaggcaagtgttgacactctcctggatccttgcttttaaccatcagtctttgaacaaaaagttcatcctatttttgatcttttttgtccttgatcttcactacttaaccgagtttgtatcactatccttgtttattactttttactctgctctttttttgctcatttttctagtcagaatatttcaagttttgcgtgctttttaatttttaaaattatgaaatatttcacatgcatgttgtaaagcatgaagatgtatgtataatttttaaaaatctaccatccagcttaagaaatcaactattaccaatattttggaacatttctataaaaatgatggttttgtttttcttgctttgaaatttttttttttcaaaaatggtttaagaagcacatttacatgtctataaaaataagcctatatttaaaattagcatcaaggtgtttcttgtaattttttaataaaattaagg

SEQ ID NO: 34211 - DNA, 877 bp, Bovine  19866881331795
  misc_feature (1)..(1): n is a, c, g, or t
ntttcttgaataaaaaataatatcaaaccagtgttaatgttcagtttttatctggcggcttattacatggaatgtgtttagtttgtaaaatttcatattgtacacttaaaaatatgtgcactttttgtgtttatattgcaagtacaatatgtttctgaaataatgcttaagatgatagctggggaaaatgtaactagaaatataaatacttgtagtaataggaaatataattttgacaatttatacacttattaagccactcatagattttgtggttttttgaccaatattgagaattttatagtttcatatatagttgaatagttctgtgttcatagaatcatttaaccctaaattatccctttttaggattttcttctatgttctcttgagatgaagttgcagcaagaagctgtaggaagcattttctcttgggtttttaagatcacttttctatgggtaaagatgaccattctggatttctgggtctctgctataggggagcattatcttttctaatacttagtattttcagtttctgcggataaatacccagaagtggaatttctggatggtatggtagttttaattttttgagaaacctccttaccgttttctatagtggctatgtcagtttatattctcaccaacaatacacaaagtttcttttttctccaagtcctcaccaacagctgttatttgttatctttttgacagcacatgctaaccattttgacagatgtgaggtgatattttattgtggttttgattttaatttccttgatgattggtgacattcagcatcttttcacatgcttgttggccatctgtatgtcttcttggaaaaatgtccatttaggatctcttgccatttaaa

SEQ ID NO: 34212 - DNA, 1291 bp, Bovine  19866881370369
  misc_feature (1)..(1): n is a, c, g, or t
ntttgttgggaagccctgaagaaaatgaagggtatgttttaaacatagatttggcctggaactggaaaggataagagtcttcctgtctttccaccagttttatacctctaacaactggctttctcacttccatatatttccaactcataactgggcttacacatagctttgacttgccatggtcttaattcaaactcatggcatccttattttttcagttccactggtcaattctctctgtatttcttagctcaaattcctggtccatggccaggctagggattggctgccatgaatcacatgtccactctagtcctgtcagctatgtgacagtaggtcacgtgactcaaaacaagtctacaggggaggggttggaggtattcagaatcttgagttacctaagatgggaactcagagttattgattaccttagttactggttaagaatcaggcatgagcaacttccctggtggttaagacttcaccttccaatgcaggggatgtgggtttgatccctggtcagggaactaacatcccatatgccttggggccaaaaacataaaacaaaaaacccagaagcaatattataacaaacttgataaaagattttaaaaatagttcataccaaagaaaaccttaagaatcaggcatgaatcatatgggagtaagatattacactaaagattttattgctgtccctgggtgagatgaagggcacagcagaagcctgtgttcacaacagagaccttcaggaagcacgtctcaaagactggcccgcacagactcccagccctgctatctcactacctggagatgtcatgatttcagggactcacagcttggcctttcccacctggaccacatggagtcctgattttagaggactttgtatagtttgaggcaaaatgcagagctaagttagcgcctctaagcccccgcatgggatatctctttggaacacttgggcctgtgacacattcctggaggagcagcagcgcagctgcagtcacagctgccaggaacaggctggggctcccaccctgtgtgggggggagggcacaggctggagggcttcctctggggactctgagtgagctcaccctcacccccgtgctcactgacttcatcatccaaggctgcttggccaagagcccaggcagagtgaggggctttctcccagaacaggccccgggccaccaggcagagtgggggatggggtgagttgcaggcctagcgctgctccccagaaaccaaggtggtggtggaggggcggcataaagagctctgaaat

SEQ ID NO: 34213 - DNA, 609 bp, Bovine  19866881398277
  misc_feature (1)..(1): n is a, c, g, or t
ntccccatattgccactacccttgtggccagcccagtttccactggctgtgtgattgtgtgtcgaggtggttgaagacgatatgaggcagaggggctgatttccagaccatttcggaagacgcttcagccaagtctgtgaattgaccatgcagctgaagtaatcacccttctatgggccaggctaatgtactcctctcttgctgcttggatcaataccatacttactgcagattagctaaatgagccagcgcagctgggaatgagcttctagagacaattactatgggaaatgcagccatattttagtgggcaccacatgcaggaagctctctgcaaatatcaatatgtatttgcttgcttgacaaaaacagatcaaacctaagtcaggagattaatccaaatgattggactgtaaatgatccctgtgtgaagtgtggtgaaaccttgacctttttgatggtggctgttgttcagatagtgctggaaataaccagcctggcaagactgactggtggttggcttgtgctgtcctctgccaagtttatctcagtagaaacatggatgatactgatgatggtagccattcatatttgcatagtgtgatctta

SEQ ID NO: 34214 - DNA, 1431 bp, Bovine  19866881402808
  misc_feature (1)..(1): n is a, c, g, or t
nagacactgctcagaggccctcagggcaccctctgccaccctgcccttccccgggaccctccaaacacctcaaatccagcataagtttctggagaagaaggactgataatacctgctgttgtttccccatccattcgacagcccttccctgagcacctactatgtgctgaggctgctgaggtctgtctgggtacaggctgccttacaaggtgccagttggtggaggtgagtcagcccaatgcctttcatccagatagcatccaggatggagaccagccatgtcagtcccaaccccagtgcttggtcctgatcgatgcatcagccttgcggcctgttttctaaactgggtgccgaatctgacctcctttggtcaggtggcctgcctgcccctgacacagcagcttggtaaggagcagcgtggcccagtggtcactgtgacctctggaatctgacagtttgtgtttgaaatctggctccattacttaggatatatgtgaccttgagtaaactcctgtgcttctctatggctcagtttttgcatcagtaaaatagggataacaaaacttctcatggagttgttttatagacaagtcaagttaaggtatgtaaagtgcttagaataatgcccattgcctagtgagtgggaagcaagtaccagtggtcattcctgctagtgactcttgacttagtggatcttatccaggattgagatcagctctggaggaggagctcttaccttagtctgcactccagatgccaacccctcaaacagggctacagaccaccctatccttgaagtgggcatgtgacagaaggagccaatgggtctggaaaggcaaacagttctccggatgggcaagttcagatgggcaggcaggtgcccctaaggatttgtgccaaaaccagccttaccaaacatttatagaagacataagggtgggagtagaagttccatagcctctcaggtaatgaaaataaaagctaatagagagaaattaagagatattttttctgggctgtgaacactggcagataaaaagggctgcaaaccatctgaagctaatgcatttgcagggaaataataattgtaataatatcttgcattcaaatgccccttttgctcctcaaagatgtgtgtgtgtgtgtgtgtgtgtgtgtgtgaattatgtcaataaccttgatagtaatatagatggatagggtttggggtgattgtgtgagtgctcagttgcttcagtcctgtccgactctttgcaaccccatggtgtaacacaccagactcctctgtccatgggattttcccagttagaatactggagtgggttgccatgccctccttcaggggatcttcccaacccagggtttgaaccagagtctcctgcgtctcctgcattgcaggcagattctttaccgctagccaccggagaagcc

SEQ ID NO: 34215 - DNA, 830 bp, Bovine  19866881422482
  misc_feature (1)..(1): n is a, c, g, or t
nacagccaccggcagagtgtagagatcaacctgcagaaggtaaaggccaacaagacaaccaccttcagtgcctcttttgcccaacaactgcccccttggatgtgtcccatgctatatgctctgttggagacaacaaagtatttgtgtgcggaggtgtcaccacaaccaccgatgtccagacaaaggactataccatcaatccaaatgcctaccttctggaccaaaaggcaggcgagtggaagaccctggcccccccaccggaagcattggactgtcctgcctgctgtctagccaagctaccttgcaagattcttcaaaggatttaaacaactttttaagtgggagaataagtaaatgcattattattcacaatttaatgagagagaaatagagaggaaggtgtcggttcctttttagtctctgtttggccctgaaggtggagatgctgggctctggctactcccagtgtggggagattcagggctgccctgttactgaagggatccaagctgaggctgaaaaagtctctggtgggtgggattgaggcatatctcaggcactggctcccagtcggtgaagattcagggctactccatcattgaagggatccaaggagaggctggaaggggatcctgggtgggtgaaatcaaggcatctcccaggccccggccaaggtgatgtctgaaaggccccctatcctatacccttgaggtcaccttgaagacacatgctagactgacaggtaaagcacctgcttagagttgtgaagcctcaggctcctccaacactcatttctgagtctgcccaggaaggcaggggagggccaatcc

SEQ ID NO: 34216 - DNA, 1095 bp, Bovine  19866881769649
  misc_feature (1)..(1): n is a, c, g, or t
ntctagaaaggtggtatggtgttattttgaactgggatggtacacagttgaacgtatttaaaaatgcgctgagacgaacatttaatacgtgcacattttatcccatgtgagttatttctcatcgggaaaaaaagaaacaatatagaattgtgattggttaaagactagttggggagttaacttcacagtcctgactcttctgcatgataattgtgatgttactgccatggtttctggagcctggggttgggccttaggggtttgaggaatgacagggtgcaggccttaaagcaaccagttcagtttagtcgctcagtcgtgtccgagtctttgcgacccatggactgtagcacaccaggcttccctgtccatcaccagctcctggagactgctcaaactcatgtccattgagtcagtgatgtcatccaaccatctcatcctctgttgtccccttctcctcctggtaatatagacagtcacagacttggtatcaggagccctgagtttggatcttaacactctgctcagtatctaacccaggaggaagcactggtgtgtggtaattggtcctgaggtgagttacaaattattcattggtaattataaatcactgaagcttttagtaattttctcttaattcatttgaattcataatacatgcatttggttaaaaaacaaattaaattttatagaagagtatacagtaaaaagtccattttcctctcatccctgagtccaaacactggtccctcattcctcctcttgagagacaactactgtcatcagttttttaaatacccttccagagatagcctatgcatattcatgaatgatttccttgaagaaaattagagcagtttcaaggtatccgtgtaataatgttgctttgcatactgaatattttcaaaatgaaattatgttttcattataaaaataatacaaaattatttaaaaattatataaagtaaaagtgaatgctccctccatccactctgcccatattttactcctcaattacagaattaaccaccgtgaactctctcctataggactcactgataactgatacatggtaaacatacatagactattaca

SEQ ID NO: 34217 - DNA, 920 bp, Bovine  19866881915709
  misc_feature (1)..(1): n is a, c, g, or t
ntgctgtgacagctcgagttccttagacctggtgtgctttgatgtgggatcacttttcttttttgttgaatgagaaaaaaattaatataacaggtgtccagaatacttgcagtataaatgaagatttgatttttgtataaaaaataatgctgtagaacaggaattgacctgcatttagttgctctgaaaagaatacatagctgtgtggatttctttgtttttttaataggttccttgagcataattcagatcgtttcaagtcatttttctagcagtgtttgaattcccctctcattcttctagtgtcttcaccattgtctgcctcttcgtgcagttgctgtccttcttctggttgcagtggcacaagctgcagttctccagtcaggactgtgatgacttgctgccaacctcagctttcgtttggctgtgtccgttttctactcagtgttaactacttgttactgccatgctacttgccttcccttgaagactataagcttatcacagcttagagttcagtaaagtcaattcacacagaagcacaattttgcccttttccagacactgttgcctctatctagtcctacaagtaggattttgcatactttgtttgcccctgtatttgtcagtgcatcagaaatacatctaaacagtggtgaaatgcacatgttacttttaaatcattagagtattccctacctgttcctaatgaataaagtgtgttaaagaccaaaattactggcgtaataatcaactacattacaaatcacgtatagtttaatctttattttttttaattaaaaaaatcatgtttaaaatggcaaaagcccatcttatacatagactcttttatatagctgcaaaaaatttatatctgtacagatctaacataacattactacactcagtattcattttat

SEQ ID NO: 34218 - DNA, 1966 bp, Bovine  19866880487744
  misc_feature (1)..(1): n is a, c, g, or t
naatgttcttgcaaaactcatttttattgtcatgggtgtgttccctcctttatgaaaggagctcagttatttccccttgtacttatccaactcttcttcatttatgggaatagtctggttcacgatttaactttggattatgaataattactctacctacttctcttacctcattttacagagaaggaaacaggtaagtgttaggtgacaagaccaagcaatgatgaggatgatcaataaaagaaaaggttgcttttcagaaggactgaccttgtggctagcctgaataggtcatccactgtgtcagggtgattctggagtccattctgctgttctaagagctgaaaggtggggatgcacagtgcctaaaacagaaacgattttaaaacaaatgcttgtaaataaatgccatgggattcagacttgctaaatatcacaacatacacagagaacaaagaggtaaagcacagataagaaaaagactgtgatgagattcagatcaagaaagggaagacaaaaatccttctcagttgacataaacagtcttcacatatgaggcctacatttcagaaagggtttagggtacagacttctgttgatgaaattggatagatgtcatctcaaagttttagaagtttctgaaagtgacaactgtgcttatatactagatatgatctggtcaactaagagagtagctgacattttaataataataattatgaaatggcaattttaaagggaaagacatcttgggaaaaggagcaccatgatttaactccctaatatattttcccctctttgactaggagacggtaaaagcagtatatgagaagccttttccaatgcctgctatttaccctaaggtgagaccatccctgctaagtaaactagttcactggctgttcaggcaagacattaaaaatacaatcatgcttgagctaagagatcctttattttaaatccacttgcccaccttcccaaaaaatcctatctctgaagaacataaattagacagcaataactgtaatgaccagcatatttgtgtggtcaatctctctctcattcttccaagcaggcctgtccacagaataactaggaagatctacctccatattaggaaatcattatgcttgaaaagcaaactaaaagcaacagaattaaagacatggtgaagaacacactgctaggccttcagaccctccaagagaacatacctggagcatgtctagtagtccctgccgacagccctcttccatgccatattcatccacaaggatactaccaaggtacaggaaacaggaatgctgatgtacctggtaaacatttaccatctgccaagggaaaaaccaattagttcaattattcatctctcaaagagtgtcagcttaggtagctgtctgagggaagaaattctgagatagattggtctcttctctttaagacaacgtaataaagcttgttggaaacattttctaaaccatagggctcaataatttgcaagtactctatttagagttctttcaagccttcaacctttcaccttttcaaaacaatgctgtaggagagttgtataatactacagactggaaccattcataagttattatctgaggcttctgttatatttgcaatgccctaataaagtatatctaaacttttctttttttttttttttaaagtatacctaaactttctaaccaacaggttgctcttatatgcattaaagatgattctttaaaaaaaaaaaaaaaatcacagtaggaacaaagtatcaaatgcccctcattttaaaggagacagaaggcattgtttaaattggtttataaactcttttatttaatcttttgggtaaagaacagggtttctaatcaagattatctagacctctagagaataaaaattttaatacaatctaagtatttaaaatatttgtttagaatttttacccttctatcctacaaaaatt

SEQ ID NO: 34219 - DNA, 1718 bp, Bovine  19866880584961
  misc_feature (1)..(1): n is a, c, g, or t
ngcctctccttaaatgttcctttttgccatttttctccttagtccctctgttttgattcaagccttagaccttcctccttagtgcatttcctgacttggacctgctagcctggccctgctgttccaaatggtggtttgggtctgaggctacacaagtttcctgcgggaggtggtaagacaaggtgcatgtggtagggggagtttctcttgctgagtttcagaaataaggctttctattgtctcagccctacaaacactggctcaatttcttttgcatatcatactcccttgaaatagagtatcttgttagtacttattatatatgccaaagagaggagacacaggctcaagctacaggtaaatcagaggttccaggctcaaagcataggtaaaatcaagggttcacaaattatagatgaagagagtcactaaggagggtctgctagagagaccatggactggtctctatttaaaatgcacgatattgcatattcaataaaagccagactatacatatttcagaaaaggtacccaaccttccaattggaaagcttttctggacatcttgctttgatttaggctgtcctaggggagggtatttttcttcaatgaagcagttttcagactgaaatggttggaggcctaaaaagtaagttcctcgatcatcattggtcttgccaaggatgagttatgtcctaattcttgatgatttcagtatccacatagatgatccttcccataccctagtcactgtccttgtccttcaccctcctcagccactgaccctccctccgcgatttaccctagagtttgccattaataactgcacccaccccatcatttctactctcctactatatactatctcctatctttccctgagtccgatactcctccgaccccaccaatcctgcaatttcttgctccttctgggttttcatcatcccttcctgtcctcacatcctcattcccttctcctccagcctagattccacgatccatcctgaatgccatcactctcttgcaagtaccctcagcgcctttgcacctcttccgctttattaactgaccgggtcgaactccccaccatgacgctaaactattttttggctgcgctaggtcttagttgcaggacctgggatcttcgatattagttgaggcatgcaggatctttatttttcttcgttcagactcttagttgcaggatctagttccctaacaaggggttgaacccagggcccctgcattaggatcacgcagtcttagccattggaccactagggagttccccacgccactaaacttgcctagagaaaaaatcacatgccatactacccagtttcacctcaacattatctcagttctcaagagggtccttaatattgcctggagctcatactatgtttccctcatcggctctttctgctgaatggctatttcacatcttctcctttgggtgggaggcttcccccagtgcctcctgatgacccagcttcctatttcactgggaacatagtagcaattgaaagaaaactccaagttctcactgaccacccctaccactcacctagaaccagaccagtagatctagattctctccttgttaatctaaaagaactgcctagctctaagcaaagtccaactcttccccttttgtactgggtccccttcccacctcacctactcaaggacattggctccagcaactctccctttct

SEQ ID NO: 34220 - DNA, 1286 bp, Bovine  19866880632281
  misc_feature (1)..(1): n is a, c, g, or t
ncacagggaccctggcccatgcacccagttggcatgcagtaaggaggctgcaggtagtgactggcccaggtttcctgggtggctgtgcagagatgtggagggcaaaagttcctgggggcacctgatgagcagcagggtcctatcttggggtctccagaaatggatctgggtcatgaagaagaggtaaaagaggcctgagttccaggttctcctcagaagctgagggaagctggaagccagttttgctttgaggactctgtcttcctgcatatgtctctcctggactggctctgggggaactcggccatcagcatcattgtggagggaaggaactctgccaactcagggggcctagttgtacagagggagttgccccagagcagtcccttcttgtgggtgcctcatttctttgggtaagaagagccaagtgctgggggtcagacctccctggcaggtcctctgcagggcatgggcctgacttcggagttccctagcttaagcgttgataccctgggggaggaaatggcagcctactccagtattcttgcctggaaaatcccatggacagaggagcctgctgggctacaatccttgggttcacagtcagacatgactgaatgactgagcgcgcgtgcgcgcgtgtgcacacacacacacacatacacacacacacagtttgagcctcatttcctcacaacatccagagacagattaagtattacaccagatactaagtctggcagctacctcccttgagaaactaagaacctgggatagaaaggggacatttatgtatttttggattaataaatattaaaaacagactcagtcattatttttcagcaccagttgctcccatgctgttctactgggccgtatttctcctgccagttagctttctttaccccagcacctgccctcctgctctggggctgttgacacagggagggcctgccttccaggctgatgagtcagtgaggccttcacaagcactcggctggctggctgtgctttccaggaggaagccggctgaagcaagggcgtggacttttaaatgtgtgcagagtctaagattctgtccaaatcaattttcccataagaaatggtgaaaaggggctggatctcacctaaggaccattactatctgttagcctcatgtatattcatatgctattaaatatattaggacaatgcatacaaattgggagctcactgtttgaatctggcttacagatgtaattttctgacctgaacaattttgctgttatctttttattatggaatat

SEQ ID NO: 34221 - DNA, 1113 bp, Bovine  19866880718794
  misc_feature (1)..(1): n is a, c, g, or t
nttgtacaaatttaagacaaactgctagggtctgtcacaagttactttctaatggttttcttagacagtgaggagagaaaatgatatgaatggatattaaaaaaatataagctataagcttatattttatagctctcaaaagataactatcactacctaaaactgttatctttcaaaataatttgttttgcaagatggcctgaaatacagaaactatgatgaaatgaaacttagctaataccttcaccacagcagtaatgagtaaacaattcccaactccaaacacagagcctaagtgaaaaataatcataaagcccttagtgagctcccagaaccataaaatacccacgtttgcataaacaactacttttctagaagcaaaaaagctcatttatagagataagttcagtcaatttacatttccacagccatccccataataaccgaacagataattaaaagagagacattatttcccttatgggagggaagagattcctggctaaaaataattatttaaaacatcaaaagctactcaaattccaaaagaaacactcaaacactgttcaagacaattttggaagactgcagtgcccgtatatatcactctatcttgatctcagtgagaggaatcaggaagaccaaatgactacacccactgcacactgtggtctcctcagtttctgattaaatccaagtgtttctgggacaagcgtttcaaacagtcctgagttataaaataaactttgtcaaataaactttggctcaaatctgtagctgttggtcacatatattatgatactgagaaattttgccaatattttttcccaacaactataaagaattcctatccaaattaaaaaccctaagtcacctatacatgtgacttattaaccctcaagactggccctgaaaaaacatatgtctggatctgtaagatcaacttgggttaggagtgactgaagcatacatttcttgaaaatcaattcactgtggaccttaataattacactgggcagccctgctttaaaagtagaaaatgccaagcttgaaaccatttcaagcaaatgagtagcccatacgagggcttcctaaaagctgaaaatatgggaa

SEQ ID NO: 34222 - DNA, 1788 bp, Bovine  19866880739561
  misc_feature (1)..(1): n is a, c, g, or t
ngatctttaattgaggcatctgaactcttagttgtgacatgtggggtcttgttctctgaccgggatcgaacccaggcctcctgcattgggagcacagtcttagccactggatcaccagggaagtcccccaaagttggtattttaaaatgtctttattattatctttattagtagtatttatctctctctccccatgccctctcataattgcaagtataaatcaaccccagggtaaattgtggctgcaattaaaatggtatattagcttaatcacaaataaatagcccttctgctgttatctcaagatggaatgtatgtgattatggctagagtaccttttctcctctgtgccactctaagctatggcggcaggctgaaaagtaactgattggttaccatggtttccaaatggaggcaatgtagcatgtaattattgcatacagctatcattactaaattttgtatggcatttgatgtaattcaataaataatttgagtcatagctctagaaggaggtgcaactgcttaaagggtaatgttttaggaaaattacataaactatttatatacagctgtgaggggcgctgaggagtaaaatttggtactggttctaattgatttgctcctatcacaagaaaaattggataaatgaggtttcaggtctgccttgataggtaaagtagtgttgattcaggtaagaaatgaagtaaaacccttcatttggtttttagcatggtacttagtgaatcttatttccctgggtttgcactttaacaatgaaataaaaacgtatgctttgtgaaacatataatcaagaagagagagagagagactttcaaaccagtctcccatctcctccctccctacagattccagagcaagtttccccaatttgtcaccgagtgctaactaattaaggagttgtcactttcctggccttctctcagtgctatgctcactacagcatataaatgtgggtgtgagggtaatccttcattatatattcaagggaactgccaagtgtttccatttgtattgttatcatttgaagataaatcattccaatttattttaataaaaggcaaacagacatgtatctgtgttaatctgctttatgtctttgataacctgcgctcttaatcgattttcccaatcacttgctttctgtattactgtgtgagaaagccaaaggcttaactaagtcacaaattggtactagcacagggaaatggagaaagactgatgcacaattcttggtaacctttttataaaccacatgtccttctgttatgtttgtaattcatcaggagcaatctgggatacttgtgggaatcttctcatggcttccctatctcctgagttcttctcaagcatatgtatgatgttatgtgctctttgttattcaagatgatgttggaggtggggtacagagaaggacaaggaaggggtattagactcagttccttctcaagtctacttgggggaaatgagaagcacacacaacataggcagcatattagtagaaacacattagacattgtagtgtagctaagctgggtttaacaccttctctcagtttatctacagtcctaattcacctctctggacctctgttttcttagatgtcaaatggggatactcaaagctggctaagagtgtacctgcgaggatccatctgataaaatattaaattggccagaaagttcattctggtttttccatacactcttactgaaaaacccaatgaatttttttggccaacccaatagtatgtaaactttataaatg

SEQ ID NO: 34223 - DNA, 716 bp, Bovine  19866880751491
  misc_feature (1)..(1): n is a, c, g, or t
ngcctggcactcctccaggcggcactccacatggccccgctgaggacaaacgtcattgctctagggacttccggtagggtttggagtccctgacctcacacttctgcatcagggactgggcaagcaacccttttcctataagggcacccacttcaggtagggggtgaaatcaccttcagctgcttgccctcacacaggggtacctctgccctctcacccagagggggcgcctttttcgaattaccttgaagaccccatgttctctggtccagtgtcctgaggcccttcacttttgcctgtaaggttctccaccccccacccccttcccccagctcacacggcaggtgcacgtgacacaggcgttgctggggtccctccagctctctccatccgccgctgtccggcccgcagcctccaccacacagtctggggacaaagaaatggggacggggaagcactgtcattctggctgcatgagctcaccctgaaggcccagggcaggacggtgcccaccccatccaattagtaccctcagggtgttaatttcttcaaccagcagcaccatggctgactaaatggcagaccttacgccagcgcccaggatatccagagcgtccaggatactgaaagagccagaggctgggactttctctggtctgactgccagctcagcagtgcgatgccctgctaagtgggccttggggtccctgagcccc

SEQ ID NO: 34224 - DNA, 1518 bp, Bovine  19866880831206
  misc_feature (1)..(1): n is a, c, g, or t
ntcctctgggcctcagctttcccatccctcaagtgggggaagcggggggcaatgtcaactaccctctcctagatggtttcagagattccaattcccatgtcaaaaagtaattcactcccttgcctccagccacaagcacatttgtaagtatacaaaatatggcttatctacacttaggatggggcttcccagttgacactagtggtaaagaacgtgcccgccaatgcaggaaacataaaagacgcaggtttgatccctgagttgggaagatctcctggaggagggtatagcaacccactccagtattcttgcctagaaaatcccatggacagaggagactggtgggctatagtccatgggggtcacacaaagtcagacatgactgaagcaacttagcacacacgaaaacttaggatacagactctatttgtgctttgtcctctgtaaggcctgaatgcccgtgagggagtgaatctctggaagtgggttgcatttcacggggaagcctagctcagggatgatgacgggagaaggtgccctcctgagggagctgtgttcacctcttcacgtcttctgtgtttgcccagggctgacaccgcaggtgtcttcctggccttggccagagcaagcctccctttcctgaggcactccacctgtcctttctcctcccctcctgcagggggcatgctgacacaccacagagacgggccctgggcttcctggggcccctggctttctcctgctctccagtccccacctctctgcacaggtgctgtgggatgggcggtcccaggtggaggtgagagtgcctggctcctaccggggccacatgtgtgggctctgcggcaacttcaatggctttgcccaggatgacctgcgggaccctgaggaactgctccggtccactgaggctgcatttgggaatagctggcaggtgagttgcacagaagtgagaggttgggggaggcacagttgagcctgagtctcagagcagccctctggtaaggaaaggaggggttgggctttggggctttcaggaaggtttggggtcttcttgcctgttacagtgctggggtggggggggggcgcctgttggaagggatctcatcaactgaatccccaaggcctgcttcatcactcactgactcgaagtctcggacaagacacttaactgctctgggccttgatttgacaatctgtaaaatgggggaaaggaaaagtagctgatgctttctttgctgttcttgtaaggaagtttttgagactacaacaaaacatttggtgcaaagctcttggaagaacatagcacacaaaggtcagctgccaggccgctgacctgatcaaggccgccttccccttctaggtcccagagggcccaggacctgggtcggccctgttccaagggccgtgaggtggatccatgccaggcagcagggtaccgtgccaggcgtgaggccaacgcccggtgtgcggtgcttgaagtccgccccgttcagccgctgccatgctgtggtgcca

SEQ ID NO: 34225 - DNA, 999 bp, Bovine  19866880890370
  misc_feature (1)..(1): n is a, c, g, or t
nttgtatgtctaactaacccctaggcgatgaattccttaagggcaaggagcattggctgatccacgtctgttatctcagtgcctagcattgtgcccagtgccctgtagacactccatgtgtgacattgttttcactgaaggaaaaaatgatcagacttacaaatgtgagtctgtaatttagaagacaggctgaagttaaattgtcagtgaagacggtaaaaaaggagaacatggccaaagagggccacatggtgggcagggagggtttgagaacaggttgtgctgaggtgtgtcagaaaggtatggaagttgaaaattagggaggctctacattacgaaataagggaatgatgaaagcacagccagaaaattatcacaaaactcaggcttgtaagtgtggaattatagtagtagaagggtgcctgttcctgacgtaatttgtgatagggctctgttagagacgttgggctttgcatgaatcttacagcaatctttatttcataaaagtttataagtagagacaaaaatttgaacacagagttatttagagtctttgtataaaaagtttcttagaatccttgctgtttgttgtcattcagtcactaaatcatgtccgattctttgtgactgcacggactgcaatgcatcaggctcccatccttcactgtctcccagagtttgcacaaactcatgtccattgagtcggtgttaccattcaaccatcctctcatcctctgatgcctcctcctcctcctgccctcagtctttcccagcatcagagaatccttgtagaacactgaaattgtctatagccttatacttctgattatatgttcatttgtatttgagttctgagtccttctgctatgatccaagtttatcaaattttgatatatcttttaagattactagtttttgaagaatgtttctttaccttgcaggtgggattcttaatagattctccaaagatatagcagtttggagatcttctgcctctta

SEQ ID NO: 34226 - DNA, 773 bp, Bovine  19866880940382
  misc_feature (1)..(1): n is a, c, g, or t
nctaaagctgtgactaaggagcccatgagtgggcttcagcttcctctctgctcctggcccaacaggccttcggaactcagaccctgctatggagcacctttccctagcatactgctgcccccagaactgtctccctgcctcttgctatggttaccttgttgtgaccacacttcgaggacttaggccatttgggatcctcgggattctccaacacttcccggaagctggactccttgaaacggtgcagcgctccttgcagttctaactgttcttttactatgttctcttggttctgtatcagtttcttctgctcctcctgcatgccttggtagagcatctgcacttcacacaggtcctgtaactttgtgagaagctcctgactctgtgaggtggagtggaaggaagtgggtggcactgtgatagttacagggaaagacctctgcctccttccctctggggacccttccctcaaaggagttggctttgctcagcccacttgggataggaggggagtctttctacacagacctgccagtggaggagttaagacctcctgtgggtggatgtcttttgctttttacaaagtgatttcaaggacattttctccagatggactaaatatctaaaatgctggacagattccagagttgaggttgtatttcaagatttaaagccctaatcggctatattgagcagttttgtgtgaggagactggtgagaaagtgaggagttaagacaaagttccttttgcatcctttcacttctcctcaggt

SEQ ID NO: 34227 - DNA, 661 bp, Bovine  19866880953213
  misc_feature (1)..(1): n is a, c, g, or t
ntgcccctcaccccccgccccaatcctcagaggtgacctatggggtgcctgctcctgtagtcacttgggcatgagcctttctgtgacctttgagccttctgcaagctcagggcatcttccctcctcagtcccactgcctaatctcctgatccatgacgtcatttgcctgctcaaaacccttccattggctcaccgtgctttcaaacagacttctcccgatagggtccccgaccacttcccaggtgcctccccccagatttctagccacaccaccctccactccagccgggcgggcctacacactgcctgccccacaaccccagacttcctggccctgttggcccttcacccgaagcccctgcctcactccctggcctcagggacacacgcctgtccctgaccccacagtgcctgctccccacagtgtccaggctgcccctccacggtgccctcccctacctcacagacgcagacttcgcaggggtctgcaccgggctggaagctctctcctggctcatacttccgaccctcatgctcacagtcttgttggagggtgaaggttggggggttgggggggtacgggtggggtggggtaagagtagaacagaaccagggaactttcagactggccgccatgccatggggggggttctctgcccct

SEQ ID NO: 34228 - DNA, 1108 bp, Bovine  19866881123929
  misc_feature (1)..(1): n is a, c, g, or t
ncctccttactgcatgccactgggtgcatgggccgggtccctgtgcagcactgaggcctggcatggcaggggtttgggctacaggctgcagatgctgctgggacagccagatgtgatggagctccttgaactgttccaccatgcggtctttgaggtctgggtttgagatctgtagccggatgctatcagctgaccaagaaagctcccccgagaacatctccagcaacatccgggctgctacgggtaccacctaagcgggtgaagaggagacaggatggggtgaactgtctggatcggcagggctgtccgattgagttatgcatgaggggatccaccagagggcaggtggtagtttacatccgccagaagaaggggcaccaatttctacttcgtagaaaggcagcttatgtgtgagcagtgccggtcatcaattaactctgaccactgaattcaccctacccagacagccctgcccctcctggggcaagggcccaggatttcccaatattcaaagcagagttcaggaggttgatgatgggagtatacctgtacagtgatgagcttcttctcccggggtttgcagtcaggccactcctccccaaagcagaagaagatctcgaatggaggtggggtgttggtctggcccttctggaataggatgagctctgcattgacagtaagaccctaagtcagaggcggacaccaggcccctggatgaaaagagacccagaggaacatgaggcagggccctcaccattgaggaagtcctccaggctgaagagcttggtcttgacctcccgctggatggggttggggtgtgagccctgggctgaggcgcagggcccgctccagaacaccttgcactggcacaggcggatggcatacagatcctggccttgtagctgaaggatgagcccacggtccaggacgtccagcagctggttggtataaaagcgttgcttctcgctggggatgtcctcggggctggggaagcgcacttgctccaggctcaccgggccaaagagctccacctgctcctgggtggcttccagttggctgtagaagagccggcagccttgagggttgctgatggtgagagcccggggtg

SEQ ID NO: 34229 - DNA, 1245 bp, Bovine  19866881140648
  misc_feature (1)..(1): n is a, c, g, or t
naaagaaacatctgagatggtttaaaactcttcctcgggtcacccccatttttgcagtcaaatgcaatgatagtagaaccatagtgaagacctagctgccaatgggagaagacttgactgtgccagcaagactgaattacaattggtgcgtgtctcgggatgcctccagtgaggattgtctatgcaaatctgtataaacaagtgtctcagattgagtacaatgccaataacagggtacagatgatgacttttgatagtgaagttgagttgatgaaagcttccagggcacatccaaaggccaagttggttttgcagattaccactgataattccaaagcagtatgtcacctcagtgtcaaatttggtgccacaggtttcttttggaatgggcaaaagagctagatattgatgtcattgttgtcaacttctgtgtgggaagtggctatactgatcctgagaccttcatgcaggtgatctctgatgtctgctgtgtctttgacataggagctaaggttggtttcaacatgtatcttcttgatattggtggtggctttcctggatctgaggatgtaaagcttaaatctggagatcaccagtgtaatcaagccatcattggacaagtattttccatcagactctggagtgagaatcatacctgagccgggcagatactatgttgcatcagctttcacactcgcagttaatatcattgccaaaaaaacccctcatattaaaggaacagacagactctgatgatgaagaggaatcaagtgaacagttatgtatgacatgaatgatggagtatatgggtcatttaactgcattctttaggatcacacacatgaagcctcttctgcagaagagacccaaaccagatgagaagtattattcatccagcatctggggacccatctgtgatggcctggaccacattgttgagcgctgtaacctgcatgtgggcaattggatgctctttgagaacatgggtgcttacactgccactactgcttctaccttcaatggattccagagacctaccatgtactatgtgatgccagggccaacatggcaactgatgaagcagatccaaaaccaggacttcccacccagagcagaggagcaggatgtcagccccctgcaccctgtcctgtgcctgagaaagcagcatgaagcagcattcagcagactgtgcttccacttgtattaacatgtagttaccactcttgtagctgttaactgcgagtt

SEQ ID NO: 34230 - DNA, 1472 bp, Bovine  19866881161213
  misc_feature (1)..(1): n is a, c, g, or t
naagtaattcagaattggactctgaatgtgaaaaagttttaggactagttaaaaacaatttcagaaattggaaatttatttcacttaaattttcctttttacatatttacaaaagcagtatgatcaaaagctgtctaagtaagcctgaaaaagctctttcaataagtataaaataaaaattctaagtgatagtaagcgctatgtcaaagtttatcagtgttttttctttctttgtggcacataaataatggtgcatcctataactcatggtatcacagatatgatgaaatacaggtttgttttagaaacttctacctttctattccaaaatccacagctaaagcctttgttatttcataccaatatgtcactgacaactaactggtttcacaattcaagttaaaaaccacttaaaaaacaaattcagttggtctgcctaccaagctctcctccttcaattcattctctatactactgccatttaaaatttctgaaagattgatataataaaataccatttattgaatacttgctgtgtgtcaagcactgcatacattcagttaattctcacacagttttataaagaaactaccattatatccattttgcagataagaaaattcgggttaagtaacattcccaaatcatataggaatatagcagaaagtcaaattaatttttaagtagttccaaagcctgtatgttcagccacttccgatcgtttatccttttttctcaaaaatagtcctacagtgccccacttcttacaggattgcatttcaaccattctgatcattccttgctttcccaatactctctgccaaggccaccaactacagccgtgcatgctcagccctgtagattatgagaataagcaccctcttgagttccccatgtataagccagagtcctactaggcaattttgttcaccatccttcctctttagccggccagcctcctcactaacttttgcatatagcaagttcttttctatctctatggagaaggaaatggcaatccacaccagtattcttgcctggagaattcccatggacagaggagcctggcatgtttcagtacacggggttgcaaagagttggacatgacttgagtgactaacacactttctatctctgggtctttaattctgtttctaattcaaatactatccattattcaagaccaactcaattcccactttctctgagaaaacttcccaagtgttcttgccctaattcttttactcttttaaatgccaacagactcaaacaatcgtgtgtcacttactctggtctatgttgcacacaaccagtgttatgacatcactgagcacaggaaccagaccttttaacatacattacgaaacatttcacatattaagacttgtacagataaaacattctcataactaccagcgatgctgagtttagggtatttataggagacttaagagttctgggcacagaatgag

SEQ ID NO: 34231 - DNA, 1117 bp, Bovine  19866881166925
  misc_feature (1)..(1): n is a, c, g, or t
ntccctagctcaggaatttgatccaaatcagttggtaatgaacactttttttggttagtttttggacaagttagaaaaccctttttatttatttattaattttttgagttggtatgagaaaaattgggtgggccgtcaacctgttttcctggtgtgtttcttgaaaaattaatctcaagagattctctttgtacaaatgattgcctggtaaaataaatttggaatgttattttactttttcttggagattttctatgaacattagaggatctgagaaaattgggaagtatagagttcccatatacctttagcttcccccttccttccctcacagcctaccttgctatcaacatccccccaccagagtggcccatttattaaaattaatgaacttccattgccacatcatttttaaagtacttactttacattaggattctgtcttggtggttgtcttccaagcgtcttgtttagtctctaagtcgtgtctgactctttgcgaccccatggaccatagcccaccaggctcctctgtccgtgggattttccaggcaagaatactggagtgggttgccattcccttctccaggggatctttccaacccagggatcaaatctgtatctcctacattgcaggccaattctttaccattgagcgaccagggaagccaaggtctttctatgggtttggacaagtgtatgacatatacctatcattacagtagcatagagcatagttttagtactgtcagtatcccctatgttttacctattcatgttcctaccctccactccgtcaatccctaacaaccattgatctttttactatctccctagttttgccttttaccctggctacatttgtatagcctaattttgtaatttttaccttgcctatctttccataccaggtttattcagcgtagccctgttactttgctgaggagccaagttgtcatccctatcttacagtgggccattgcctctactaccttggaccaccgggatgccaattgtagtgtcatgaggttcctacgagacctcatccatacaggggtagccaatgatgtaagtacaaacaatgtattaaaatagtttttctacttgtatctcatta

SEQ ID NO: 34232 - DNA, 1669 bp, Bovine  19866881275626
  misc_feature (1)..(1): n is a, c, g, or t
nttgggctgtctgtatggaggtaatctatgtattaatgtaaagaactattaagggctctatgaggagcaatatggagggcataaattgactataaacctgtcagatgtaatatcaaagcttaaatgcatggaacttttcacattttatatataaactgtggctgtattacctgcaaagtttaatgtgttctgatatgtcttattataatgctagacatcatccaccctgagcacagaaagaggatggattcatggaatagaggtgggatttccagatttctgaccacctttctgaattgacacatcacatcatggctcttcctatcccccaactattggataccccttcatcaccctctggctcagccctgaatccttagggctaaataaatgatttctgccaaaattcaagtgagcatcaacatgtatcaatcaggttgttcttgttcagttcaggtacaatatcttaaaactcaaaagcaaagggaagtcacctcagccccccgagaatattgtcttctttcttagagtgaatataaatctgggccatagaaaacacctaaaaggaggccttcatgttggaacatgttggatctgagtctaggaaaagatgcaagagagttacctttctgaaattacccagaacttgtgacttcatccagcgctcaccaagatgccaggctctggatgcatttgaactttagaaaggttgtaattgcccattcttctgaattttctatactatgtcttttagaaattctccatataagactgaaatttatactgtgaaggagatgaatggatggcagtaatacactggtactgtttaacaatgggttcccctgggatagaatggggcaagtcctgattcttttcacttttgcattggtgtaaatactcctgccacagctaattttgctaccaatatgatgctcctggacacaacattgagaacaaatgtgcccaagtcaactctctcaaggtggtaggaagcagctccagcacaccactgatagatagcttaaaatatagtcttgcaatgacttcaagaatagtttagacacatgcaagattactcctaccctgccaaccctgacatgcagttctttcctgttctaaagaaggcaatcttcttgggagctaaagtaaacagcgagaaacccttttctatccccagatgactttggaataattccttctatccaaaagcctacaaaaaacccaaataacagaagttttgacctttagaattatttttcttttccaccaaatacttcaggtactagtatgaatggtgttattaaaaagtaaactcttattataacttttaacttctggaattacagttattaatgaggattatacaatgtcttctataagttaaggcaaagcctacatacaattaaacccgaccacagtaagaataaataacagttactactccaaggttatttcatacactgttcaacgacaactgcagctgtgccactatttaaagtatagctgtgaaattaatataatgtattatgaaaaatgctatgtacagctcgtggagatgaagaactctgagtgggtggtagaaaaaagagaaagtaacagcaaaacacagtctaaatgtaaacttcagctattttgatttatttgtaaacaatctgtaaagtctccttaa

SEQ ID NO: 34233 - DNA, 1490 bp, Bovine  19866881285123
  misc_feature (1)..(1): n is a, c, g, or t
nttctattgttttcctctatttctttgcactgatcactgaggaaggctttcttatttctccttgctattctttggaactctgctttcaaatgggtatatctttccttttctcctttactttttacatgcaatgtattttaaaaataaaatgagttttcgctgagagctgcacttttatctagggagaggtgtctgggttgacatttcattaactgattttccttctgattccatgcgacccattattagagcaaataggccactcctggcccttcctcttggaggatccagagccctccagaagcagaaggcaactctactgctctattaaggagagggatccttggtgccaccatgaagcataggttgaacatctatctcttagctgaccttgttctccatcttcattaaactcattagtctaatgaagtccctggagggcttactggagagcccatctcctgggagctactggactaccagaggtcagcttcccaacaaagagcccccaagggcgttccagaccatctatccagagtggtatgataagacctccgtccaccggctacgaccttagaacagtgtccaaaatacctccagctctaccagtttctgggcaggcattctcaatgtcagtgttatcagagaactaactgttaccaaggccctcaaagggcctcttccattggatactccttgttctgaaaaaggcctgttttatcacagatttgagtgggtcgcctgtggctgtggaatggcgggatctcactctcttccccagactgcgtctgcttagatgtcctgagcagcctggctttgtcttctcttagatgagtacttgtgctgcaactttagctgttgggagatggtgttattttcaaccctactttctaagcatctgccaagaattcctttggacttgggtgtcttatggtcagtttagttggtattcagcttttctctcatgagagctcctctgtgtgcagataacagttaagaggtgttagggttggctgtaggaaggggaaaggtggagtcttctgtgtcctgttctcatttttacattttttaaagttcttcctccaacttagcaagtctgtgtgtgattattggtctgaagtgggcaggggaatgacagtgcctgcttgggacatggacattttggccatcatgtggcttaagtaaatttttctaatgaaataaagttgaatgtatgtttcaaaaaaaatcttgcaggaaaaaaattgatgtttataaatgtctctcaaatgccaactctcctccttattctattatgattgccctagttcagtatctagtttttctcctagagataagaaagtcactgtcctctagtctttcttattattacattctacctcaatcctgattaacttttatactacaatcagcattgtctttctaaatctgatcatgtccttcttctgtggaaactcccttcttatatataatgtgcaataaagggacca

SEQ ID NO: 34234 - DNA, 743 bp, Bovine  19866881441678
  misc_feature (1)..(1): n is a, c, g, or t
ncgacccctgccgccgctgcctctgcctggacggctcggtgtcctgccggagactgccctgccctcccgtgccctgcacccacccgcaccaggggccctgctgcccctcctgtgacggtaacgccctggtcatccccctccctgccctgtccccccttctttccaactccacccctcgccttcttggtgcccctcttcctccacgcccctctttatctccaggaggatgccacctcctctccccacttcctcctggcctgcccctcccacatcggggttctcactaagaaaatggggaaacagtgcccacctgatccacagggcctggcagggtggggggtggtctccgggatggcttggcctctagggctgggagggcagcatgccctggtaatgcgcctggtactccacgagcccccagcctctcacctgtcccactaggctgcctgtaccaggggaaggagttcaccagcggggagcgcttcccttcgcccactgccagatgtcacatctgcctctgctgggagggcagcatcagctgtgagcccagggcctgtgcacctgcccagtgccccttccctgcccagggtgactgctgccctgcctgtgatggtgaggggaagggactggggggtgggctgggagagcaggctcaaagtcttctttactgcccagagcgcatgctaagtcacttcagtcatgttcgactctttgcgaccccaggattgtagcctgccaggctt

SEQ ID NO: 34235 - DNA, 711 bp, Bovine  19866881450864
  misc_feature (1)..(1): n is a, c, g, or t
ncttacagcatgaagaagactttgaagtacggaaagaactaattggacaggtgatgaaccagcttggacagcagcttgtaagccagctgcttcacacgtgctgcttctgcctccccccatataccctacccgatgtggccgaagtgctctgggagatcatgcaggttgacagaccggtaagactgttttcataaggaacccacttccagtcctggatagtttcttgagaggctgactctaactttgaaactagtcctattgtatgctcttggaacataatttaggcacattgttaagtttaattgttaaataaaggagccaatagaaggattctagagaatacgtttgtgtcactctaagaatctaatacagtagtatttttgtttttcaaaaaagtactctttgagcccttgcggcgtgacaagtttattccaaacgtcattgataagagaaataaaatttctgtgctcttactttttaataaatatatttggtttccaggtaacaaaaaccttattatatacatttaactttacaaaaaacgttgaatttgtaagcctttgttatctcttatctttctgatcatgacctttctaacaggcgttaagatgatatgtctttatagttttaatttgcattcccattatgattggtgacactgagcattttggtgtatctgttggcttttcatgtatcttctttcaagaaacg

SEQ ID NO: 34236 - DNA, 1108 bp, Bovine  19866881504110
  misc_feature (1)..(1): n is a, c, g, or t
nctccgtgggaggagagtgccaagagtaggcccgcaggactctggtcggcggtcagggccttctcagagtgctctgcggcgctgggactgagggcgaagggcaggccgggcgaagggtagggcacttaccaggcattgtggtgaaagacgcgagcggggtcgctcagaaaccggctcccgaactgctgcctcttcccgcagacggccgcaggatcgccttcagggaaggagcagtccatgacaccggaaccggaaacacctactttcccctcacgcgcgaacgctctgcaggccacacccctttcggaaatcgccgggtctgggcgggaaaacacggaggccgggtggggcagtcatgagtcccccgttgaggcggcgttccggctcttcttggtgggacggagctatttgggaaggagactcagcgggttttcgccccagagtcgttagtccttcaacaggcgggcgagaaagtggtagacgttccacttgagcctccttttaattctaggatgctttaacaagttcccagtttgtcttaaggaagaattttgaatcactttaataattagataattacctagctttactgtagagcaatggccaaaataattgagaaaaatagcaagcagggtgaggaaatagggcgattttccagcttttcacggtgtggaaaaggaaagaaaaaagtgtgtgttttatgtgcgtgttttgtgtatccccacaccgtttttctggagaaagatatgaaatgaatttcgagaacacgaagtttaactgtcaaatcaaatatccaaggacaagtttaaaagtgtaaccccaccacctaactttttaaattatccatatgaaagcttatttgtacaatcagaattgtaatacatacacatatacagttatattaatacattttcagccttacatttgtttcgataattgctacaaacttacaaaagaagaaagtatgctgtcaatataagataaagttaattgagaagatttccagaagagggatgactaccatttggaagaagagaagggattagctgtttaagtatacagttctaggtttaacacactggtaaccagtgatagcttattgctgaat

SEQ ID NO: 34237 - DNA, 534 bp, Bovine  19866881763430
  misc_feature (1)..(1): n is a, c, g, or t
ngaagcccgagagctcgtctgtcagcccctgcccccgaggtcggtcaggtcactgtgaaggataccagacaggggccacggtggaagggctgaggaggaagtgaccggaccatgtgggcagaagggcatattcatgggcccgccttgcaccaggctctcaggcagtgactccccactttctctccgccactcagagcccctgccgccgccgcccgcccactctgtgcccatcgtccaccaggccaagaaagtggtgccacgttagtacacgccagcagaggcgggccgggcatggccatagctgactggcctcacctgtgctgtgtggcatggcgtgagcggggtggagtcgcccccccttccgtggcattctgtgacaggcccaggttccgcgcctttgcctctgttctgtggcagctctggtctcctgggactggcctggtgatttctgtgggaagggtctgggttccgtgccgtcgcctgttatgtggcagtccccagacgctgtgccgtttgtctgtgttccagggcagg

SEQ ID NO: 34238 - DNA, 905 bp, Bovine  19866881917922
  misc_feature (1)..(1): n is a, c, g, or t
ntggtgttggaggggactcttgagagtcccttggactgcaaggagatccatccagtccatcctaaaggaaatcagtcctgaatattcattggaatgactgatgttgaagctgaaactccagtactttggccacctgatgggaagaactgactcatttgaaaagaccctgatgctgggaaagattgaaggcaggagaagggcacaacagaggattagatggttggatggcatcactgactcaatggacatgagtttgactcaactcctggagttggtgatggacagggagacctggtgtgctatagtccatggggtcacagagagttggacacaattgagcaactgaactgaagtgactgaaggtgaaggagaggtaatttgtggaaaaaatgacttgtgtaatatgcaagcatagatagtaatgtcttctatgtgatttaagtcttatgttttcacagtgtatctattaaccaatgggcaatgcattggtcaagttattctttgaggactggctagctctgtgcattttcaaaaggcaagcaagtgctttctacccagaggtacccagtatctctgaagacatatggatagatgcctgtacaacacaagtattttggcccacattctcatatcttttgttgttaaaaatagctttaggatgatgccattcaccaagagacgttaggcagggacacctaaagtataaacctccattatagtgatcatcttaggattcagccacatgtggcttcttcggttgtacagataaaattacaatatttaatgttacctcaagccttaatttagaaattgtaaacttttggtttccacgctggagaaggcatcagtaataactttaaaatacccttgagtttccctctgctcatttatctcccagatctgta

SEQ ID NO: 34239 - DNA, 1608 bp, Bovine  19866880352156
  misc_feature (1)..(1): n is a, c, g, or t
natgtctatttatgtatcgtaagatgtcctactttaaatattctctttttttctagtaatagaccactagttttgctctcattggataggagatttcttctattaatagtacttacctcatggtgcggatgtacggactgaacgaggtaacatatgcaaagcatttggtgcaatgcctggtacacagcaaatgttctgcaaatatcagctattatagttatcttcaaatctaggcctccacttggcagatgagcaaactgaggctcaggggacaaagtaacttgcacgcagtcacaaagtaagcgggttgcatgcacatcaaagcctacaaatggatccttgaatcccaatctgattcctgaattccctggggcctctccccagtcctgaatctcagagggctaacgcttcccagaggaagagtggagggcaggcggcagcgggcaggaagagcccagacagagggtggggcctcgggcacctctcaagagcaggcaccccaccctgacctcccaccacccaccccactccgggggatacaagacttctccctctagttacatttacgttaattgctaagtttatcatctcagtggcccctctgtgttccttcacagatcctgtgtatttttatctcaaagagcttcattcatgtctttaattatttgtctccacggctgtctcctctagcagcctgggagtccccggggagagggcaccagctctgattcatctctaacccccgagcccagaccagtgcctggcaccaaggggccactttacagatgtttgctgaacaaacgagctactgaacaaatgttaagtaatagggcgccccggatctctcattgacttcctggcttgggaagtagcagagacctggaagacatggccctggtctgctcccctccggctcctttttctcctcctccatccctccagcctcctcttcccagggaggcccgagagacacaggtggggtagggcagacgctgggaaacccagcccggggggcgaagctcttctcttcagggatggacggggtgtggtgtggggctttgtcttctctgagtcacctcgttggtgccgtgggtctgactcagaaggagagtgagaaggagaactttgtcagtcctggtttccacgggtcctgggccccgccgggtgggaggaggggagaggcctggcatgggaagatgttaggacacatggagtagacctccgatctcggaagcaccaaagccccacactcggctgcacctggaactgaggcttggaagaggcaactgggtgtggtggagggaggagtcggtcctgtctttatctcctcccctccctgaacctcagatgcttcatctttagccagagacttagaccctggactcctccagccagctcccagctgggggccagagctttccccaaaggccactggggtctgcgagaaaagacccacaaccaagaactgccagagtctgagcgctggctacgtgctgggagctggaatatcgtctgtttacagatctcaccaagtcctcacgccaggcccctggagccccattttgcagacgaggaaactgaggctcacatagtcaatgacgtgactca

SEQ ID NO: 34240 - DNA, 1388 bp, Bovine  19866880433070
  misc_feature (1)..(1): n is a, c, g, or t
nagaggagaggactttccaggagagagacaaatcctatggggttgtgggggactcagtagtccaaggttagggacatgttggtgccaagggggaatgggggaccagacaggagagagacaggaagagcttcgaatgccaggcctggatgcagggagcagtctggaaagacctgcccgagggtcccagcattccccagatcacaccgtgatctctcctcccagctcactagtcacctgatgtccacgccctcccagtcaggactgggcctggaacacaggtctcctgactcgcagccctgaactcacctccccctagtctcctgatgtccacgtcctcccggtcaggactgggcctggaacacaggtctcctgactcgcagccctgaactcacctcccccagcttcttccttgtcatggcctccctttcaggctgtggtgtttgctcagagcccaagcccggggcagagagcagagaaatatttatttatgtcaccgccaaccctgcctcctggaggcccccaagggctccctcacagagaagttcagttatgtaaccccgagttgacacagcaggaaggagaaggacataaattataattactcatttttccgcagtcttggacgctctttggatagcttgacactttgggtacctcccttcttcctcatcgaactgacctggggcctccagggggaacttggtggttctcagccgattttagcctcaattggggtgagcctggggctttgaggagaccttcctagaggctggggaagggagagaaatgagatctcaaagggctgctttattccgagcactctgccaggggctttatattcataacctcgtttttgcctcatgaagaaggtcctgtttattacctccatggagtgggaaagggatggaggctcagacaggttcagtaacttcccaaagggcgcccagcagagccaggtcaggagctctgaggctcctagttttcaaacagctcacgtggaatctgcaacgtagggattctggagagattaaagtgtgctagcatctgcctgtgcaggaaattcttccctagcttaatccccaaacatccctcacattcactctccactgtgaccttccctgaacactcagctcctttgtgctgggaccctcacagccccacccggctcactgccccacccacctccccagtctcacacttccctttgtaaagtgttcatcctcaaccccatctcccagtcttcacgcccactgttcttcccagccacaacgtccctcctcctttctccacctgacaaaatcctagcaaaataataatgcaccttcatagagcagaaggtgtagagtggagtggttaaaagaatgaactctgaaaagagttaaaagaat

SEQ ID NO: 34241 - DNA, 1852 bp, Bovine  19866880470551
  misc_feature (1)..(1): n is a, c, g, or t
nttcactcagactcacgtccatcgagtcagtgatgccatccagccatctcatcctctgtcgtcccttctcctcctgcccccaatccctcccagcatcagagtcttttccaacgagtcaactctttgcatgaggtgaccaaagtactggagtttcagctttagcatcattccttccaaagaaatccctaaaagcagtgttatattaccagtgcataaaattcctcctccatgatattctcagagaaaataagtaaattggagaaaacccccttaaaagtctgagcagtatttgttttcattttccatttctatcttaaacattgaaactctcatcctttgtggtgtcactaatttccttctgctgtagaagtctgcgcaccatttgtaacattgtatgagtcagacccacagtaagttgccattatcatggcataaagtttggaagattactatgatagtttaaactttaacaattttgaagtaatttaaaatgttacaatggaactatgaaaatgatagctctgtatatcttaaaaggacttataaactcagaacaaaatctgatttccaagtgtattcttgaggtaatttgctttcattatcatgtctctgtggttccacccttctgaaaatagtctttagcaagtttgagttccaggtatgtctttagtaaacagcagcttgaataacatgtacagagagaccaagtggagtggaacagtccagccttttagagaaatcattcatttcctgctgctggtcaggcaggaaagtacagactctgtcctttccctttgtaaagttgacttgggctacatgaagcccttgttagaatggtcctacagttgaagatacatgtctcatgaatgtgttctgaatcacatgtatactctcggtgtgtgtgtgtgagagagaaacagacagacagggagaatttcattgccatgtgtctttatgttctttttcaagataatttcaaagatggaaatcctgttgaggccactaagagctggattagaaaattggattgtaaatgaaaggctttctaaacctgttatcgtgtgtgtgtgagtgctcagtcacttgagtcatgtccaactcttttcaaccccatggactgtagcccaccaggctctctctattcatgggattctccaggcaggaatagtagagtgggttgccgttcccttccccaggggatcttctccacccagggatcgaacctgtgtctcctgcattgtaagtggttctttactgctaagccactgggaaagccctgttatcagtatacattctgcttataaactataaatctgttaagaattataaaagttgtatttggtaccttttcatagatgttattttgttttaaaatgattgctccacaaatggaccttaaagtagacagggatcagcagtataccacatttgatcacaataaataaaatcctttaactggttgaacggggacacataggcagatgcttagtaactgggatcttggtgtgtgtggtttgatgtccacaacaattcagtcattcagttagtgacttagtattagtcagaatatagcaaatctagtgaagagtaattaataggagtaaagggatctgaaccaaaagatttgtgttgttacttttttttttttttttttgcttatttgccatatactgggtctagcattggagaaggcaatggcaccccactccagtactcttgcctggcaaatcccatggatgaagtccctgaggtcgctaagagtcaaacacgactaaatgaatcccctttcactttcactttcatgcattggagaaggaaatggcaacccactccagtgttcttgcctggagaa

SEQ ID NO: 34242 - DNA, 1499 bp, Bovine  19866880472345
  misc_feature (1)..(1): n is a, c, g, or t
nctctgatggagtgctgagctagagagttaatttggacgggggtgcagggccagtcaatggccaaggtcagggctcttgacttgcctgggttacgaccatctgtggataagattacgggcccattggtggaaggggacaggggaaagagagcagggcggtgatggtcatcttcactggttagctttggggagggaggcaaggactggtactgggcttcggctcctcccagctgctcacctggttggggcatcgtccactctttacactcaaacagcttgctgggtgccgacagctccccaacacctgcccagtttacggcccgggcacggaactcatagaagtgaccttcatggaggttgctgaccttgaagagcagaaacacagactgtgaaggccgaggctggggagacagaggatcgagctgacagcaggaggtgtgtggggactttcggtgagattggtctgcccttgacaatcagctggatcgtgcagaccgaggggcctgaggtctctcagcctcagaacctccagccccgacctctggtctctgcctgcgtaagtcaggaccgcaggccggtggccgccttccagcctcaccttgcaaatctgggtggggacgggctgctggttgacctcgtgccagtccagttcctcggagtcgtgctggtccaggaagtaacccaagatcttgccccctccacgccgcttcgggggtttccatccaatgaccatttcatttttcccgcagttcaggagggcgaagtcatatggcgcagatggtgttgctacagggaggaaagggggtgagggtcactgctcccagggcatgggcagactgggcagtggggcccgagggaggtagagagcctcccctggtgggtgcccaccctgctctgggggcgctgacttagccggcggtgtcccttgataactctgactctgctacatggaggacacctgagcctccacgctggtctcaggccactgttactctctcctcaaaggatcgggtggtcaggggggcttctgccccgtggcctccggattggaccctccaagagatggtcaatgagcccccagctctctcccaggccacggccgcccaccctcaaggcttgcaggctgcacctgccctgtggactcacccagagcctgcttgaccctgatgggttcggtgacggctgagctctccccgactccggcctcgctgacggacctgatacaaaactcatactccttccccgtccttagcccgggaattgtaaacctgggagagacatgtgctgccttcagggacggccaaacagttcggagacatccctgaaacttctagaacaaccctgagcgggctaagtggcccccagcgtggcaggattggagggcctcagttctcacctaaagaccttgtccctgctcccaaagtgatgcctgcatcctggagggtgaggtccttaagattttaaaggctgtgacttctagagcctgtcattaaagtgca

SEQ ID NO: 34243 - DNA, 1455 bp, Bovine  19866880477435
  misc_feature (1)..(1): n is a, c, g, or t
ngcagactctttactgtctgagccaccagggatcctacctggcagagctgggctcaaacacagggtgtgaccccatagcaaagctctcagcctgctgactcagcaactacactgcaaggtcagtgtggaattgggaacctcctgcttcccatccttagccaggtcttctaggcccatggttcttaaacttgatcatgcatcagaatcacctggagggcttgttaaaacacatattgctgaaccccacccccagagtttttgattcagtagctctagggtggggctgagaatctgcatttctacggagttcccaggtgatgacgctgatgacgctggtccaaggaccacactttgagaatacgtttttttgttttttaaggtgaaccaatatgactctttcctccctctcctcatttcaaaagtgacacagggtcactttgtaaaacacaatatataaaacatggaatatacagaaaaattggaagcaaagaccagaattcacccgcattcctctactcggagataagcagagttaacagtctggcagtatctcaccagttttcaacatccatgctggtgagaagcaggatgacacattggtgcggagcattctttcggccccttataagatcccagctcttcagcaagatcctggggagtcggacaagcttaaatcccatcacttgcaaaactgtatttatactcccatccttcactggagtgctgggagggttacaggagatgatgtccttctcaaataccggaccctgtgtccactgtgaagtccccgctcaaataaagacttggctgttacttttgttttaaccgaagggtgctttggatacgctctttgcgttttcagccctgagactcttccttcccgtcgtcctccgtgtggacccctgaagaccctctgggctccagacaccgacagggggctcctcctaggagacagcagtagaccgagtggcaggcgccaccgcccttagggtcgtcgcaggggcctctcggctcagtctgcccgttttacagcccggtcttaacgagggtttttaacttttcattcaccagcagagtagctctgacttttaataacacgacaaaaatttgctcctggcaatcatggtttcgaccacaaaaccacagcgggaggcgttcctggttaactctttcagcgctgcaggcagtctggagcccaagcgctctcggagcttgggtggagtggcggcgaggcctgaggtcacagaccgggatgggatgggtcgggtccccctcctaccctcccttgaggctctccaagcttcggggaggaagatggtttcagattcagacagcttcggggaggaagatggtttcagacagctggtgggggccagactgcggctcatgtgtcctggcgtgcctccttcacttccctctctttccttcattccacagacctaccgcgtgctgaat

SEQ ID NO: 34244 - DNA, 890 bp, Bovine  19866880553460
  misc_feature (1)..(1): n is a, c, g, or t
ntgtgagatggtgcagcccttctccgaaaacagtttggctgctcttcaaaagttcaacgtagaatcactgtaggacccagaaatcccactcctacccaagggaaccaaaagcttatgtccacttaaaaaacttgtgcacaaccatttgcagcagcattactcaaaatagccaaaaagtggaaacaaccccagtgcccagcagctgatggaggataaacagaatgtgacctatccacacgatggaatagaattcagctgcaagaaggaaataagtgccaatctatgtaatacggatgagccttgaaaacatgatgccaagtgaaagaagcctgacacaaaaggccaattggataacttcatttatagaaaatgtccaaataggcaaagtcattgagacaggaagtagattattggttggttgcctggggctgggaggaggggagggatgggggaatgacagctcacggacacaagatttgtttgggggcgacaaacacgtcctagaactagacctgcggcctgtggtctacaccaccttgtgaatatattcagaataccacagaactatatgattttaagcggtgaattgtatggaatgtgaatcatagctcaataaaaaggaaaaaaagaagtgaaggggagcgggagggtcagttagcaccgtctcctgctaagtggttgctggctcaccccctcggtgggcagctcgaaagggggctagggcagggtctatgcacccatctgctcaccctgctcccacttctggcagctcacatcactgaggacacctcagatctccttcagcacgtgaagttccagtccagcaacttcgaaaacatcctgacgtgggacggcaggccagagagtgcccccgacaccgtctacagcgt

SEQ ID NO: 34245 - DNA, 987 bp, Bovine  19866880554008
  misc_feature (1)..(1): n is a, c, g, or t
nacttggaaacatgtaaattgtttttacaatgggtatttccaatgtatttttagctgatctgaacttccttgataactcaaccaggaaaagaagggttatcatcattaatcttagacacggaaaatttgactcaaaggagtaccttatctacagacatcaaagcagagaaatcagaactagtatgcagtcagggctgggctgaggataaggtgagtctgatgtagatgtaaagtgggaccttatattgttttttaattttgaaattttgtccatcaagaatttctttgttaattttgattttttcaagtattgcattaaatattatttatcttgattactgagtcttttggcagtcttagattttacatccaaggcaggtgcctcaattgcttctgttaatcctgactctattaagtaatatgattcttgcaccagtgctattaaatgactctgtactactgctagtcaaatactctgctccctcaaattctggatgcaagagaaatatacaatataggcaaatacaatgcttgccctgattgttcagtgccttaatataccaagtcattgatataccttaaaaacatacaaggtgttgtaatctattaaccacatgctaatcacaatccaatttagcataataggaaaatattggttttagcaggtttagaaaggttttcagccacatttctccaataagataaaagtttataattataatttgattgaatacataacctttgtcaagtctttcatggttaacttaatagaattccccagacttaatgtaaacaagcccaaccaaatagaccatgtacttaagagtggttttgtctatttactataataaagaacaaaatgactttagaaactgaaattaggttcccaagaagcccaagtattatgaccactatggcactgataaaagattttttttgaattataagaacttgttatgctaatgttttaataaaagctactttcaa

SEQ ID NO: 34246 - DNA, 1096 bp, Bovine  19866880566247
  misc_feature (1)..(1): n is a, c, g, or t
ngtgtctggcagacggtcggtgcccagcgtacctcatgcatcaggcattgtgctaagcctttgcataccttgtctcccccttaaaaccgctgtatgccatagggccttgtgttatccctgttttagagatgaggagacggaggtatgaagtgattaaataagttcctcaagctgcatggcctaggaagggtagcgctagagttgggatctgatcagagagcagagcctggatgcccaagcccttggcagggtttattggtggcaggagggccattggtgccagttgtaactgcagagcttagtactgcccgaaggatggcacacttgtctgtgtccctgtctgcccgcctcctggaaggctgtgaagtttctttcagctgtgttgcaactcccaggtaaagggccatgggggtgactcatgctggctgggctcaggtggagactgggaacccaggcagcatgtctgtgctcgctgggctttttaaatgggtcctctctctctacacctgtggatcatgtctctttaatcgccctcacccatctacagagatcagcaggtcgtggggcagagggtttttaacgtctccacacacggaatgtccagaaggcacctggatgagatggaaggactgtggtccagggtaggtcagcagggtaccatgagccagattataaggtcgctaggaccctccagcaggagctaagcctcccagtctgagggcgtggtctgttctaggcctttgctgaaggattcagaggtgccaggttttttagagagacgctacccaagctttcccccactcctgcccatttcctactcctgtgtggcgtgggcacagcccagggctcagctgggctggcatctcttccccttcttggattggcccagttcttggtttcttggcagaggagattgaaaacagagactcaccaatcatatgtgacataatgattgtattcacaataataacagtaagtaatgatgactgtaatttatttcatgtttgtatattgcaagcatagtgctaagagttatctgggctggctgatagctttactctgagactggctgacctgggttcagatcccagcccaa

SEQ ID NO: 34247 - DNA, 1349 bp, Bovine  19866880600207
  misc_feature (1)..(1): n is a, c, g, or t
naggcagacctgagacagtaatccagggctattcacaatcaatgccagcctcctcttttaggacagtcatgaggacgtttgaacatgtctgcaagcttggaagagtcagggagagaaaagaaccagggggaaacatcagaagtggacattgccgtgaaggagcaggacccctggcctccagcggtcctagatttgagccttttcttggcagctgcatggtcttgaggggttcctttccctctctcagcctccgtgtccccatgtttcacatggaatcataatagtgcccaccccaaagagtggatgtgccagaaagaacttctgtgagttgctggtcatacagcaaatagtcaaccgctggtgctcctggccttgtaggaaatcctcagggaggctcagagaggagcctctgttttgaagatggacattgcaagggactgagctcttgggggcatgagtaagagcttagaaagtaccaagctccagtgcaaatgagccgacccagagggcgtgggtgaagggactcgcatttgactgacaggagcttcagttctcttcttctgctgttctttccttacagccagcgccatcataggaatcatattcatcaaagaaaaatggaaacctaaagacttcctgagtaagttcattggtttgagcctgtgttcatagttttattcttgtgtcttttttcactataaatccagctcctcccaatctagagatcatctgtctccttctcctccgtgtggttctatatcccaccctcagcaggctactgagggctgggttttctaatcagtgattcccaaacctggctatccatcagaaccatctgtgagactttttaaaatgggctttcattcattgcatataatcagtatttattgaacatctattgttgggattttagtaggcccggtaaaaggctccctctttccctgagttttaaagcaatgggaactaaacaaggaagccaaacaggagatcagaagttatgccttattactaacgaaagttaggttagaacatgcagccgcatgaacttgtttacattctcctccggtatgccccagcccccacctagaccttaggccagcctcccaaggaaatatttaggtttacagaatggaacacttatccagaattactgccgtacattcatatcgtgtggcagagaagggagaaaaaagaacaaaacccgagtgtttaaattcttttcatagattatctgcattcagttgagaaatgtggaccaatggggcaagaagcagaagtgtgtgtccattggaggcccctccacacagaaacccaaggggtggggaagaagttacctactaagttccact

SEQ ID NO: 34248 - DNA, 896 bp, Bovine  19866880639816
  misc_feature (1)..(1): n is a, c, g, or t
ncacactgctgtcacgcttcaagtcacctataaatggccaagccttgaggggctgaccttgtgaacctccccctctccaaaaggggcctcaggggctgggctccatctcatacactcacagctaaagaggtggaggcctcgggctcaggaaagggctcatcttcttaatggcagaactgtggtccgtccgtgcttctgggtcagagccacactgggcctagaaacttctgcgctcaccccagtcaggccaactcgaagccccccaagtcttcccattgcttggtggtccccacagagagatcagaatccccttcagcagggtgattcttgttcctccaggtcacgcttccatttggcaagggggtgtgctttgggggagccacgtggctttgatttaaatctcaccctggaaaaacaatggtttggattaagggaagaaacagttggtgaaaagtcatgaaaagaaaggagggcagaagcgggaccttgtagcaaaaatgatccccaaacttttaaaccctcattccagaggtttctcaaagcctgccatccagccatgacctcccacgccagcacactcctgccccttcagtagctgggcaggtgacgctgtgtgtggggtgtcccccaggcctctgtctctcctcttacagaggagtaaactgaggctcggagagggtgactatggattctggtggcttccatgcagtgaagaataaaggtggggggaactgggggctctggtgctcccattttgttggcagggagcttgccctctttaggccttcttcccccctgagaaagggaagaaaaggggattaccgtaacttatcaccactggagctgagtaaagcccaggaagcccacacaaaggcagcctgttcagctctgacctg

SEQ ID NO: 34249 - DNA, 1056 bp, Bovine  19866880701489
  misc_feature (1)..(1): n is a, c, g, or t
nctggcaaacaatatttgtgtagttataacaactaaactatctattgttgaagctatttttaaatttagtttacttttcaaaaacaaatttgatgtagtaacaaaataaatacccatactgaagctggcccttgagaatcagaagtatggtggtggaaatggaagactggtgcaattacaggagggcacccatggataatagaatcatcttatcgtaaggtctgtgtgttcactcagtgtctctgattctgtgactctctgggtctcaggtgtgaaaatagtttatctggctcttttgacaaagtgaggactgtatgcaaaaattctttggattctgtacaatgaaatgcattaaagacactgttatttttgcttaaaaatataaagtaaaaaagtaaaagtttcttgcaattctactttcttgtttccattaatagtttggggtatatccttccagatcttttttcttaatgtacactattatccactcacaaatacccactcttgccctcaccaggaatgactcagtacagtaattttaatgtggggacatttgactccggataaggaatgaataaactttccgttttttaaatgaccaagtactgtaatggataaagcaggcatttgccccctgaaccttgatcctgtacctggttcctccctgcttctccctgtgacacgttgggcccactgcagtatctcatctcaggcatgttgcgaagacctaacgttaccttggattaaagaaagtcaatatgtcagtgtgatggtcaccctgcaatccagccaaggaccccctcgaggctccgagaaaagaggtgtacccacttacccctcctctctctcctcaggtactaccatggcatggaatatgagatggacctcaccccccttgaaagtcccacgcacctcatgaaattcctgacagagaatgtgtctggaaccccagagtacccagatgtgctcaagaagaataacctaatgagtgtggagggagctgcacccacgccgggcaaggcagctctgctccctgcaggccccagcaagctggaa

SEQ ID NO: 34250 - DNA, 4020 bp, Bovine  19866880705636
  misc_feature (1)..(1): n is a, c, g, or t
ngaaatcggcaaatgtgtcaactttttaaaagatgtttattcttgctcaactggcactgatattttttccctttggtattcttgctcatttggggccataaactccacccaaagaaccccaccgaagctaccaaacagtctaaaattatgatggattatatatagtgtctttaggaattggcgctttggtaattactgttacttttaattaaacactaatgctctctctatatagtttttggcagaaagaacaatgcttaatatcccaaagaaaaggcgaagtgactgaacggtgttgttaggacaaggttcattcaatgggacctcttttaaagagactttccttttactatatgtaagtttgctaaatgaaataagacagtgtcctttaataaataaaagaaggaggtagcatctgcactacacaaaccattctcaccaggaaaataggacttgaagtgaaaaccttagttttagcatacagagacctttgcaaggctggtgtgtccaaatgctctcttagaggaactccaaaaactccaattaaccataagggtaattagcacaaaaatccacccaggctgactttaggttcctggcacccaacaatagtttaaattaagctatatcaatctattccaaccactacaaccacccaatccattgtttctgagacactgtaattttctgtatagctcccttcatggtaacttctcagaagaatataagaacaaatccattcaataaatatttaatcacacacccactttatgctaggcacagttaatcaaaaagaaacagaaaaagaacaatttaaggacttactctggtttatcatcaaatctctgatcaactctgaaagctagtttttaatactttaaggaatggcctccaaagtaatcatttataatcactgtcataatagggttttctgatctttgttcctgtttttgttttgttttgttttggaggttttttggggtgtaggtaggagggactggttctacattgctaattcaaccacttgtttttgtttttttttttaccttcattagcctctggcctggaattcttgatatatgcagagaatttggcaaagatgtccattccagcagtatttgattctgggtgttttggtgaaagctttaagtacctaaatgaaaaatgtaataatggattatacagcctctaaagatatattagcataaatcctctcaatcaaaccattgtgctagcagttactagacatcttttaacagttattaccctaagaaatgccatcaccagttttccacagtacttttaagatgtacttttccttaggaaacaaagttctgcacagtgcttttgttcatgtattaatattcttggcatccaaagggcatccgcaccccatctccattttataaattaaaattctgggaaaacagtctacttgttcagagagtggtgccaagtcaatgggcgtcttagtaagagaactctagagcagagctgtccaagagaacgttctgtgctgacagaaatattatatatcagaattgtccaatatggtagccattagtgacttgtggctatccaaataggaatctaaattaatcgtaataaagttaaaactcatttcctcagttgcactagccacatttcaactgcagagctttctcagataggaatgccaaacagacatctttggtatgccatgcactgagccagccgtgtacaacagtgccacagaaccctggcagtaggaaaagaatctagactggccaaatttaggtcaaggacaaaaacagcaggaggctgatcattcactttagccctacattcaggattttccaaaacttcccatatatgaaatactgtaagggtaacactgagcaacagaaaactaagacagaagaatttttctaacaagtgctctgttgtgttattacaaagtctttctactttgagaagagacatttcatgacacaacaacttttttaaaaagacacacacgtgtattttatatacttaaatttcaaatacatatacttaatttttatttcttccttaaattggaaaatatacatgaaaaagcccaattctttacttttcccttcagtagagtttgcagcaactcatcagaactagagaaattcagactcttagcaccactttaggaaagactgttctattcttaaaagccctgcaacacttccctggaaaatggactgggggcagtaaaactacagaaaaaaaatcttacattgaattagttattcagatttattcatacattttaagatgctttcttaccacttgtctttaaattgaaaacaaaaaatttttaggaaaaaaattagtccagttgcaagttgtagtttcaggctagtttttatagtcatattttttatgtttaccattttaaattcaagaaaagatatcttctaaattagacatagtactatactgggaaggagaatataaaatatctattgaatacctatatgctcaagttatttcctttttaatatctatttttaagcttgaaaggttctttataattagaagttaaattaactacataatgagcttttcagtgaatgattacagtaaataaatttcacctgagtgtatgtaatgtatattatatgtgtgtgtgatgtgtgtgtttatatataaatatacatatataacatgttttttttcctgttaactacagaaaactttatcatctctctctctttttttattcccctctgcctgagctgaaacagttaattccagcttcaacatccctggatttcccttgactatgaaaataaccagcctgtagtttaaatagttccaccacttttaatacagtaccttcattgactcattccaaagaaaatatatagtgcaaggaacaaaagcgcctcttcagtacacctatgtcttcctctagccaagtttccaaatttactcttcttttccccaaccaatatttaagagtacctactttttctaatgaagtaaacttcataattctcaaagtaacttatagggaagtagatttgaattatagattatttatatattcattttatgcatatatttatttattctaataattaggtacctactatgtgtcagaagttgtactagggttataaagacgaacacacagaatcatacttaccagagacctattttaatgagcaggtaaaaatgtaggacttgcaatcagcatatcctttattacatggaaacatatactattacaactctttaaaaaaaacaaaacactactgttctctaaaacagggttaaacatgccctattcttctccaagacaaacccattaaattttgtagtattaatttaatgcatataatagtataggcacaccgcgagggtacaccggagtacaccgaagactactcaacctcaatctctcattttgctgaaaggaaattatatttcggaaaacttacatagttaccctcaaatcactggactaattaaaagtatcatcaaactcacatctcctgtccccaagtccagtgctgttgtttttgtattattacagatcaagttcaaaaagataaatcaaatactaaaccattaggcccaaaatcagttgtcaacttttttgcatttcccccaaacactggattttaataattcattagtagtagtactggcaaactgcttgactaagcaatacttttcaactattatgaacatttactttaacatttaataaaacaaaagtaaatgattaataaaaggctatgtgtcaaccacagaacagacatgcacatccagggcattgagactttaagatcagtcctttattacatcctatatcacatcactgactagtatttatggcagactagctaagagtatttccatcctttaagaaaaatctcagacattttctcctttcttgtgttaatatgagaataaagtgtggttatacaagtctattaaataactcctgtaaattcaagtttcattgttatttctcttaaaaaaagaaagaaagaaaaa

SEQ ID NO: 34251 - DNA, 1653 bp, Bovine  19866880730583
  misc_feature (1)..(1): n is a, c, g, or t
nacgtgcttacctggggagacgtggatgtctgggcttcacatgccgcccagaggccccagtcatagtcaccctgtccttgtcgaggggtgggatggggaatgccaccacttagagcttctttaaaaacagcatcaccttctctagcctggggagtcaagctgtggttgtcaccatgggagagggggatgactcatcagacttttttttaatttaatttttattttaaattagagtataattgctttacaatgctgtgttagtttcaagggctacagcacagtgattcagttatatatatatatatagtcactgttttcagattcttttcccatgtagtttattccaaatgttcaatagagttcactgtgctatgcaataggtccttgttgattatctattttataaatagtaatcaatcagttcagttgctcagtcacgtccaactcttttcaaccccatggactgcagcacaccaggcctccctgtccatcaccaactcccggagcctactcaaactcatgtccatcgtgttggtgtgttaatcccaaactcctaatttatgcaggacttctaaagaaacgtggtgcaattcacaatcagtgaccctcatctcacttaggtcttcaccaggaactgccaaatgccaccttcagcttactccttctggagcccagttacttcggcgttttcatcacctctccaagcgaccttattccacaacacagggaaaatcaatggtgtgcttaattattaatcaatgtcatgaggaattaaactaaaaccccaagacactctgttttgtctggagacgtcacagagctgcttcctccgggaggagggaactgggccttttgtttggtttgtttacttacctgcacacatctggcctactaactacacggcatggtgattcatttcaggagaggctgatcagatgggatggcatccaaggaggaaccgggctgggaaaggaggctggcatcccagaattgccttcccggtaaccgtgacagcaggagtctccagctttccattcaccctctgtctctttcataatgagtttcctccccagaaacctcattaaccctgagacttcctgaacattttccgcaggtagatggggctggtctttgggggggaggggggtggtttccaggaaaaccctgcgtgctctgcatgcaccagggaaggcgacctaacctcctcgaacctcagtttcctcacctgcgagaggagtttccttgtggagtgttgcagggtttcagtgcattgacaccgcgtcccaggcttgcttctgggcctcagcacatgctgcggactctccctgagacacagttcccctctgcccgccacagccgtggcccctccacttgactgacactgtaacaatccttccagccggaagcaaaagctgtttcttcagagaacacccacagcccggtcaggcgctgggtaaagaacacacacagtccctccttctttccctcccagcctcagcacagctggggtttgagtaacgcctgcctccttgtcccagactggggaccctgcggaggagggttggatctgcgtagctcatccctccgtgcccagtccctgcacaggtctgagcctcggctcacactcaggaaacatcagcgtccctttcaaaa

SEQ ID NO: 34252 - DNA, 1294 bp, Bovine  19866880740016
  misc_feature (1)..(1): n is a, c, g, or t
nccttgagacgtgaaatgtcaggcagaaaccacgtgtcagaccccaagtgaggacctctccactgagtccgctcaaccttagagctatcaggccactaagtcttggagcagctggttacacagggacagacaatcagcacattggcctttcctccagtgccgtcttcccaatgctaccccaatctaaaccttccttggtcatgacacccgactgtcttctcctccccaggatacctcttccacctctgactacttataataattgtttgcaccaattatgatggcttgagatccctggaccgacttttcttttaaaacattaaaaaataacctgtaaacagaaatgttttattatttctgaaaatggaaaacttgccatcaatagaaagcaacaaaataaattagatgaaacagatcaatgtcattctagctggacagtgttacctcccaaattgtctggtcccaaggcaggtcttctgtttaaaaagatggagtgagtgttgtagccagactctgagattcagaatccaggcagttacagcagaccagcgtctggatccctggatcacatgaccgtggtcatgtatccttaaattcagtagttccacgaagcttcatgattccttcgccttcctgactatggcaggtgccagagctctccagtctgcagtgttttggaagcctccggcctttccaatattttaaaagaatcgggtgcataaaatcccttcctaccaaaaatgctgatttctatttctgtttcttgcattgaccccctgacttcccgacagctcctgcagcagctcctgggtttgtttcttttattatttaagtagttccttcagagtattttcaatgtgggtctttgtgtgttccaccttctaaggctttatttgtctaagaatatttttagtatgacctcaatgtttgaatgacgatttggctgcctttaaaattctggattgaaagggctgtcttctttcaattcttataataacattattctttgacttccttgatcaagtgttgttattgagatgtataacatcagtctaaatcttggcactttgtaagggaggctatttctctctgcccttcctctttgtctttcagattttcaattttatcacgatattttgtgtggatttttctgctgttggcgactccatgagtcctttcagtctgatttccttcattttcctttaatcctggaacatttaatctccattatttcttcagttcttccttattctgcattttttgtcttctctccttcaggacacctacttttact

SEQ ID NO: 34253 - DNA, 1018 bp, Bovine  19866880870898
  misc_feature (1)..(1): n is a, c, g, or t
ntgggtgaggggtggggagcttcctggtagaggtggcaaacgacggtgagcagaggagggtctgtgtgcaagcccagagacctctcttctctagtctagcagtcaagtagccagagttccctaaaactccagctgcacggactgaaagggcagcacagctggctgtgaacatctgtgaatacatctgagaaccagagatggaaggggcttgggtcaagtcacacagggagtctcctggcaattctcccctccctggcctcagctgctggcacgtcccgcagttgaaagctctcctagagccacttcagatgtctgctctgctctctcccgctccctcctgctccaggcttctctgcccccgacggcccgctgggacactaggcatcctctggacagggaaatttgagggcagaatgctgagggccgaatgttcccctcacctggccactgagagatctgtgctaggattctggaaacttctcagaggatgaaagactctagtctgctccatcaagaaaaaggacctcaggaagtgaggccaggagactgtgatttcaactagcatccttcccccgccccctgctgctgtcctcctgttcctctctagcacccctctgggtcttccagccttttccttcctccccttcaagggggcccttgggcaggaataaacagtctctctgaaatagagaaccatggaaatagacaaagttggcaagccagcccagctctgcctgtggctagctttgtgccccagggtatcgggttcctatctcctagccttagtttccccacaagtccagtggaaatccaccccctgggagcctcatgagacagtggctcagaagtgctttggaaaacgtggagcgaaggacagccagggctggcgagcgtctgccagggaccacacaccctcccgccagacgcctctggccgtgggctgtccaaatgggtgtctgcaaagcagcccggctgggccttgttctggtcaaggaagagaaaggctgagttaattaaa

SEQ ID NO: 34254 - DNA, 1613 bp, Bovine  19866880903948
  misc_feature (1)..(1): n is a, c, g, or t
naggaatcatggggtctaaagtcactcctgagagctcccttaaaagaaaaaaagaaaaatctggaaacagagaagcagggttgttgtttttttcttccacttatcaagttgataaagatgaaagaaaatggtgttggcaagagtgagagaaagcacgctgtctccttgctggagggagtgtgaatcagtctagactttggagttagatttcaactcatcctttgatcttacattttcactcataggaatttagcctaagcaaataatctgtgtgtggaaagttatctgcaaggatatgcatcagagcattgtttataattctgaaaaattagaattaatataaatacccttcagcagagtctcagtaaagtaaattaagatccttgaatatagttggatattgtgtcactgttcaaaaggatgctacagaaagccccttaacaccggggaaattacttcctatgcttacagcacgattgttagcatttttgagtctttactgtgttcgaggcactgagctcagttgtttagtctcctttaatcctcacaacaaccaagtgaagtaagtactattatcttgattttacaaacaaggggagtgaggcctcgaagtgaaatgtctggtggtcgttcagtgtctcagtccaactcttagtgaccccagggacctgcagcacaccaggcttccctgtccttcaccatctcctggtgctttctccacccaaggtcatttccagggggggcctctgagctggtctcgaatgaacctgggtcagattcccaacttttaagtctttcagctactctttaccgttagtaaatgagtcctttcctatttttaaaacccatttccatgagtggagaaagaataggaaaggtacgcaccagagagtatcaggggtggtaggatcaggggtgatttataaaaagtttattcttttcgtgtatctgtcaacattatttctcccattaataggggcaaaaaagagagagagagagactctttatagttattaaggaatagcaagtcagagaaggcttatccctgaactgagaaggaagaagcggccagactgctatctggagattctttctctgttgccaggaaccagccagaacaggaggcagccagagagagccgtgccaggaagaatgtggccgctgtcctggaaggagaggacccacttggaagaacagaacccggctggctcagcccctgaggctcactctctccagggacctggcctcgggccctagtagcccacctcctaccactgtgggccatcaccagcccacttcagaaaaagggcattaaaccagatactgcccacttccaaataaaagagagcttcaagtaaaagtaagtgagaagcaccttagtccctaccaccaccctggcaagcaaggctgaaaatgcattttcttctgtatttcatctatctgaaggggtcacactggggacttgggtattcagatgacagtctctttgaggaactacagaggaagaatgtacaaggcctggtttggacagagaggatcctggaaccccggttgctgaatagaagaagcgagtgtctggggtcagggctgccatcctaggttagagggagctg

SEQ ID NO: 34255 - DNA, 1668 bp, Bovine  19866880907177
  misc_feature (1)..(1): n is a, c, g, or t
nccctgagattgagactcctcttcctgtgaagcccaggtctttcgggagcacagtttgagaagccctggaagtttgagaagcttttccagatcattctctcaatgctatacctttatgctgacttctaaacagcacagccctgtggctacaaagcttatgaagatgttttttgcatcaatggaaaaatgtattaagtcctggcaggtgaaatggcagaggcaaggtttgctctgatctctgtggttcttgcagggccacaaagctgacaaaattaggttaccgaatcagttgtttgagaacatccatcactacccccgggcaagaacctgtttccagagacagtggtttctcaaaatcggaagggaaatgggacacctttacaaccagaatgggcaactgaagggtctaaagtgctaagctggggatcacaggcccggggcccagttccctgctgggctgctccccaccaccattaatcagactccctagacagtgcaccatttggctctttgccatgaaaagggagagggaccagagacgcccctgactgggcttcagtttttgagaactcagtttcctgaccacaagacggggggcagtgggggcaggaggtaggtgggagacttggagtgagaagccagtcactctgagtttggggtcacaggtgggagatgcccagtggtgcccacacccgcccggagcctgggtggatgggagaattctctggtcaccgcgtgatgagtgccaacgatgcggcaggcaccacgcatctgtcggacctctcgccacgccccagggggtagctgcagtggggagactcaggcacagaggaggagggtgtctccccgccggccacacaactggtgaatggcagggctgggatctggacccaggtctgtctgatattctagattgtgaaacgcgtgactcagagactgggccttcaatgacgacgcccttccccttcctctgcctctccaacaccctcggccaactagatttttcttcaccggggcccaccctagggaactcataaaccagaaggctgagttctgcggaggcggaagcccagcggatgctggagaaagctgcgagtctccgctccaccaggtgcgctccaagtccttctctccccaaagccggatgggcccttgtgctgtcggccttcatgtccgctgggacctgacgttgcccgtttcacggtgtccagagataatatttccagctggcctatcaccccaggggcagtggggtgatctacacccaaccaacctctgccctccacccattcttgtctccacccctcctggtgcttggtgcaaagcaagcaggtcatagggcaggtggcttctgacggctcaggctggtggacggcttctaatagctggggttttccgaggtgctctgaggaccctctgctgccccagcaatgatgctcccgggatttcaagtcttgatgatgtcttgggtccccagaaagctcagcagcaaccagactcggaggcacagctcacctggccaagtaatgccccaagggtctgacctcggtcctctggaggctcttagccccccagctgccagcaccgctgtcctcactttctgactccctccagccctcttcctcctcttcttcctccccctcatcatcctcaggactactgtcccag

SEQ ID NO: 34256 - DNA, 925 bp, Bovine  19866881020602
  misc_feature (1)..(1): n is a, c, g, or t
nctgaacaccctccctttcgtccccattgtacagatggggccactgaggcttcaagatgaaccctacgctaagtgactggtctgggatataaagcaggtaatgtggtcccggagcacatgttccaaccacatgctaccctactttcgcaaagggcagaattcctggaggggagttttcacggcacgtcggggaaccgcttccatgttgctgtggaacccccgagtcaaggcctgggaggggcgaaggggagcccaggcggctccatggggccagggtgccagagagtctcagagccacagggccccggccttcacactgggagaacagaactccctgtgcccgaggaaagaagatgggccttcagaatagacctctttcattccgccacccacagtgagagctgggggcggggagctctggcccagttcaccgggtcaccaggggcccagccctttcacgccgggactcagtttcccctctgtacatactgctccctgaggcccctccagcttcgaaagtccctgactttagactccaagaactagccactggcgaggaagcgggggtcgctggctcggggcccctccgtctgctccttctgttcgcagggtttctctagtattctctgcctcgcacacttcagggcagcggctcaggtacagcctctgtcaggagtcttcctatcctttggggctcagtccaagagccccccaccccatctaggaagccaccttctcccagcacggagccccacagctcctctgcaaggctaagagcagtagctagcagggatggaaagaaaaacggtggctgacacttactgagcgctttctccactgcagggtctcagcagctgccacactctgccttgtttcacctgcgtcatccccatggcgcagggcagggggtggggggcagcggggg

SEQ ID NO: 34257 - DNA, 1546 bp, Bovine  19866881070904
  misc_feature (1)..(1): n is a, c, g, or t
nagcacacccacagacccagcctgccctctggctggactcctgctcagagaagactccgctggccctggggcagaaggggtgctgcagggcagaggggcggggatcagggtttggctggggaaaggggaacttcctgctgggtgttgggtttcgggcagaccaatctaactgaacaaggcaaagtcttgggattagcttttgaagtctttttgctcaaaaataaggtctgttttatgaaatttcccctccacaagccccagctggacaggcacggcgggccaggcctcctcgctggtgggatggggagggaggcagcccagccgggtccccacaccatcacacccacgggccccgccatagaccacaaacaactctgtggagaggcggagccagatgacaccccctctttgcacctcagtcccctcatccgcatgctggaggagctgctggcgccccttgctttgtacttctgactgctgccaggttgtcaagtgttgcagcaaacagttcccattgaggggccctcaccgaggccacttcacagacccgccttggcccctccctaactcagggcctgggggacgagctggaggaggggctctgtttgtcctgtggactcgtgagaagtcatgggtcgcctgtgacgggaggagggatgttggcacctgcagacgtcagtttccctggtgttccagccacaccaggaagaggctcgcgagctgcccttgccaagggtggccattcctggtggagctgggtgcagggaggccagggtgctgtaggcgggtgggtctccaagacagcgaggtaagtcctggtcttgccccctggctctgcccttttcctccttggtcatggtggggaggggtccatcctctcccactgccccccacccccacccccaagccaatacacacagccctggaggtctggcactaggctcctttgacacctctcagagtcctattattgtaacaaatcagccaaaattccatgttacagttaaatagtatagaagacggtttactgtacaagcaagttgtgcattaaaaacaaacacaccaagcaaattatagtgcaaagcaagtttccatccctcccccaccctcttcccggccctgggacggttttaaggaaggtatgcgtatagcaagtatgaacacctcagcatgacaatatgtcacaaccaatctgtacccatcaccaataggcttacagtaatatggtacccaaaccccttgattccttgtgctctctgagtcagtgtttgcctcgtatgactttaaagcagccttgtaccaccccaagctgtctgcacccaccatgggcattaaaaaacaagactcagcactgctactatcacttttaatcggggactgggcagggggcgagggggtcaatttattttccggtccctgccccagccagggcttggatatcaggaagcgggtagtcatctgttggggggggctacaaagtgctgggccctggggacccaagggtgcctccccctggggcctggggcccgtctacaaccacagggaa

SEQ ID NO: 34258 - DNA, 837 bp, Bovine  19866881088868
  misc_feature (1)..(1): n is a, c, g, or t
ngggtgataaccagaccttcagaacagtatgtttgcaggtgagtacatcaaggtttgcagctcagaaatgacctgcccaggtccatgctgtgctgctattgagaggggttgcatcccacaagggcttccctggtggctcagaggttaaagcgtctgcctccaatgcgggagacctgggttcgatccctgggtggggaagatcccctggagaaggaaatggtaacccactccaagtactcttgcctggagaagcccatggatggagaagcctggtaggctacagtccatggggttgcaaagagtcggacatgactgagcgacttcactttcactttcactttctttccacctgatgaggcagggctgggggatgggaccaaggagagggcgggaggcctgcccaggggctcaatcctggctgcacgagggggatcaggctctagttggagacctttagccctgaggggcattggtcacagacagctcctgtctggacccagctggattctgcaactcacgaattgttgatctagaaaaaaaaatgcctgtacttccaagagcctcttgcccagagaaatgtaattcttgatggtctgaaactttacaggcctgtaatcatgttgcttcttggctttgtgataggtagagtggtcaggagcagagaaatgtgtgtggctctgtccctgcagccaccgggggcccgaggcttgggtgctgacagcctggcttggcctgcgcccgtctcctgcatcccaggtacctggcttccccctcaaggcgatgggctcgctgggctccgagggatcgctcatgccgtacggtttatcgcccgcactc

SEQ ID NO: 34259 - DNA, 1509 bp, Bovine  19866881089152
  misc_feature (1)..(1): n is a, c, g, or t
ncgcttgcttaaaagacgcttgctccttggaaagaaagctctgacaaacctagacagtgtattaaaaagcaaagttgcgactttgccgacaaaggtccatatagtcaaagctgtggtttttccaggagtcatgtacaaatgtgagagtgggaccataaagaaggctgagaacgaaagaattgatgctttcgaattgtggtgctggagaagactcctgcgaatcccttggacagcaaggagatcaaaccagtcaatcctaaaggaaatcagtcctgaatattcactggaaggactgatgctgaagctgaagctccagtactttggccacctgatatgaagagctgactcactggaaaagaccctgatgctgggaaagactgagggcaggaggagaagtgggcaacagaggatgagatggttggatggcgtcactgactcaatggacatgagtttgagctaactctgggagatagtgacggacagggaagcctggtgtgctgcagtccatgaggtctcagagagtggtgtataacttagagactgaagaacaaaggcccagtaatgccacttacagtgtgcacaccagagaaaccatgcatatgggcaccaagaatgttcctaacagcattgtagtaacaaaaactgaaggcagtccagattccagcagcattagcgggattgtggtatagctgtacaatggaatattatacagtcctgaagagggtggctcacagttacagcaacaaggaagaatcttaggaaaaaaggcaagttatagaagaatacatgcaacacgattcagtctttaggggagcttataaatgttgtaaaactactaaagaaaaacaaagataagcttgaaattccagaaaataattactttgaagctaaaaaggaataggatggtggtaaaaactctggcatgctgaggacttcaaaatgataggtgatgttcttgttctatcattgggcatgttcttatcattttataccttacattcattttataatactttacatttgattttataatatgaactctacataatataaccttcaataaacttatttttaaaataagtgcaaactgcagaatttagcatatgactaacaggacacctgttcttgtgcacctacaagaaaagaatgcttctttggggaaaaaaacaaattataatgaattctactccactacttatgtttaatgatttagatttcctcttggtaaaaggttttccttctccccccaacccttattctctctgctgtgctgcccctcactttgtaggagagatttgaagcgcttttcaccatctatgatgaccaagttcattttcagttgttcaaaagctttagaagagtccgaataaatttcagcaagcctgaggcagcagcaagggctcgaatagaactccacgagacagacttcaacggaaggaagctggaagctgtatttcgcacaggtacttacttcattgtgcagagggcagagtgggctgaacttgtttt

SEQ ID NO: 34260 - DNA, 1080 bp, Bovine  19866881105178
  misc_feature (1)..(1): n is a, c, g, or t
ncagcaaagacccagcacagccaaaagcaaagaataaataagtgttttaaagagggatatgcacacccaaatgctgctacaccttgctgatcacaagtgaggttttcgggaggagtctactcagcacagagcaagttaaggccaacctgccagccggacctactgccaacttgctgtgtgaccctggctaagccacaccccctttttgatcctctgctagtaagtgagggcagtgatgtcctggagtcctgccatatcctgtggcagggcggggactcaccctcaggtgggtgtcagagatgaggtctggagtgactggcttccactgctcagagccttcctcctggacgctgatgcggtagcctgtgacaggtccagcccctcggtagagagggggctcccacgccagcatcagggaggtggcccgcacctcagacacccgcagatcatatgggggccctgtgggaagaggggcgagagaaggagaagggcagccaggcacccagccagacagccaaatgccagccacacagtcaggaggcaagcgggtggtaagtcagcaagcttgtccatcttccggtccctcccaggcctggaagagcctgctcagggcctggtggagacctgacccaccttggcttcatggcaaagcttggtctggctcagaaatagagttaactcttcagagtgtatccagtagcacttcctctgggaaacatcccctaatcctcctcattcccagcccctacacggcattcatctgtttgatctctttggcatttcagtgtttaatgtagaagttcagggtgtggggttcaggtcccagctccaccctttcaggccatgcagactctgggaagttacttcacctctatgttcttgactcctcatctgtaaaatggggataataatagttcttatagaagagtgctgttgtgagcattaatgacagaattgatgggaggtgtcaatacaccttattgttagtacccagtaagtatcagttgtttataatgttgtctcaggcttcacacagagtgactatctgccatttaggtaaaaggtttgtgtagaaaacag

SEQ ID NO: 34261 - DNA, 1305 bp, Bovine  19866881136342
  misc_feature (1)..(1): n is a, c, g, or t
ntcttaatatgtagggtaacaattactttatcttaaattctttttgttcaatactggtgtgatttctgtctcctgatcaaaccctgatagtcaagcaaaatcaaaataatttgaactcctgggctattcatgcagctgctggcatgaataataatgttccattttcttcctttgctctgtgtcccacccccttttctgattagggtcatctagttcttattatcttccacccatctgcagctcaaattaatcaggaaataatatctcctcctaacaaattccaggaatgaaatgtttaaagaatggctccttccagcatggagtggttctgcttctcctgaaccaatctgcagttaattttgcagcctttgagtctgcaggtaaataggactgattctttctaatttgaagaacataactggatgaaatctttcaaagcattcaggcttcataagccactaatatacctcatcttacaaaaagattgcaaagaaatatagcaaactattgaataatctctagaccatggggttgtaagtgattttcattttcttatttatccttttgctttcaaactagccataaaagccaagtctagctttgataatgagaaatttctaaatattaaaaattgacatcactcatcctccaaccggtgttgaatacggtgctggttgcgttgtaactccttcttgggggaatgactgatttttccagggggagacaaattaaggtgttaccagggaagcaggctaatttaaggctcttcaggaaaaggtgagatctagtgtgtgtggcaggtcatgaatttaaatacctactataccccgctactatgagcctttgagacagagactgagaccaactggcaggcacatttctattttcaggcctcctgctttatcagtacgtactctcagaagcagctgtttcctccctccctttctctcttccacatttattagcacctaccatacacagagccccggtggctcagacagtaaagaatctgcctgcaaagcaggagacgtaagagacgagggttcagtccctaagtgaggaagatctcctggggagggaaatggcaacccatcccatttttcttgcctggagtattccatgggcagaagagcctggcaggggtccatggggtcgcaagagttggacatgacttagcaactaatactttctcttactacttacttaccatatactagaaccagatattgttatagaagctgagtatgtatcaggaacagattactccctgcccccatagaactgatattccagtaatgtgtgctt

SEQ ID NO: 34262 - DNA, 1174 bp, Bovine  19866881165054
  misc_feature (1)..(1): n is a, c, g, or t
nttggttttctccgggcagcctggaccgccccatgaggggaggcggggaggtggggaggcagggataagctctccggctttcccaggccagaagggcctttgccatgagcctgacccaaacttggtctgatggggtaagcctggccccgaaaggtgatgggacaggcccaaggtcacccagcccctgaccctctgactagtgcccgttccacgataccacctgtctaaacagaagacagagacacagagggacccggcagcaccggtgagtgtgaggctggtctcaagcactacatggcttcatcactggcatgaaaaaaatatattgctgaggctccatttctcaggcctctccaatgggcttggcatagaaggtgcccactgctccatccttcatgatctccttggatcttcaccacaactctagcaggcagattgctcttcccttcctatgggctcctcgagtgaggtaacagacttcagccttcatctaccagactccacagcacttctgcaacactctgcacgggcccacgtgtcaggaaaccccgtcagcagcagcaggggctttgctgtgcggcttgcacaagactcagttttcccatctggcaaataggtggactggactaataacagcagccaccacttctgtgccaggctgtgctctacccttctcttatctcacctgagcctcatgccaacctatccatccatgttaaggttacactcccaattttcagctaaggcacttgtcgaaggtcacgaaggcgggataagggcccggccactctagctgagagcctgtgcttctccttcactcctgtgccctgcctcctccctggcgccctcactgggggagctaccacaatcctagggacagtccctttcctgggacttgctggcagcccagtcccatcccagccatgcccccagcactgaccttggcctcctcatggacattccacacgaaggacagtgcattatacgccacctcttcaatgtgctggacaggtttgaagttttctttgcagtcggctgcaaagagaccacaggagaccagaggagagtcaggagacaagggatttgggggcaccatgggggagggggtcattagggcctgggccccgttcttggcagggacttggatcctctcccccaagaaccgtgcttcaaa

SEQ ID NO: 34263 - DNA, 1827 bp, Bovine  19866881198149
  misc_feature (1)..(1): n is a, c, g, or t
ngaaggaggccagttatccggggtggcccgtggggtgtaggagggaagctgggtctctgagacagcctgtggagtgtaggaggggggtttagcttccagagctccctgaggtgcataggacgagggcctgccctcgggagcagcctggggggcataggagagcacggggagtgcctggtgaggtggtcctccggagggccggaggacggggaggtctggctgcccaaggtaggcaatctcaggcaggctgtgccgcggtgggggtcccgggggctccgtggggttggagaccttgacttcggagtactggacaggctgggccagaccgccggagccgctgaggtcgaagacggggatcagggtgtgctcctggatgaactgcagaggccggaagggcaggatgtgctggacattctaggcagggagaacagcatgcccattagagtgccttctcagcccccgcccccgaggatgccatgggcgccacggtcctccccaggggtgggggcgagggcaaggccagaccgcctgagggcttttccaagatccacaaacccttcctcctttcccagggcttcctctaagtgctggggcctctgtgaaggaacagggctctggccctgttagctgagggccacttccagagtctggcttggccagggagagcggtgagtcaggctgtgatttctccaggaggtgggtattctggaaggagttgactcagatttgcaatgaccttgggtgatgctccccgggaggtgcttcaactgctcttcagctcccgaagggcctcatggagggagaaaggaggggaagggtgggggaaagcggaggcggggagagtttacaggaaacggctcagatgggctttgactcggaggggcttatgggtccaactcctccagccccagactgttcaggctctgcattgggcagagatgccgtgctgggggccagactcaggctgctgatgtgacacgtgtggtttgctaaggcttaatttagaaaaattagttgccaagacttgaaacgtgggagagttcacattaccatctgaacttctgacttcattggtaaaaaatgcaaagatgtggccacgctgggcctgcgatcccaggtggcagagcctgcctgggctgcccattcagacggggcgtgtgcccccttgaaaacgacatggcttttctgttccataccttctcttcctgatcccctagctcttgtcagtccaccccaggggctgccagccatgtctctaggttggcgggagaagagaaggagagccgggagtccctgggcccatgccctccccggggcccctgctcaccagggagctgggaggtggaggcggcttggtgatgtatctgtagctcaggtagcagagccctgcgaccaggaagcccagggagaacaggaaggcaccggagaaggagtaggtccacgtccgatctggttcaatgagaggcagagcaggaagactgaggctgtcagtgtgggtgctggcaactcgggcctcaatccccaaccccacctctcgggacaggcttgggaaggcctcttctaaccccaagacttacggggccagggtgagggcacaaatggagggccacacaccatacgtctaaatattaagaatttataaatcgtgtttttgcattgttaagtaaaatatgttatgtgccccctccttgacaaatatacttttcataacaacctggaaggcttgaagcttgcttcttggactcctcggggtgcagagtggaaagaaggaagtgcaggggggagttcctgcaagcccagccggctccagtccaccctgccaggggc

SEQ ID NO: 34264 - DNA, 791 bp, Bovine  19866881269452
  misc_feature (1)..(1): n is a, c, g, or t
ngggggttgccctggagacggccttctcagggcctgggtgccttaccccgaaaggaccagcgatggctgcaccagatgggcagtggcaggtgcacaggagggcttgacaaggctgcctctcccccttccacttgctttgcctcagctccaactacctagttaccagctgcaggccagcctgcagtcccagccctcctgggtgagctcggactcactgattctgccccgattcctttagcacctcgtgtgttcaccgagtcctgactcatccaacttgggcttggtgcttcctttcaactcaagatctcagctcacttgaggggacttatctgagaagaatgagctggagaggcattagaattgcctccctgccgcaacccctcacaaagattgtcccagaaagcctccagcagctgagggctcgcctcgtcttcccgtgtgtctgtgtgtgatggaaaatgtgtctctcttccttgcaggcagtgctctcagcgggacacggcagctccaacaggtatggagagaagcagccaagggcctcgcctccctcctgctgcccctcgtttgctcccagcctgccctcccctttgctgtcccccaagccagaggctgggcccagaggaagtacccaggagactctgcccccagcccccaagctagactcacgctcctttctcactgaaactgcccgagtttttatggggtttgttttatttgaaaagttggcgaatctttggcgggacacctgcttgtaaaacgggaaagaaaaagcctctgagatggtgatgcag

SEQ ID NO: 34265 - DNA, 765 bp, Bovine  19866881289497
  misc_feature (1)..(1): n is a, c, g, or t
ntgcaggaagacagtgaaaggcttgaaaactcggtccccttctttagcccgctgtcagctttatgttttactgggttagcaaaacttctttcttagagtgggaagagatctcagtgcttttggagaaggcaagattttttttccactattgaattataacatttgtaaaacttttaaacatgtgcatgttacaagtgagtacagattttgtatggggccggaggatatagtggttgaaagacttcagcaaagcatcatgaaaaatagggtgatttggaaatccattagactgaagtctgggaaataatgggagctctaaagttcaatgccatttattatttagacccagagaactacaggaggtgaaggtcagacagacagtggatctccactttttccctcgaatgtaaaggttatagtgaggggaaatgaattatatgctgcgaaagaaatagcatcagtccttatatctgtacttcagttattctttaaaaccagttatcttcatttgttctgccagttggttattcttacttccctctcccgctggaaagtacttcactgcattgcagtaattataacaggaccctttctgaattacatatgaaaagcgggcacaggtcattgaaacatacaaaattcaaaaatctaattttcacctttactatggcaccggtttttttcctcaccacaactactagaaaggagtaagattttctgcctgtaaccagtgaatggggaggaagtgataacagctttgcagga

SEQ ID NO: 34266 - DNA, 1265 bp, Bovine  19866881419832
  misc_feature (1)..(1): n is a, c, g, or t
nggaaagacctgaaggtgggagaagaaggggacgacagaggatgcgatggttggatggcatcaccaactcgatggacatgagtttgagcaagttccagctgatggtgaaggacagggaagcccggggtgcttcagttcgtggggtcacaaagagttggacacgaccaaaagactgaacaacaaatgcatataaagtgcttggaacgtggcctagctgatgctgctgtcagcatcataggagtgtctgagagcgccgtatattaggcaatgtatccaagttactttagttttgctacatgcaaaaatttctttgctgagttgcgatatgatactctccctcggtttttatagagggtggatatgacaaacagccgctgaagaatgtgtcggtgttactggtgagcatgctattcaccaagttgcacaatttcctttatctcaagattcccatgctttattttgcccagagccaaactctagaagagattgtgtctcttgggactaatacacatgctgccttgggacagctccatacctccttggaaatgaaaagttgagaaatgagatgaaatgtgatgttcacatggtaagcccaaattctaggtacaatgagacttctttttttcctgttggttgctctatttttttttttttaacagagtttttaaacgtcattttgttcaaaatagaaattgttttataggttgtttctgatcttaaatatgtgtatcttgactgtaaacaaaaaacagtcaactttttgatgtgtccccttgcagatttacatacatatatgggtgtgtaaaattttacttgtatctgtgtgctttggaaatgaaagtttaggaaaaagagaatcacaacctactgttttatttattattatttggaggctgtgatgagtcttcattgcagcatgcagggtttctctttagttgtgaagcaaggacttagttgccctgtggcatgaaggatcttagttctccgaccagggaataaactcatgtccctgcactggaagaaggattcttaaccactggaccaccagggaagttcccacaaccttctgtcttaaaatccaccttttactcctagtctatcacagacattttaatatattaacaataacaatatcttaattgattcaggaagatatttatgatatccataaatattttccaggccctttgtctagacactgagaatatagaaatagaccaaatagaccaggtctcttcctctctggagttatcaggctataacca

SEQ ID NO: 34267 - DNA, 1838 bp, Bovine  19866881507287
  misc_feature (1)..(1): n is a, c, g, or t
natggcctctttgtgtgtgtgtgtgtgtgtgtgtgtgttttaaatcattccagtgtcaggtatcataatacatttttgcaagaaattattctaacttttaaagggacagatggcataggcatcttattgatgctggagtttggatttgctttctttttcactttcctacctcagcgagtcttaccctactttgactgcccttgttgtatctattttatcttgccaacagatagatgttcaaataaagactatccttgcccaggtctggtcagagacactggcacttcatttagctacttgaggtttggaaccatcctcaaagataaagacccacatcttacaaagaagagaaatggagaggagaggaatattgccaaattcccggcctgctgtctgctttctttcaggtcccgtcagatttctcagtaacgtgaataacccagttagactaagaggtgtaaaaagtcctgctggggcaagatgcatcataagaattttgtcttggtttgggagtccactccatgctgacaaaattggtgatcaggttctgaatatgcttctagcttctcttcccactcagggagtgggtagcagtgggggaaaaaaattacttaaagatctaggctccagtttacctgcatgaaacctgggcagaccattactctcctaattagaaccacaggtctttggagagaagggcccggatgtccaatatatgattaagccatgaaggaagcaaagtactgagcgattagtgcccttattcagagaaggttctcaccatagaagggaaagtgcatgtccctttcttggacaacgacacgctgtcgaacacaggggactgatgaatgacgttgtagaaccccgggcctgggatatcatcctgaaagggaagagagcatggtgtcatcgcaagactttccatccacggtgcttttctgcgagttttacatccatttaaccctaagcttcattggaatcctctgggacaggcggagatgttgcctcccggatgacagcccagctccaccaattcctgacctgcccagtcaccatctaagttcacaagtgccggggctgggactccagctcaggtctggggccaccccccacccccaccaaccacagcccttgttctttccactactctgtactgcattctaggacgatgctatggtttctgcgtgccaacagacgcacgagcagaaaaacggatcccgagtgcatcagcggctgtgcaggtgagcgtgggttgatgggtccgccaaatccagggcgagggaagggtgaccgatttcacgttcaccacaccccacctgactcagcttcctccccagcctttcaaaggagaaaccagggagtgtttctgtttataaagcaaagtgaaacaaaaaccaccttcatcccaaacaagaccatctctaactctcagacaaaaagaggtgggctcatggggctcaagtgctcagtgatgtgggtgtgttacaccgaaacaaaagcttgatttctaagctcatttctgctgctgcagttaattgggtttgcatctcattttccgtgctggttaccagggggaggtaaatgttgacagaagttggccaaacaagtgacgtgaaatgacaaggatgctcctctgtctcgagggtttactgggtgcctccttggtgccaagagcttttcaaaggttgtcccatttaatctccaatgagaaagggatgcccccattttatagatggagacactgaggcccacggagatgaacttgccccagggtcccactgctgtcagtggcggcgcctgagttcagtgttacgtgacggtgtacagccttttgcagt

SEQ ID NO: 34268 - DNA, 1838 bp, Bovine  19866881510243
  misc_feature (1)..(1): n is a, c, g, or t
nacgaagagggcctggggcctccggccaagagccaggtgagtgcaccactttgggaatggatggccagccccagtcaagccttcagatgactgcagccctacccaacatctcaagggcaaattcatgacaggccccaaaccagaactgcccagttaagctgctcttgacattcttaacagatagaaactatgagagacaataaatgccattgctttaagtcactaggatttgggtcatttgaaagcaatacacatgatggaattcaaacaggacgaaagtaaaaagtgattaaactattgttactcacacaatagccgtagtttcacaaacacgatgaatttcacaaatacaatgttaagccaaagaagccagataccaaagaggacattctctgtgattttattggcacaaagatcctaaatgtgcaaagttaatcttggctgtctgcatagtggttcttttttgggaggggaagcatggtggccaccgggagcagttagcagggggcctccaagtgctgataacgcttcacttcttgggctgggggctatatggtttagacaagatcggccacattcagggtggtatggccacagactgggggctgtatagttgagatcatgggtatgctttttttgtaaaaactcatcaagctgtacatttatgactcatgctctagtctgtatgcacactatatttcaacatgaaatatttctaaatgatcattgtatggatactgtttgaaatctagagaccaaaaatgaggttctgggccatgaaaagggaagaacttcaggagagtctgtacaatgatttgcagtcctgtaaaacacacatatggaaggcaagatggaaaaaagatgaaatgtttgtgttgcgaggcagggattctgggcaacttaaaaatcttttaagtatttcatttaggaatgtattagactgtcttgtcagagagaatgaataaagggccaagaggtttaatacattttcacagggggtctaaccagagactaaaatacgatcctataaggagtaagctttttattcacccaaaatttgaccacccagaataatgccttcccagagatttcacaagctgttcaagtgcggtttctctagcagaatcagttattgaaactgccgtcctcattaagcagaaaagtgggcgcccgtgctcaaggttcgcggtccggctgggcgtggagagaagctaggccaggtggacaggaggtgttggcgacgtggtgggcaagcagagcagcaggtattaatttgctgtaaagtaaggaaatttgcgggcctggaggaactctcccagtgctgatagtaatagaatcagaaatatcaccttcaaatccccaaacagctgcaggctcagaagacagtggagaaagttctccaatttcactgagctataaattttggatttcccataacagctttccagaacaggttccacattgttctcagtagaaatcacacattacagtattcggtagcatcctgaagacacagactctggcgcactccttccgtatgccctctcccagctcaaaaaccgtcagtggattcccccactaacccccagcacaaccttaaaaagtgtctctggcccagcacggtaaaaagtaacaactccaacccaggcaccccagactgtgtcaccgccggccacctggccaagagcccactgtatctatcacctgggaactcccttcaccagatgatctttacatggggaagggctttctaagcttcaaagccgtggaagaaaccacagaggaaatgcttgacagtcccacgctacataaaaacaagaaattccggtgcgattaag

SEQ ID NO: 34269 - DNA, 706 bp, Bovine  19866881524397
  misc_feature (1)..(1): n is a, c, g, or t
nggaggctgctgaggtcctccggccgccggcagatcctctacgctgaccgccaggcagtcctgaaggtggcctgcgcctacaaggaggatgagggcctctacacagtccaggtgccttcgccctttgggctccgggagcagagcgcctacgtgtttgtgagaggtaaggggtggctggaggagggcgcccaaccagagcccagggaccaggactctgccttgaccgacttgccgtgggacacgtgggcgagcccccagctccttggggcctcggtgtcccagctatatagtgaatgcgcgtgttgaggcagagtctttctaagactgcccatgaccctccaaagggacccagcctgagattctcaggcttggagctagctggagaggagggctgagcgtgggctggcatccttctagtcctgcttgatttctgcttccgggttttgccgcttcactggctgggtgaccttgggcgattggcttttcctctaggagattcagtattcccacctgcaaaacagagagttgctctgggactcaaagatgaattgtgccaattgctcaggcagatggtatagaatgggcccctaataaactgggactcccacccacccacccctagatgctgctgtttaaaagaacaggctgtcattcaggtcttggtcttcaagatcaactgcacccctgggggattcgtgagaagaag

SEQ ID NO: 34270 - DNA, 856 bp, Bovine  19866881562291
  misc_feature (1)..(1): n is a, c, g, or t
ngtagaacatgcctgtcattctacagccaaagaagttgaggactagaggcggagtgtgtgggtaagccagaaggaaggaaggaaggaaggaagggcgggaggaaggaaggatgatttgtccattctccagggaaaatgaagaccgatttgtagcccctgtcaagtcctggggtgtaaacactctctcctgcatactgacatcactgacctcagagctggggggagctcacgattgagtctgtaagcaggtaggagccagctccaggaaaagtgagttggtggagagcttgggtccacgactctctgtcctgggctctgtctgctgccccgctgtgaggtcctcagcgagggcatcctaggcctctttcacctccagagtcagtgaccctgaggtggtgacgtccgcctgtggggccagacaggacaggcctcacagggcccatgctgggaatcaggacccgtggccttgcaggggggcacctctggttcaccgggacccagcattgaccaccatccttcaagtccgaggaaactgctcacaggatagaggaggagagagtccctgtttcctttcaccctttccttctggaagactctcacaagaggagccagtgtgacatttgaagtaatatatatggagaattttattactaaatagcatatgagtatacaaaatgcataactgaataacagctaaaaaaataatccaagaaatgtgaaatacacattttttgaaatgataaaaatgtatccatgaaaaatataaaatgttgcttatatatacaatatatacttatatatatatatatataacataagtgaaaactgtaaataagaaatgtatgcaacagtgagt

SEQ ID NO: 34271 - DNA, 1061 bp, Bovine  19866881675192
  misc_feature (1)..(1): n is a, c, g, or t
ntcctgggcctgttgacgtcagctttaatccacggtcggtttttgatttaaaacaagacatcaatatctttggcgactgcttcacaagggattcgttgacatcataatgccctgagaggaaagaaattttaagacagaataaagaacccttctcaaataaataaaaagcggtgccttacgcctaagaatgcatttaatgactctaaggcagtatcgctccaggacggtcaagtaatagggtccgcctggaataactgaaaataacattcaccatttagagaacatgtgtccatgcagcacagacttaactcatttaatcctcacagcagccctgcaaggtgggtgttagcacatccattctgaacatgaggaaacagactcacagacattcagtaccttgtgaaaagacattcatctaacaagaggctaagcctagcgtcttcctgtataaactaaggacaataattcttcgaacaaccgggaggctatggtagtaaaagaaccttttaggttcctggaatgtggtagttgttcagtaactattatgcagtttgttgctgttatttagttgctaagtcacacctgactcttttgggaccccatgaagtatagcctgccaggctcttctgtccacggaattttccaggcaagaatactcaagtgggttggcacttccttctccaggggttcttcccaaccgagggatttaacttgtgtctccagcactgcaggcagattctttactattgagccacctaggaagtccagtaattcttaattatgtaattcacaaatatttgttgagcaccttctgtgtggacccagaaccatctgccttcagtgtccactcattcctataataccctgtctcaacaaactgtgtcagaagaaaagtacattgtgcacatgctataaggaagaagagaatgatccgggccgaggtgaagagggggcagtctcgcccctaaggagctggtggatgagttacttagttgtgtccgacgctgcggccccacgggttacagcctaccaggtcccctgtccagggattctccaggcca

SEQ ID NO: 34272 - DNA, 743 bp, Bovine  19866881817328
  misc_feature (1)..(1): n is a, c, g, or t
nttggtaaaccctgtctgctggctgtttcaaattctactcctccctcttccgtgcaaaacccctgatttttttctggaagtagcatcttcatcaaattgtgttaagagactcttcgtccccattgagtatgtctttcttgaagaccctacagatcagatgtcaccttagattatttatcatgttatgttagatcagcgcagagaaataggaaggtcagctttatactctggtggcaggctgagggtagcatctaagtatgttccacagtggatcactggttctacaggttttatagatatatagtagagatgaggggagatgatctcatggtcagctcagtttgttgaaaaaacaaacaaaacaggctttctcactgcagaactctttggtgacttggcttgatagctgtatacggttaatttctagaagagtctggtatgaagctttccccaaatgtttcgatcctagcaccttttctgcctggagcatcttgggcattcttgtgtctcccaggatacatttctgggattccctgaaatgacttcagaggatttggaaacagtttgggtccaggagagttatggagcaaacggcacaggaaactggagccagagcagggcagagccacctgctgtgaagaaaaggcagctacttcctcgggaaggcacagggacaggagggaaggaagtgggcttgccgggggcagagcagttacacaaaagcaggaagaggaagacacttc

SEQ ID NO: 34273 - DNA, 1554 bp, Bovine  19866880411740
  misc_feature (1)..(1): n is a, c, g, or t
ntgtcttaagattgaagtcataattgtagtaaatttagatgtaaattatatggttggatatcaggtgggtttaagaggagtgatcaagactatatctaaaatgtgcaagccagcatatgtaaagcccagtgagagtatagataaaaatagaatatccacactgagtcttaacatccaaaggctcggtagagaaaaagagtcaccaaaggatattcagaaagaacagccagagtgaagtgaaagaaaaacaaaaagaagagatagcactaagacctggaaatgaaagtgtttcaagaaagatagtgtggtcagctccactgaaagctactcagtgtcaagaagagtgcaaaaaatgatatatgcatcattattgtacccttaataaaaagcatttctgggaagtaattgggagagtggccacatgggaattggttaaagggtgactgagacttgtagctctggaaaaaaaaaaaaaagatagattaaggtaatgtgaggaatatttacagatgcctaacttcctacaagttacgttttaaactttaaacataaagaacagaagtcataaagatggcaatgatacataagaatggtcagcataagaaccgatactgtggttgccctttggaacataattaacataagaacataccagtaacataagagcctaaagtttaaaggcaggaacaaaaatttaggtccccaaactggtgagatattaccgatacacttgcagaaattcttcacccatgaaggactttatttcaggaagttgtttttgtgtgatggaaaataatctccccagagaaagcaaaattaaaagcagatatttcacattatccaaatgatccagatcaatataaacattaacttcaacaccagagatacacctattatgtctgaaaaaaacaattattaaaacaaacacagatgcaattgaaaattcagcctgcaagaaaattcttccatggaagggaggagagggggcactacaaacatgagtccattatcttaaaaaaggcaagaatgattgtattaactttcaagaatataatatcatataatgaatttagcaaatggagattggagaaaaagtatatttaaaacaatgtcccttctatagatatatgaaaggttatatactctgaaaattcctcaaactatagatattttttcatgcttgtgaggcacaaaagaacttttaaaatatataactattacttgaataagaaattggaattgtagggaccagtatagaaaaaagataaatgaaaccagagtggtaaagtaacactgaagctctgtttagtggagaaatttaaaacattaaggattttttccctaacatttttattatgaaaggttttgaacatactaaaaagatgaacagggagaattcacattttcaccacctgaattttgccattaacatttataatatttgcgttcttacatatccacccgtttatccacttatcctttattctatcttatttttgaagcctgccaaagggcttcccctggtggcacagatagtaaagaatctgcctgcaa

SEQ ID NO: 34274 - DNA, 1471 bp, Bovine  19866880418022
  misc_feature (1)..(1): n is a, c, g, or t
naaatccatataaaacaaacattcaaataatttctatggaaacacagttaagtgtgaccgcatctcccagtcttccacattgttgcatctgggccaatcctacgcacataggcatatcaaaactcgcagtaattaagtggtctccccaaaatcctactgctgtgaataaaagcattcaaaattagatattttttctttcttctctacaatgagaaaaacatcacaatcattaaaaatttaaatcaagtgaaaaattacagtctggtcaacacggaagcataccttctttgttgtcttatatttacttattaacaattggagaaaaaatcaaattaaaagttaatgaaatatgaaaggaaagcaaacaagataagcactgaaatcaatagaaactgttttgacatgaagaggaaaattgtaaaaataattttgtcaaatcgtacccaaggtaataatttatggaaaggatggagatggatttatgaatagcgttaataaataagacttcggtgttgtttggtaatccagttaatgaagaggagtgaatcatataaaaacattgcaaatgagtttaatttcttgctgacttgatgcttaaataataaaacaatcatgttattcttcctgattttgaaatgcttgagctatttgtcaacttttaatcatatgcatttagatttgtatacactgtattaagaaatgagtatccccctgatggaagagtatttctcttttgaccaggtatcagtgagaatggaatccagggcttgcaattccatgtcttagattgagaagaattttccacagatcagctcctggccccatgtatattaaacatgcttctctctaactgctaatgaacttccagtgcaagctatctcacaacctcaagttctgaacttttgtttcacgactttggttgagtcaggacagtgggtagcaggagtattcctggaaaccattcccacaccagggtgactagcaataatttaactggaatccatgttcacatgacccactaatgtcaaatcaaaagcctcctcttagaggataccataaaggtcatgacgcctccaacaccacgcaacaggaggggaggaacaatggtgggagaaaccggagcagaaagaaacatgagctgtgaggatgaaaaatgtcacctgccacgtcaataaacaaaggatgctgccgtcaccaagccaacgacactgtagcctctgccaacattgagccctgaggggacccaggacggaaaacaacaggatgggacactgggcctcgaaggttacggtgtctcaaaagaatgatttcaacgagcccaaactcttcccgcacagaaaaaagcactgaaatccttaacttgagatatctggttttccttaattaacagtaaccttctgatgttccaaccacctggtttttgttgcaaaaactgtgtatcctaacgcctttcttacctcatcagagcagt

SEQ ID NO: 34275 - DNA, 2678 bp, Bovine  19866880418629
  misc_feature (1)..(1): n is a, c, g, or t
nacccactgtatagcgcagggaaatctactcagtaacttataacaagctgtaatgtaaaagagtccgaaaatgatggttagatagcatcacgaactcaatggatgtgagcgtgagcaaactttgggaggtggtgaaggacagggaagcctggtatgctgcagtccatagggtcgcaaagtcggacacgacttagtgactgacaacatatacatatgtgtgtgtgtgtgtgtgtacacaaccactttgctacacacctgaagctaacacatcaactattcttcaattttaaaaaagcaattgcaaaataatttcacacagtgatgcctgctacaaagacaacacaccttgacaaagcgataaagagaaacctggatgaaaggaagggtctgttttagagaagagggcctctaaaaggtcaggagaggcctctctgagaccgagtcatcagttcagagatctgggccaaacacatcatggacagcgaggacacgaagacaaaggcccgcgtcatggcggacctgcatgcctgcgaattttcattaagctcctattcttcaacaaagtgaactcgacaaagcccttgcctttgaaggccccatggtgcagtgggggagacccagagacacaataagtgtaccccaaactgccacccgaaccccaatgggaaaagtccatgaaaatttctaaaaagtgacctttgaccatgaccttgactgaagagctggattttgccaccagacctgctagaaacaacattctgggcccaggaaatacgatgtgggaaagaacagtggcctgggaatgcatgacatgtctatgaatgacatctgcatcctacagaaattactcttatggcacagaagcacttaattgttctatgtcttcccccgcttgctagaatgcacattcttcaacagcaaacgtactcattttgaattgttatcctctggcactctgtactggatgaagagtaaaaagataggttcacggaagtttgtgaaggttggaaggtgaaggctggagacagctgaacttctttctgcaggtatgggggccattaaaggttttgcaattcacaagaagaccccaaggatgacagccgtgagcttaacctaccagtgaactcagaaacctgcccttataaagcctatactggtcgtgctgacagagcactgctgatgttgtttaaatgaagatatggctttttgtgtccttcactgaagagacgtatattaattacagtgctttttaaggcatgaaacatggttttaaaagcttgataatctcttctgctaaaggtttcctgctgtgattgtcaaacctaagtcttcaccccttccctgggagccacccctctgccatcacctggctcacaccgaatcagtcaagccacatgtatttatcatcttcctcctctatgcacggcaaggagcatcatgtgagggggcatccttcacacgtctgaactgtaaagtagccttaatggcctttgaatagaggaagaaagtttatggatgtttcctcctactgtacttgattatcagtccaactctttcatctcaccttacaaatctagtccaacccaggtaacttggttggttcctggaagagctcaaatgtccacttgggtttcctggcttcacatcatcaaggggccatgccttgtccttcttaggtatgtcaaaggttgcctaacacaagggctcagaacttaaaagctcagtgtatttcctcagattaattaatacaccctataggagcttagtcgctcagttgtgtctgactctttgtgatctcatggactgtaacctcctaggctcctctgtccatgggatttcccagacaagaatactggagtgggttgccattcccttctgcaggggatcttcccaacccaaggactgaacacgtgtctcctgccttgcaggtggattcttcactgtctgagtcaccagggaaatcctatgccccaccattgtaacaactctcatgtctgtgcccagcgtacctcttcaatctctattcccttttcagatgtcagggcatcaggctcatgaaagtcctaaagccatagagagctggcccccgatggcataactctgttcaccagcaggaactccggcatggcaacacatgcaacatttggccaaccagaaataacccaaatgtgaccacatatctttgagcatacaaggcactaagattagataagtgactgaagttcagtacaaatgaggcagacatgggtaaagctcagctgataaaatagatccactctcccaagagacccatcccaatcatgcaaaggcaccagggagttccactgatcaggttcaggttcaaactggacatcctaaatttcccaatctcactcattccctgacaagttcaataatctattgggatgaaaatctttagctatttagtctgcatggagttgcctggcttagacataaaaattaaaaaggaacttagtgattatctttaatagtacaatggattatcacaagcaaaataatgcaagcatagttgtccagatcaaagatgttgaaccaaattcagatcctcagagaaaacgtgaaacttcaataagtatgatgaatgtcccttccacttatgctagcggttttagttcaaattacttgttaatgatctactatcacctcattctacaaaa

SEQ ID NO: 34276 - DNA, 791 bp, Bovine  19866880434941
  misc_feature (1)..(1): n is a, c, g, or t
nttcttaattccttgtcttcatgggttatgttctctaactaggagcagtttagcatactctagcattccatctttcctgtagacatagcagatcacgcacagtctgggaaaactaagtacacattccattgttagcctttctgatggcctgtgccgagttcttcagattcacgtcattgttggcaaacgtgcattgacgcgctcttattaccttggactgattttacatggagcatattaaacaaatgtggtgcctgatccttcgaaagttagctttttcaattgactcttatttctctagataggcccagaaaagagcaaaatgcatgtgctacccaagtcagaaagatggcaccaacatcttttattgagatgaagtgatgtcatctacttggaaatgcccgcattagcaaggggacagaatgccttccatttatatttagaagacagtgactacagtgaggaaattatgcaatctaggcgattgattaggaaatgtaagacaaaaacatactaccttgccaaatcaatttcctagatctctgtgaattatccaataattagataatcttttactttggaagtgcaaattttatatgtgtaattatttgtcttaatcactgcattcccaagctgtattcagtggcaacacacagcctgttcaatttatactctatttctgttaactagataggattaatatcatacttcctctcaaaagagagagagggagatacaggtattttataagatttgccactgtcatagagctcatcagtgattattataat

SEQ ID NO: 34277 - DNA, 1035 bp, Bovine  19866880442842
  misc_feature (1)..(1): n is a, c, g, or t
nattttggagacctcggtagaggttaaattggaaaaaagtgaggttgagatcaggtattaatgaccactcatgaggcttgttagattgtgaggaaaaggtgtaaaggtagatagaaaggagagagttttggataccaaaactctggattggggaagacagtaaatggagactctggggctcagtagtctggttgcggaaatggtgtgcagaaagataaagggtttagaagttgggaatgacataatgtggctctaagaattcttcctggtcttccctgttcagtctgtgtgttattggaccaagtactcctggagcagttttatcctaggcctcttgaaggtacaatttatttttttaaagtaattattttctacattaattctgatattcaacagaaaaaaatgctcagtagagaggagaggaaggaaaaattgttgatgtacgtggtggccagaatgttggtactttgtaaatacttaactgctccagggttaacattctgtgattcaatggattgaattaaattaaaccaccttgaattttcagcataatgggagggtaaagaagaataatggatgtcctcatagtacaggcaaagaaagacatcacattattttattgttggaagtaataaaaatttccctaatccttcagggggcaaatgattcttagagagaggtgttggggtcaggctatggtttcaaggagaagagatttgcaggaattcactaatgaagacatgaaaatgtcaaaacacaactgaagcattaaaacatatccaagggcatggatttgtaaaaagtgccttctttaagaaaatgccacggtatatatatctccaagaactaattgttattggaatatgaaaaagggcccctggttataaattcaaagaatactatttataatggctttggaggccctgcatatcctaacaattagccaaatcttcctttagaaattttatgaagaattggcattaatgaggagggatcgatgccctccttctcacttctgtaagtaaaaaagtcaga

SEQ ID NO: 34278 - DNA, 2789 bp, Bovine  19866880477602
  misc_feature (1)..(1): n is a, c, g, or t
ncctggcggggtaaagtgcataggttcacacagtcagacaaaactgaatgcacctgaacgcacttatgctcagctgatgcagtcaccagcaaaagagaaagaaatgctgaatctccttttgactcgaggctccctgccctgttggctgaggcagggcatttttggaagtatgcctccacagtgtgctgcctctcatcactaattcctttctcttcctaatgtgacctatcaccaatcatccataagccaaagctgagtctctcaggacgatttgaatgcagttttccctcagagaattgtgtacccaaagcataattacacattgatctggtcgcaaattcttatgtcagcactcatttccatctcaaattctttctaaacccaagagaatactacagagttgtgaaattcaatgttgatttctggtgagaatcccccccgcctcctcccagattccagactgaagaaatttgaaatgcctaattctagagttgttttaaactctttgatcctctggaaacatttgtgtacactttatagaccatggtcttttgctgatgtccttgtttgtactccaaaatatagcattgtgactaagaaggcaagtttgagaatcctgtatttgaattctgggtgtgtctctgaataagtgtgatatttctttttttgtatcttagttgcctcctctgtaaaatggagaagataatattgtcctcagtggggtagctatgcaaataaaataatttatttgttagggctcatgatagattctgatgtatagatgcatgccactttacttttattttagagataaggaagctgaagtgtggaaaattaagaaacaacctcttggttgtttggtctttcccatttagctattcacagatcttaactataatgttaaaattttttttaattctcttgtcttgtagattgcattgtgagacaattggtctttcaggaaaacgaggcatccatcatagtaatttttggtagttcagaaaatgtgacaaaatatcacagcattaagtattaacttgaggtgacgtagcagcagcagcagcagcaaccgggctattagcctattgaattctgagatctctttgatgagaaaggcagtgctatacaactgcaagacccttgacaccttgcagcatctcagggagatatctgtgctataattcaaactgaatgctgtattttttgtgcctgataaatcctttaatgtaacacatttgaaccacttgaaaaatcagatttctgctctaagtgacccattccctattcttgacaatctttaaaaaaaaaaaaaaaaaactggagtgggaggctcatagctaaaatatttacttttaattccactaatgttattaactataccatttgtattttgtttctttcacaagattattatttcttgtattaccaagtatatgactgagccttcaacggaaatgatgattagacttgaagcagttgatcaaatgtatagttcgatatatgatcaatgattgtaatagtgtaactctagatggcagtggcaccccactccagtactcttgcctggaaaatcccatggacggaggagcctggtaggttgcagtccatggggtcgctaagagtcggacacgactgagcatcttcactttcacttttactttcatgcattggagaaggaaatggcaacccactccagtgttcttgcctgggaacagggacaggggagccttgtgggctgccgtctagggggtcacacagagtcggacacgactgaagcaacttagcagcagcagtagcagcaaccaacagcaggtacaaacaagaagttcccctgaaattcttataacttctgcaaagtctcctttaagagtttatctacttttatctttggttgtgaaaccataattgccacagttgatttcacttcatttgtccatagatataaatcagtttttaactgatttaatttttgtctccaatcctttagctatagtttctctgttcctgcattcattaaattgatttttttcaactatatttcagcaaatgtttcattgttagtccttttttatatttgttttatgaagtgtcatattcttgcatttcttatgtgcttgagtctttttgttgtctttataattgtaacattacttggctttgtattaattttttgaattatatcttcattcgcattgtgtagagattgattcctgtcttttggccttaaatactgctcttcaaacatttttaagtaaatattctttcactctcttatatgggattcagtggttttacttggttcttcatatatttctggaacttgactgggctagagctttttattgattattttgagcaatttttcccccaacaatatggtagttcctttcagttgacagatttaagtctttgtttcaggaaagctttattctcctttactttagaatattttttttttctattagttttgtttcttctatatactaggaacttcttcagtcatatttaccatatatatcattttctaaaatcattgttattattttttcttacatttcattttatttgactttctctggattctccattgactcttattcaatatacatttgcacttattttttattttactctaatgtatctctatttttattttttctaggaaaaaagctgtgcctatttatttggtattcaataaatattactgagtgaatttgattaaaatagattcaagaacaaagatttatgtatttaaaaaatgagtgaaaaatggcctctgttgttccaga

SEQ ID NO: 34279 - DNA, 2374 bp, Bovine  19866880500882
  misc_feature (1)..(1): n is a, c, g, or t
ntgtgcatctcaggaatgtcatattacaaaacatgttcactaactatatcttgaatcaatggaaaaaaggctgtgtctgtcttttagacactccatcattctgtgagcttaacaaacaaaatctcattaacaccgaatgcatgggagcatgagaaatgtgtaatgcttttaatttcttattaagtgatttgtgtttattgaaaattggcttgaaggtacactgaacataattcataatattggatttaggtgagtctagatatctgagtcttttctgtacttagaatgtgcttacaagtgcactattgttatagggggtggaaagagtgatagcttattcctggaaggatttgctgaaatgagaagatgagtcagacttggggcatctttttctgatgctcctgtgccttttaggtctgtgtgaattgtgcaaggcccttattcgtgcaggcacactccgtacgtgtctacaagcagatgagaggcagcgagggcacttgggggctggtagaggcaaatgtgaatcccgttttttcgctggtaactcacgagacctgctgggtagcagcaggcactagcagacatttaattgtgtgctaggtaaggctggcacagctccagcatcacggtggagtcagaattaccctaatcagctgggatatactgcatatattgattagagttggattttgttatgcaaaaaaaaaaaaaaaaactttataaatagtgggaaagtaattgagagtaattaaaaggcagagagtttaactcacagttctttagatgaaaaggcattttgatcctttgcttccatgcagatttccgggcaggctggagcagtttgtgagggccacgtctgaatggtgggatgactatcccgctgccccggaaagagactgaatgggcaggctgtgtagttaaggcacgggggaccaagttccagcagcttcttctcggtggctctttgctgtgggaagccttcttctttatttgggtctggggccttttctttttcttggcctcactaatagcttttggttattattaatatccctgatgagaactgaattgagatcccagtgtcctagtgaacactgatgggaacattaaccacactggaattacctagaatttcagcgtgttttgtcattgcttccctctttccttaaactgagaaggctttgtagccatttggtatcatggaagctacttcatctctggagtgatgacctgaatagttatatgcctggagaattccatggacagaggagcctggcaggctacagcccatagcttcgcacagagtctaatatgactgaagagacttggcatgcacacacacacatcctttcttgcttcctagtcctttcattcatatgcaatgtctgccacaaaatgtatgcacaaaatacctgccggctggatgggtgaatggtagctgctgtatacgtttgggatgctggcatgatgtagcatctttgtgagaaattgtagatcatgtattgtggagttccaagatcattatatcagagatcgtgaacaacaaggaggcaaggggaatggggtatgaaagaagaaagggctacgatttattgagcatttactatttcgggctctttgcatgtgtactttccttccatcatccgtcatcttcttggaggtggttgttaccatcatctcacaggtgacaaatacgtgaccaggaattgaaccaaggcgacagactttaatcggcagggtcaggatttgaaccaacagccctagttgataatcagggttctcaaatgaagctgtacaagtccccttaccagcagaggaggatgtcagagcttggtggtggagcccagagataggccatgagcaccaggcagatttctttcaaggccgagtgtttttctacaaactatgggaattttacagtctcttccatactgtgtttggttaaatgtgaaatcatattttaaattacttggttatcaaagtaccagtacttaatttttctgtcccaaatctttacttacaatgaacccacctaaagttgctcctcctgtgtcctctgggactcctatgggcgttccatgaagagagaatcagagctggcagtttggttggaagagcgattgaggaacctatcttgaaattttgttccattaaagtgtggttttttacttagactgcatgtgtatttgcagtgacctggggctgttagtgaggagaagggtgctaaaacttcccgtgactttgtcttgtttatccaggagctttaagcttcctgatgtaactgctgtggatccaagtttgagaagcaggcacagaaccctacttccctgcattatttgagtgataattatgatgctccaaacaattgctgtgc

SEQ ID NO: 34280 - DNA, 1433 bp, Bovine  19866880515745
  misc_feature (1)..(1): n is a, c, g, or t
ntagtcctctgtgccgaagactgatctgcaagcatcccctggacaatggtatttgaggtgctatgttggaagcacgtgcaaagagctgaggggcagagtgaccaagtcttccaagcactcagcctctgcaaagttcatctaaaaaaaaaaatccagcgcaggtttgctcaaacacagcatggcccaaggttgacaaatgaaaataacacgcaagtactctccgctgggatgggccctttccaagcacactggctttcttcccgtcctagtcctattcagtcctgaactccttgaggatttgccaggctctgatcctcataacatgatattccctttctcgtccctcacctttctgtaccttaaaacctaagagatggagtctttagaactggtgcaaaggtcagcgagctgcaaatttatcagctatttgttgcctttttttgcaaagcccatatcagatcccaagctccttttccaacatgattcctgttttcttaccttggtgaatcccacattgcatacagaaggaacccctcttgcattcacagaggtttgaacgcatttccatttctgtatcttttaacgtgctgcctccactgctgtgatgccctctctcctttttcttcacgtccatcctgcaaagccagctcagatgccacctcctccaccatcttcccaacagaattgtatttcatcccacaggtatgtgtttacatattcatcacacatttatgaaaaacctgtgctgtgttgtgcctggttactaggaaggtagagatgaatgaacagaatctgtgccaagttctcacaaaactcagagatctggatatacagaagtgcagtacaataggatacaagatttaataaagtcccaagaaaccttttgtgtttcttgggactttatttcccccattcctcaatgagtcagcaaaggctttaaagcagaagtcagctttaaattactttgaatttactttagggcaaggtcagggtctggttagtttctgcaaggtacagtagcccagtaaacagtgaaataaaggaataaatgcatgcatgaatgaatgacatagccaactcatcctgtggctctcattttgttcaaggcaaagactttcagaaagcaccaggattccagttgcacggagggcatcactagctcttcctgaattgaaggtgagaccagaagcttactcaagtgagtgaggccatcattaactgcaaatgttgcaaaagaaactggattcaactctttagggcattcactgaactgatagctaaaaattctctgaaacccaaactaggaaaaccaatgagtagagaatctaagaggtattacagagcccatgttctgatagaaccaggcctacctgactgtcacagtagcaagatgattcagaaagtgatctaaggtttaattcttgaggtggcag

SEQ ID NO: 34281 - DNA, 1287 bp, Bovine  19866880536387
  misc_feature (1)..(1): n is a, c, g, or t
ngaacctggcaggctacggtccatggggtcgaaaaatttggacatgactgaagtgactgagcaaaagcacatatcccattctcaatgagtaatcacacttatttaagtcaacaacttgactagagtgaatttgccacttgtttgactttttgtacagaaaagataggttcactgtgaatctatcctttttttgctcattattgaaatatctcattcatgcatatagaggaagatcattggtgatgtatatttgcaactctatggtgacaactatgcaaatgttttcattatgtagcttatttttcaggggattagactttttcagggagtgtctactcttggcaaatcatgagtgagctctcaaataaggatatttaattttagaatgttggcagaagaccgcatgggactcttgccttctctctccatctctgactctgcctcctttatgctctctctctcacacacactcctaatgaaatgcaaaataaaaacacggaaccactggagatgtaagagctagtatctgtgtgcacttcagcttcacaaagaatctaaattaaaatgaaatttgccaggaccttatttctgaacaattttaatgatgatggacacatgcttgaatatgacatttgaaggattcaagtttaaacattcagagacttcattctctgagctattatttcattggcatttgaggcatgaaagctaaaagaaagtattttttcacccttggaagcaggcgcataactcccattaactccagaaggaggaattatacatgagaatgaggacagacaatacacaaataagtgtgcaaattcagtctctagattaaccccacagcctatgatagatctttggaagcctttatactctatgaaatcaataatccattatagctcatactggtgactaaatgacttcggggattggtaatggcatctgaaatcttttacctttaagccatggcttgtagtaaatcctacattctgaggcatcaccagccagttgcagtaaagatttttggattcaacaccttgaggcaaataatggcaaataatagatactcaatacatatttattgaatgaaaggatcaacaaataaaaaaaaatagtctttagtccatactcagatctcttctgatcctcacctctttaataacttggcatagttgggttctctttcttcgtgctaagtcccttcagtcgtgtctgactctttgtgaccctaaagaccatagcccattaggctcatctgtccatgggattctccaggcaagaata

SEQ ID NO: 34282 - DNA, 1538 bp, Bovine  19866880557598
  misc_feature (1)..(1): n is a, c, g, or t
nctgaggcatatttgcaatatggccaactaattaagaaactgcataatctggcaagtcacacaaaatacatgtaaagatgccaaaaaaggctggggggctctgacaagcacgttcgttgccagcagtggagtgtagtcctttttatactctgtattgtttagcatttgttggttcttaagaaatgtgtgttaaatgaatgcagctgggtgaaggtcttacaaataactgccaagcactccatttcttctttgagttacgacaaagaagacaaggcatgaggcctgggccactgcccctgcctgctcatggcaaggtgatgacaccccttctatgaactggagattcttccccagtacaggatggcagcagctttgaccaacctcccggacctggcttggatgaggaaatatgcttttaggatatttctttacagggctttcccgatagctcagctggtaaagaatctgcctgcaatgcaagagaccctggttcaattcctgggctgggaagatccactggagaagacagaggttacccactccagtactctggcctggagaattccatggactggatagtccatggggtcgcagagttggacacaactgagcagctttcacttcacttttataactttgtatattactgacagtttgaccagaggcaagttccctctctctctggattttctccttccttaaagataagcaccatgtcacttaattcatttcaactctaaaattgtctaattggatttctggcacacagtgggttcacatattgaaatgatatatatttgttagaaatacattcaattccactttcccatcaaatgggactgttaaattgtgaacatattttttgctttcctgcttcataaaatatgagcactctaatcccagatggcacatcctccagaaacatatggacaagacaatttataaggagtgctctttcaggagctggtttcacttagctaaggaggctgtgcgattttgccaagacctttcaagcaactcattgaggagggtgagcaggtcttagtcatgtagccaagggattgaaaaaagtctaacacaaagcccattttggaaaaggtctgggttttcacagtttagggaaggagcggcatagattgaggtgggaaatttctctctacagtgcagggagcaaagacgttggagtgaatataaagcatgatgctgttgttttcttttgtttgttacctatgacaaaatagaccatgcaggtcattccagtccaggcttagctcatttgcaatgaagaaaaatgacctgatgtttacttctcacctattacacaccattgtctaaatgcttgcgtaaatctttgtgtattaagaatgttgtattcaggatgctcatctggtctcatcacttcatgggaaacagctggggaaacagtggaaagagtgtcagactttatttttttgggctccaaaatcacttcagatggtgactgcagccatgaaattaaaagacacttactcctggaaggaaagttatgaccaacctag

SEQ ID NO: 34283 - DNA, 1270 bp, Bovine  19866880571887
  misc_feature (1)..(1): n is a, c, g, or t
naattatacagtattggtacatattgtcttcccctgtatttcaataaaatacatactttatattataaataaaatatgcttatgtgcactaatctaatcagatgactatttataatatttttctgtgggaaaagtatttcacattcaaaacaactggtttacaaacttttgcacatggcttgtttataaaagatgtcccattcccatagttgctatataacataaaagtgaggtaatcatttattacaagttccataaagtcttaaaagttagaaaagtagagttttctcttatgtcttttaatttaccttaagtcatagcgtcttattgcttcgcctctagtgcatctcagaaaaaagcagtctaggcgcagaacaaagaaagacttttgtctacttgctaaaaggaagaaatatactatcttctacccattcactgactaatgcaaaaaggaatgtgaaaaagaaatccatctaaactcaggggcccctgaaccaaagaaaaggaaaaagccttttcaagaagttagtgaacaaattatagcaattgattttattacctgatcttaattgaatcagcacagtattattaaaaataaatgttggcatattgccttaaattaaggaacatagacccccttttcattttgaattcatgaagagatctacttactcttatttttggaatactttagctcaacaaattaatacctatttcatttcactgggccgaatgttagccatgaatgttagcataatttttcaaaaatgaactgcatcaaactatttgcataacaaaaatgtcactgtgaaccagcaccttgctgcccctggtattgtcagaggaaactggaagagcatcatctatttttatatctgataactttgttcatccccaaataactacttgtcaaatacagttaattttcagtaaagtgaaaaaaaaaatgaaaactactgactctgaggaagtagcaggttcaaggatttgatcataggattaggttggttttttaaaattgattaattaatttacttttggcggtgctgggtgtttgctgctgcgtgagcgtttctccagctgtgacgccggggccgatctctagtcggggtgcgcaaacttctcactgtgttggctccgcttggtgcggagcacgggccctagagcaccaggcttcagtagttgccgcgcaggggcttagctgctctgtggcataggcaatctttccggactagggatcgaacctgtggtcccctgcatcggcaggcgg

SEQ ID NO: 34284 - DNA, 687 bp, Bovine  19866880582383
  misc_feature (1)..(1): n is a, c, g, or t
ngtctgtacaggattttggaggctctcagatctgctctgtttaggggcaagactgtgggcaagttatctaacctcggtatttgctttatcatcagaaacgtgggactaatgatgcctacatcttatgattataaggattaaacaataatgtaatgatgctttttgcccagtgctgaaaataagtacaaagtaactctcccagtctgtttgcctctgtgatgtttttctgactgtgtggacttcaaattctattaacaacagaaagtaaataaaagctgtgatgtatctgtaagcccttaaaagtttcactacatattttaagcttcagatcccatcttgctaaaccgtgcaaacattatttagatatcctacaaatactagtcatcggattacagggacctggaaaaacacctcagcagactgtttgatctgccatggagcaaagggtctgggactctggcctgaccatcagtctaaaaggcaacataaaggattataaataactgttccagctgccagtgacctaaaagcaaagggaatgtcaggggaaagtgttgggagcacatgtgcagtgggggcaggtggtggtggaaggggtgtactgaaatagtccactgaaattctcatggaaacaatccaatgcctgttcatgcaagcatcacttatggatgggttcggtatgtatca

SEQ ID NO: 34285 - DNA, 977 bp, Bovine  19866880692659
  misc_feature (1)..(1): n is a, c, g, or t
ntgcacactcagttcacacacactcatggtttccttcagtgacataggaatgctttaaatgtttggaatttatgatcaaggggtttccaagtgagcaaggttgtacatgactcatctgtaaaggttataaagcactgttgatcataagatacagaagccctccaaatttaagattgctaatattatgaacaaacaaggagacaaataaataaaaaggagatagtgaattagaaaaccaaagtacgaagccaaaagaaaatccaggtgtcatttagcatgtatgaatcaagccttttcttcctttttaaaaaataatcaggagtgtatttgatttacaatattgtgtttcaggtgtatagcagagcgactcaattatatatatttgtatttttcagattatttttcattatgtgttagtaaaagaataatagttccctgaataatcttcgttgcttatctattttatatatagtatgtgtatctgttaatcccatacacctaatttacctcttctctcctccctttcctctttggtaactgtaagtttgttttctgtctgtgaatctgtttctgttttatatgtagattcatttgtatttctttttagagtccacatataagtgatacataatacttgtctttctctgtctgacttcactaagtatctctacgtctatccatgttgctgcaaatgccagtattccttccttcttacatttttaaaattaaataaaaatgatttatttggcttcccagggtcttagttgtggcatgtggaaccttcactcttcctccaagcatgggctctttggttgtgccgtgtgaatttgtggttgtgtcctgtgggatctagttccctaaccagggattgaacccagaccccctgcactgggagcgtggagtcttagctactgggccaccaaggaagtcccatatttcattctttttatgatcaagccttttctaggtgtaagata

SEQ ID NO: 34286 - DNA, 2518 bp, Bovine  19866880717909
  misc_feature (1)..(1): n is a, c, g, or t
ntgttctcctcccctactatgtgctcagataacaccctagaagcttatataggatatcaagtccctgatttttttctactgtgccactcttggaaaaactggattttccacaatctctgcagtaaatattgaactaatctagcccatcaggtggcctggagagattgcaataccttgggaacgtgccttcaagtcagcagagcttctgagagctgcaggagactgggactccctttggtgaagggctggcctcacaatttcctgttttcttggcggctgcctctgctgttgaactcacattagaacagactccccagagatgatctcttctcagttctctgattgggaccttgttctccaagaaaatgtaattcacatcgtatggggaaacaaattactcccagatagtagtttattttccttggctcttcataggatcaggcccactaataaaaatcgtaataatgatgagaatgatgctatagaaatgcagtcttcggactgtttttcttacaaaagtctgtttaataatgataattgtactgcatatttcagttggtgaggcagttgtttagttttccttcatcatcttctttcgtcactggtgtactgagtttccagatgcttattctactctgtgcttaattatctattgaaacaattgcattaaccatgctatcaattaaaaaacataagaaaaatgttttcaaagtgaaagaagagtgataagactatactgaatggtatcttcaaatttggggggaaatgcgtattgaaattgttacaggacaagctaaaccctcacaaaagggaatcgggacagtgaactcacctcccttggtgctgggtgagtggccccatgaagatgcatggatcccttatgctatccttttaaatcctgcccaccataatgacattgaaatggtggggaggggagagccatccctgaaaccaggtgaaatttatttaagaaatgcctctggagcctccccacacatctgtgaaatctgccttgagcacatatcaccagaatacaatccagggaaatcctcagctatgctaaggaaccccctttaatgcgccttttgcagacctgtccttccagaaaccatccagtactttgaattgttcttagacccctccctatggaaaaacgagacagaaggttctgctttataactgctcagacccttctgctccaattctacagccagaacccatgtatgtttaacatactaagtgggatcagccctctgaatccccaatgatgtccacagcgcaattttgtgtttccaaattttctcttcttccaagtatttgcattcttcgcaaggcaagtatgaaataggtgagcttaatcactttgcagtgcttaaggggctagacggacgtttggaggctctgcttgaggactggagtttgcgtctcctctttcctgcgcctttttctctccccgcccccactgccccatcgcccccaccttctcgcgacccagggcctttgaggcaactctatacccttctgatttgacttgcttctggtaaacgaattaaagtgtgagtgcagccgggctccatatttcctctcttaaaaggaaagtcaaactctgaaaaatcagtccacaggaagaggtaacttcaaaaataagggctcatgttccgcaagcctcttgagctctcatcggccccctggactatgcccttccaaagggaaactttacaaaagacctcggtagaaattgccggcagcgcctgagttgtctttgttagagataaggagttctggtcacctgtcatggctgtacagctgattccagtgttcattttgggaagcctttggcttccacggaaaagagtaggctttgagaacatgtaggtggctgaacaagtggtgacttgcaggagggaaaatcagaggttagcagtgttcatctctctcctctctaaaaaagagaagagcaggcttttccagttttaaggttcaacctcacatccatgaagttgggaactatggataatttaaagaaaatggtttttttttgttcactgtttgtgttttcatggatgtgattagcatcttagagatttgtactgcttgtgtcctctcttctcccatctctttgctgacttatttgaacataggatgtatcctgggtcataaatttctactaatgaatccaaggatgctttgatatctacaaattgtttaaactaattaaaagaaagtctgaagatcttgctgttggagtttttggaagaaaataaacttatggttaccaaagggggaaggggtggagagggattaaattgggaatttcggatttaaagatccacactactctatataaagtagatacaccacaaagacctactgtatagcacagagaaccatgctcatatcttgtcataacatatagaaaaaatcgagaatgaataggcatagatgtatatgaatatgtatgatttctaatatttcacacatacagcgaagtgattgttatacatatacatgcatatgt

SEQ ID NO: 34287 - DNA, 3245 bp, Bovine  19866880755022
  misc_feature (1)..(1): n is a, c, g, or t
ntagactgtaaagattttttatttttacttgtaaaaattgtggtttgcattttcccctaattacaatgattggaaagttcaatatgtaaaattatacatagaaagcatggaaattcacagagaaagaagacaaaaattagctacaattctaccacaaagatacttgaaatgttaaaatttgcttcatgatctatcaggattttccataacttttctctgtataagtactatgatttaagaattgtcctgtagtctgttttatttttctcttagcaatataacaaaaacattttttccatgtcaatagagatttggctataatgccattttaaaatttctactttttaaaactattttattgtgtggatataatcctttttattaaatattaaatcctttattattaaacattgaagcttttctaaaaattgtaatacaaattttatccacatacttttgctatacctatttagatatttttgtgtgctggggtacttacatatacatatgaaaatagagtttaaccatgcaagtacagtttaaaatcttctcttgtttacactgatgagtgttttggaacattgaccaaaaggggcccctgatgatacatatttccaattttgtagctcagatgaaaataatacttccttgcagattcctggtggtgatttgtaagtgattcatttgtgcaagattagtaaggaacataactttatgtttctcaatgttttactcatacaatggaactactcatatacttgtctccaacttttgtggaagacaggagagtgtattaaagcacagaggagtatgttgctacatagagttttcatgattattatttttaaaatttttcttattgttcttttatactgtaattttggggtatttttgcggcccctcccatcttatgaatgagtggtgactctaaagtataatttcttttctgtttgtctgtgtcctgtggcttgctttctttttttataaggcaatattttgtgctacactgcaatacataataaatatatttctaaattacatttcaaaatgagctattgtttcaaagtgaacctcaaaatatgggaagtctctgaagtggaggaaaagatgaaacggacagattaaatgagatgtggccacctcaggggacattctacttcatacaagtcccagaaatctcaatgaaatcactacataatttaggcatgttcataaataatccatctcaacatttttctttaaggattcagttttcaagtgcataaactaagcaatcctggtgacccacctccagcatgagatgcggaaaatatatttcaagtctaaaaaaatgacttcatgggttgtggttaatggaatatttgctggttgctttatcaaggccaaagggacattagcaaatgcacaccctttgatcatttattaatgtatcatgtgctgtgcctgttaaaataattttagcattcaggagctggcttatgagaatggaagaaacttgagagaatggctaggctgtattttgaaaagtgcttttaccatcttcactgaactgtgctacataatcctctcccttgctatgattagacacaggtatcactgttacaactccagttttattagcaggattaaaaagtagcagaggagataaagggtagggttttgtttctggaatgattcagagtctgcccaaggaaagggaacattagggtctgatgcagaattctagtgtcccacctctgaggtctgcatgccaagccttggaagtgtctcgaagtattaaagagcacaggttttccctcactgatggatgggggtcttgccttagccagggtaggaggctcatgtgtggctaaaaacaggggattagccgtggggagaccagacatgctcatctttatctttcctgaaagttattccatgggcgaacagaccattcatcatcagtgaaaacacaattcacttccgtcttctcacacacaggattggtctcccaaatgtgcacatctggaaatattatctaggcctgtgtaatgaccagtgtttaagcataatctgtgtgtaagtgaattcagctgagagggagtttgcctttttgcttttactgtctgaagccctggtactactgagctttctttcttgaagttttatcatctgcccaagaaaattaataagagctaggaaagagaccctagacggctgattttacaaagaatgtggccatgcttcttgcaataatattgtataggctggttagcactgctggatatctcagtggctttcaaagctctgagtcagcttttgtggtcaatttggattaggaagtcttctaattacaagggtgtgtgtccacaaggaagggcaggtatagcacaaaggtctagactttgttttccttacgcatcacggacacagagtggtccagttgtctgttttaggttatctcaaataatccctacagagtcttgtgtgcacgtgtgcttactcactcagttgtgtctgactctgtgaccccaggggactgtagcccgccaggctcctctgtccatggggattctccaggcaagaatactgaagggggttgccataccctccttcaggggctcttcccaacctagggatcgaacccaggtctcctgcattgcagcgagattatttactgtctgagccaccttcaagagaggcattgctgcccatatttatagatgacaaaactgacggtcaaaggatgaagtgacatgcctaggaagtgttatggcagatactgaagaccttataacctcataagtttcctttacatatcgcttgtggaactcaagactccaccaatgcacatatgctgactttttttggtctactacatgattctctatatctgtgagtctgcttcttttttgttatattctctattgttatttttagaatttcacatataaatgaaattatcgtacagtatttgtctttctctgtctgatttatttcacttagcaaaatgcccttcaattccatccatgttgctacaaattgttcattcttctttatgcttgagtagtattccattgtgtatctatacagcgacttctttatctacacatctgtggatggacatttaggtttctcccatatcttgctattgtaaataatgtcgtatgaacattggggtgtgttatatttttgaagtagtgttttcttctttttctggacacataacttggagtgggagtactgggtcatgtggtagctctact

SEQ ID NO: 34288 - DNA, 1169 bp, Bovine  19866880765364
  misc_feature (1)..(1): n is a, c, g, or t
ntggagagcaatcgcgcccgtctggggtgacctgcagggacctgcttaaagtgtgatgctgtgctttccactgtgtttctgctgtccttcctgctgacacccagtgctctgtgggtcttaggacctgagattcttcctgcctccatctctccttccctcccaccttccccgctctctccccttcccttcctccctccctccctcccttcctcttcctccttcccttccttctttccttctttctccctccatctctctcctcttccttcttttttgatcttcattctctcagctgaaaattccagaaagatctagcaaagctaatttagtgacaatgtctatttgttcaatatacactcagttaaaaccaacagacagagcacacacggatgaagacaattgtctgtcactatcggcgctgacagatttgaactaatgtcctagaatggaaagtgacctgccgctttctgtaagttaaatgcagtgattctgattgaagaagacagtactaaattagagacgtaatccataaattaaaaaaaaaaaacaaaactgaaaacaccttaaatcttgatccctaacatgtgtcctgaaaaggcttcattcttggaatactcatttatcatccaacaaacccttgttcactttgaagggaaataggaagtgagaaagaggtgcatttcctaggatgtagcctgtgtacataggactcagatgacttggggattttaggatgggagagcggatgtagacctgtggtctgttggagcccagtcgcagatggagccgggagcaggctgctcatgggcatgcaccagggtgctctcgtaggtgtgcgccacattttagttcattcacatcaatctttgctgcaactgagtacatatcctgtcttaggaagttggggaatatggtataggaggagagcagtctactgcaaaaagaagagacagagtgtgaggccgggctggtgctaaagagcggcattgactggattacatgagaacctggcctgtgagtgtgagacgagcagttacgcagtgaacaatttcaattgtgcagaaatgtggtggtgagaggcagacgacagctagataaattatgtaatgactgtggatgtttctgccagagaagtcactgggctacatttttttgtttgtttgtttata

SEQ ID NO: 34289 - DNA, 2157 bp, Bovine  19866880810426
  misc_feature (1)..(1): n is a, c, g, or t
ntagaaaagctagcttcacagatgttgagaaatcgaccaagtggaaattatttactatagaaaggaaagaggacatcagcatctcaaagataaaaccaagagatgcaaaatggagaaaacaacaataattcatctttgtccagagacaatcccagagaggaggctagaggactggccagatggatacaggtagttcttaaacgatacaaaatctagaagagcaatcgaacctagaaaccacttaggagaacaaatgggcatttagctacattccaacactgttttatttgaagttggtcacagttaatattttataagagaatcataatttcctaacatttgaagtcattcagaaaagggaatgagtcttcatcagggttggttgtgtttgggtggcaggtggtgagtgacttcctgcaaagcaagatgatacccacctgttgcagagagagcatgttttcctcacagttccctctggcagaaagccttggccactgccaaaggcaggttcaaaatctatcaagagtttaatcccatatgtcatctcctatgcccataaattttaggacttgagatgaggctggctttggataagaaattgaaaaatcctgggtcataaaactactgtcaacacagccgtccaagaacagagcatgcaattataagtttgagaagaggaggttgagggtggaagagatgacgagtcaaagttgagatttcaatctgtttccctcagacttgaaagaagtgtaattttaaaagcagacttctttcactaggaaggacatatattgaggaagtgggtgggaaaaaaaggggaaaaaaaaaaaagcagcaaagacacacgggggaatgatcagcagcagtgggctgtcattgttcacagaaactgagtaccatatttttgaaatggaactttaactaaagtgtagaatgggttaggctgtcctgctgtaattcctaattagcacagggaaatgtgatgatcgctacctaggacccgtctgctttaattccattgtcctactgatagatatagtccttcataggaaatagcttcattatttagctgggaagaccaaccacttagagaattatatcttagtataattattctgtaaatagtatacaaactagtgtttgtacaacctagtataacaacttagaggataacatcttcatatatcataaatagcattaaaaactagaatatatgacacgtaccttaacagaagggcaatggaaacctgcaaaaaaatgctttctcttaaaaacagtcactaagagataatgcacttattctaaaatcgaaatacaaattctaatgtagaaacatattcagaacttaagctaaactttaaaaaaaattgagtatgtgtatgtgtgtatgcatctcattcatgtgtgtgctcagtcatgtctgactctgcagccccatggactgtagcccatcaggctcctctgcccatggaattttccaggcaacaacactggggtgaggtgccatttcctactccaagggatcttccagacccagggatgcaatccacatctcctgtttcttctgcattagcaggggtattctttactactatcatctcctgggaagcaccattacaaagactttaaaaaccacaacctatcttgaggggataaacccaagctctcctggagaattctctcattaagttcttcacatgcttttaaatgcctcacttttcactgtacttgcttttgtaccctcaatggaagtcttgatttgtctttgcatcctcagtgttgtgtgtgtgtgtctgtgtgtgtgttactcactcagtcatttctgactttttgcaacatcatggcctatagcccaccaggcttcctctgtccatggaattctccaggcaagatacctggagtgaatcgccattcccttttccagggatcttcctgaccatcattataatatcatgcaaagtattttcattttcctagaaatcctccatgccttcccccattcatctttccacactttgttagcccctggcaacagagatgactttattgtctctatacatctgccttttccaaaaggtcatgtgggcttaccaggtggcacgagtgataaggaacctgcctgccaatgcaagagacttaagagacatgggttcaacc

SEQ ID NO: 34290 - DNA, 650 bp, Bovine  19866880840683
  misc_feature (1)..(1): n is a, c, g, or t
nctgcaggcagattctttactgactgagctaccagggaagcctattgaagctgaaaaagagttgaagagtcaaagagttttgttttattctctgactcataagagtatatagtgaggccaataaaactaccatccctttgtttctaactttcagttacccacacacttacatgcttctttgcattagttcaccacgtgcctggtgttcacagctccaagactccaaggggaagtggcggcagactttatttcagagcctgctacctggaagaatgtttctggaaagacaagtgaatcctgagtgttcagctttgggattactttgtagcaatccccaaggtggcatcatccagacagctcccattctgtgactaaggtcagagagaaaagtgaagccctcacaggtaaatattgaaccagatgttaaaacaccagcagacaccatacattaacagcagctgctggaaagaacgtggagacctcattcctgggcaacagctcggattaaggcttcctcaagagacatggtgggagaaggaaaatctaacatccctgggtgtgtggccaggactgtgtccacacacatcaaactttcctcaaaaagtgcagggagggattactcagagactgttagaaaacagaaagcccag

SEQ ID NO: 34291 - DNA, 715 bp, Bovine  19866880867037
  misc_feature (1)..(1): n is a, c, g, or t
nagacttcactttcacttttcactttcatgcattggagaaggaaatggcaacccactccagtgttcttgcctggagaatcccagggacgggggagcctggtgggctgctgtctatggggtcacacagagtcggacacaactgacacgatttagcagcagcagcagcagtcatgtctgactctttgcaaccccatggactgtagcccaccagactcctctgtccatggaattttccaagcaagaatactgaaataggttgccatttcctactccaggggaccttcccaatccaggaatcagaactatgttcctacattggcaagcagattcttgaccactgtgccacctcggaagtccataacagggctgtatgggaagtcagattttgaaaggaacttgtccttctatgcactaaaggtttgcacttgcaaacattagtgaccatggtgccagaaggagttctgaaagcagcccaggaggtcagtggaaaattaagtcagcaagcaggtaattgttctgtccatgatccaattagggacacaaagaaccacaattcacttcctgcagtcattaaaggcagcaagggacatgaactgccattgtcataaaaacataattaaacgtgcattgtgactgcaaatagggagaaacaaactgatttttcaataggccactaacatgttttagcacttactttgttcctagcaggcaacaa

SEQ ID NO: 34292 - DNA, 2085 bp, Bovine  19866880873342
  misc_feature (1)..(1): n is a, c, g, or t
ntttattgctttgtacttcaccaacagttcccatgattttattttaaaaccttcatccttgatttaaaatctttgaatgtatccctagttgttccatgttatgtgttcttctggcagagttgttcagatgcgtactttttactaataataatggctacttttgttgagcagttcctaggtatcaggtcagggatttagctctacttgttagttaaatggattagcgtgtgttatggatgctgagaagacacagactcctggatcaagcataaaggactttttattgcttgtggtacagcaagcatcatgagcatcatcaaatgcagtggttctcctcaccctttgccgagtctcacagagatgaagtgctaagggtcccgtggatgctctgtgcatcatcaaatttcgttgcagctgaggaatattacatttggggacctcatcattttgcagctaacagtaaacagcgttctcttagatacagagggagacagttcttcattgttcaaagttgctccctgcaaatacaattcggagaaatgtttgggcaaaaacaatttgggctttgcattcttggtacatccagcaagaggtgcaggggttgggactcaaggcagtttgcctttctcaacactggttctaggaacaatgccaaatgctttaattgggcagtgtttcctggtagatcactatgtagccaatgttctgtgtatgtcttactccttttaacagggtcgcctctgggcaatgttataaattgggtccattttgtttgtacccctatcttcctgtggaaacctcttttccttgcacaaactcccacattcacgacttacattttaatggctctaatctgatctttgaatgtccattttcttggcctgagcccatgccacattcaactcatttcttttccttctttgtcctgaaacaaaatttacccattctgtggccaatttcttagaactcttctcacttgtaaagggtcactgagaaaaaaatggaaattaaaatatgttcatgtatagaaggtggctcatcagagaacaaaaaattttaagagaaaccttgtgaagacatactttagccaaggaatcatttgaatggtgggaatttgggatttcaagactatatatacaactccatatgtttgctctgtgcatggtgtgccctggatctcagggatatatttagtttgattttatatgaagcattggtttttgtgttctctgaaaaggaaaaaggatattttgaggtatagatttaaaagccatttccttttcactccctatcatccgagagtttatgagatagagttttagatcttagtgaaagctacaaggggtcgtgactaagtctttataatattaggagctgctctcctcctaataagcaaccattacccaaaccatactttttaatggagatgctgcccggggagttcatggcaatacattagaacgtggaaaacgaagcttacttaggccacaaagcagcggctccgtgacataacgcttctattggcacctgcatttggagtctgtaatgttttcttcactgtgctttcaagacccaagcgatttaaaaagaagtgactgtgttcataaaaatgggaaactaaaccaacataaatgtcagtttttatgttaatatttacatttatcccatggagagactgaattgtgtagtaatgtgattcaatatttgggggttagatattttggtaacatttacagatcaataaattagacacattccatcttaaatgatcagaaatagcttcgttttccaatgcgaggccaacttaaaatttccagcagggtacattccctgaagaattgttaattgcacaagtgctataatagtattacattttaactacaactgtggtagattttcaagcatctcagaggttataaactagtcattaaaattcattcctgttggcaattgggtctgcagagcctctagccagaaaagcacgcttctaatatttatgtgatttccattttaacacagccatttgaattgcttgtaatattccagcctttgtaatgcactccctttcctatcctgcccctacaa

SEQ ID NO: 34293 - DNA, 1733 bp, Bovine  19866880882569
  misc_feature (1)..(1): n is a, c, g, or t
ntcaggtgggaggattaatgcgataaaggaaataaatgttgatcccccacacctcaagcaattacttagtttcacagcagttcttttgctccccaggaaagcatgtttggaaatatttgactcaagatagaaaaaaatccttctgaactgggcccagtttatcctctaccctcacaaggagcgagtgaatgatcagccagctctgtccaccagactgggaatcctgaggggctagagtcatagtcaatttattcttgtatctttagctcagttctggtttgccatgttatgggcacttcctaaatgcttgctatgttaaaggatgtctcaatctcagaaccccactgctatatgccaagcacctcaatgactttatctttatgatggcatttgaatttcttcaccatcagattagatcttatctcccgagtctccttcatttccagagctgttatctgcttagaaaacaataatttagaaagactttgtattaagaatgtcatttcaaaccgcttgactgtcttgggttatagccatttgattatatagccaaaagtggtactgtgaaagcctgcagctttcttggaaaacccatacggctcatactcgattataaaatcacgtttgctacaattggaacagagcttgtgtcagcagagtttctctgatgagaaggtgatttgaactgaaatgtctacattgttttgtttacttgaggtctaagtgtgtgaccatttcttcatgcttcattcaatcacattaaagccttactgtaaaacatcttactcaaacacaggatttaaaaaatttagtgaattccaaggatggggaaatgtacattgctccattatttctattttaggggtaaaagaaaaatgagactgagactaaaatgagtataggtcaaagagaagcccaggcgtccatacaatattattttggattaatgaaggggaaaggtttgtgtaaattagtgaaatctgaatatgtattacaaaagtacaagattattatttccagtgacataaaattatgcagagaaaatcttcccttgatatgttctacttagcaaattatttgataataagacagagggagttggaattaaaattgattttatgcaacattgatcctataagtgagagcagtcactaaaattctaagctaaactactgagtttccccacatttcatagaaattaaaaataagggaggaatagttgattaatcatgataacagatatcaaaattataggaagaaagtatcacagtggtcttaggccaagcactaaggattgcacgagtccggtcttggcccagctttgcttccttggttggaagtctctgcggaggtccatgtacaaagggcatgccccctcttgcaggggacactaccctttattacttaggattttggtccagtaagttaagctggaaccataaggagggtttctttttcctaggatatttaggattaaaagtacacagaaagtgaaatgtaagacctagtcttgctactttttaagtccaaagaggacttttccatctttcctcttagtgggaaaagaagccatccgaagcaaatcagagacagcaaggggagctaggacagaggggcgaggtggcttccctcgtgtgtgggctgaagtggcccaggcttgtttcctctgccctgccgtgctggggagagagagcaagacagacagagggacagacagagagaaagagaacaaa

SEQ ID NO: 34294 - DNA, 1614 bp, Bovine  19866880886455
  misc_feature (1)..(1): n is a, c, g, or t
nctgtagctcctaaagtgtggttccagatgaggagcactgaaaacctgccagataagcagtccttgaaccccaccgcaagtttacaaaatcatgaattatggagtgggtcacaggaatctatgcgttacaaaccctcccagagattctgatacaaactgcagtttaagaaccttgtgtgcacgtgcgtgaagtcacttcagtcgtgtctgactctttgagaccccatggactgtagcccaccaggctcctgtgtccatgggattctccaggcaagaatactggcgtgggttgccatgccctctttgaggggatcttcctgatccagggatcaaacccatgtctcttaagcctactgcactggcagccaggttccttaccactaatgccaccctgggaagccccttaggaaccttaggtcaacacaatgaccctaggcaatctccagggcttcaagtaccacccctgcatgtgccggcaactcttgagtcaagctctactgtgctctaagttagcactttgaactaacgcctggatatttacccttggaggctcattcagtcattcaacaaaccccttctcaatactctctataggatgaactgtgcaggagttgaatggacagatacaaatatgtttcatgtaatattggggatatacttatgcaaaagaattgctggttcttcaattcaaattcaatgagagatttgtgcttttatttactccacctagcaggagctataaagtgaacatcaaagagtaaatttttactcgagtagtacagagttcaatcaggaactcaatgacataaacacagtataaaaaatacagttaccctcaaattctcacatttcaaaaatatccctcccctcttcctatgggggaagaggttaacagttccaaggtctttttgggctaagctacttcaaaggcctcttctaaattttccccaaaaagagattccgaccctagaattgagggaaaaattgtaaggcagagaggagcattctaatcaagtgtgtgtataagaaaagggttgacatatgaatcacagtggaaagataaaggccttaaattaactcgggtgctcatttctttaaactctgatctttatccattgttatatataatgaacagtaacagcactgttatttactatatgttaaaggcattttaataaagattggatccatagtttaaaaaaatcatacccagtgaaaacttcatgatttggaatttggatctaaagttaaagtccttggcttacggttcggaccacagactgaagccttgtggctcatctggtagcatttttccctattagcaggccaaggatccagggagagctctttgacgttgggtttacgaaccctgatgacaacagtgaacgtagaacagtctatcaaccagcatctctggcaaaaagaaagccgatttctgaaacaatggattggggaggatgcaaaatgtttgacctgctaattttttattttctgacagttttctaaaacatagagcaaggcaattaaaacaacaacaacaaacaacaaaacccgggtttccagcaaagacatctctgtctaactcttaactccgagcgaactcattttttaaaa

SEQ ID NO: 34295 - DNA, 910 bp, Bovine  19866880906519
  misc_feature (1)..(1): n is a, c, g, or t
ngtacacagagaaactagaaacccaacgaggagagagggaaacaactgctctcgaaggaatgggacccgtgggaaaacacatcttcaaagtagactaacacatgaagaactttttcttccacagttctgcacatttccatttactatgcacagaatcatttccttaagcagaatgcatttatctctccaagacagaaaaccgtaatttaattaaagttaaaatgaagaacttaaagatttgctacattattagtgccctttgaaagagttaaatgttcccttgctcagatctcctctcttcccgggcttcaagataagtactgggagatttatgtgccatgaatttccaattacccatctccaccagctgggctgtcaatcaccacttgtctcatcctagatgtcttcaccacccccatttccttgctgtgcacacagaaacaagcttattcttcccaaaagagcttaccaccagtcaggcaaatgctggtttttttaatgtccagcttttactggacagaatttctgactcaaatgactgccatcccaatcattccaacatattcaaataaagccagagctgccacagattgcaaacaatttaaaatttcaaaagagaatttacatcgtgtgtcttcccagtgtccagtgaagcagaattgatgagctctcaagagcaatccctcccccacctttgacatcttgaagcaggtgggagaattctaaatgattactacactcagacaccagaagaataaagaaaacagtgcgtttgcaaatgtatgcttacataatagttgcagatttggaggaaaaacagtggaagctcttccttgcttttggccacgggtttttgtctggaggatggacatcctaagctattaaaaactcttaaaaggactttagaagg

SEQ ID NO: 34296 - DNA, 1035 bp, Bovine  19866880965382
  misc_feature (1)..(1): n is a, c, g, or t
ntgaggcagcaacatgggaaatgcattttatacaaaatcttcagcactctgatgtctttttcttagcaaactgagatttcaagtttgctcctgaccaggtgatcagaaagaccttgaacaaagaaaccatgcctatggccactgaataaagcaagcaaactacactaggaaagatcaatagggattgacagagattacgcagctccacgaaatcgcccaacgatctctttaaacagacaaggcttagaagagggaatagagaggagcacatgcctggaattaacatcatgacaactgcctgactctaggctctgcattttcttttatttattcatattccatctttccacaaaaaaaatgcaggagagagagtaaaggattctcatggctcaccaaatcttattaatccagcaagatgatgttacatacaataaaataagaaagcaaaggcaaaaataagttctgtattttgtgcttgatgtagaccgcactacagagtcaacatttaattgccatctcctcttttccctgacacctattgtctctcaagttgtgactcacacgtcacttcccaatggatgtcctctctaacatacagtcctatgcaaatttacaattacactatagcatcacatggacggggaggcctggcgtgctgcgattcatggggtcgcaaagagtcggacacgactgagtgactgatctggtcacgtggcaatttcatatggatgtgtctccgtcccttagatcccttaagcagtacaacagcagtggatacctaataatattcgttgggtaatgttatggactgaatactgtatcccttcaaatttgtataccaaagacccatcccacagtgtggctatatttggagatagggcctctaaaaaatgattcaggttaaatgaggtcttaaagattgggccccaaactgataagactcagtgcccttacaggaagggacactagagcccagagaacactcagtacctgtccctctctctctctcccccttcccctcccctcgtgtgtgca

SEQ ID NO: 34297 - DNA, 1425 bp, Bovine  19866880999957
  misc_feature (1)..(1): n is a, c, g, or t
ncatctataaatgggacagcatttttcccaataaaaattcaaaattcctcagggaaaagatgccatttagctttaaaatataactatattttagtgcacaattaggaaatagactttctcctcagcaccaactatgaacaattgaaacataatttgcctgatgtttacagctgagagggaatttgaggacacagccagcatgagtgataacgattatcaagatggatgataatgtctggaaatgggtaagaatggtgaggatactatttattattcttgcctttgtgtgactgtatttgtcaacttctttccagagagcaagttttgattaatgaagtgggaaacaggaacaggccactcaggacaagagagacctaataggggaaaagccagtagagaaaactagagtaagtgaagaacagctttgtttaggcaaaatactcatcctcatttcagaattcagaaaaggcaacaaaagtgagagaattgtagctatgcaaattatgtgtgtttccaagtgtaaggggaggcttgtggtcggatttgccacaccgtttcctcctcactgcccctgtctccccaaatttacaccttcctcctttctttcaatttctcttgaaccttctgaagaaagcttgctcctggccagggaatactcctccagccaacctggtttccaaatcagaaaaccaggaatcgccaagcacgagactgcaggcgcaagtttaaagtaaagtgcgtcaggtcccatgatggaacacagttattttatgatagtattacagttctttctttgctaattatccccaccattataataccagccatgctgttttcatttttcaaacacaattccttgttaacagtcagaaaatttgcaaaaggaaaatatctgatgagttagaacagtttttgtaattaattttgtaaaggtagaatgattactcccaatcaacttttcagatcaacaattaatcactttataatctggtgggtccttgtctgctacaaaggtgggacaaaaattttatgcaaaacagcaattattcacctatataagaatggtattaattttttatgacagaaagcttccttatattttccaaaaaaaatagctgtagaaaataagtgtaatttaaaaattaggttatatacatatatatatatatatctttataaaattctcttttgttttgtggcaccctgccaaaaaaaaaaaaaaaatcacattgctcacaagaaggcctgaattctcttgaccatgtgcaatttgtgtatacctttccagccaaagccaagccaaaatatctcagcaagacattctttccagcccttcttaagagtttaagaataaaaatattaagaaagatgtcaaaacaataatgatggtaaagagacggagacctatgtccagcatcaagttaa

SEQ ID NO: 34298 - DNA, 1674 bp, Bovine  19866881060850
  misc_feature (1)..(1): n is a, c, g, or t
ncacaactgagctgtaaggtagaaaaaataattaaaataaaggatgtaataggcacattttaatttaaactatttagagttccatttggagtttttcctttgattgagaacattgcaatttaagaagaaagctggatttctagagtaacaagatgaagaagaaatttgaatttaccttacatgaggaataatccaaagaactaagaatttttgattgaacaactgagcccatggtagcttaacatttgaagaactattgtatgaaagagaggatacattttcctctgtgactccacagaatggaactaagactaataatttaaagtatcatgaagccggcttgcatagcataagttaaatttttccaacagagctgttggaaagtgtactggaatctctgtgtagtggtgagctgacaggcgctggaggtattcaagtagaaggtagctgatcgcttagttggaaaccagtataaaatcactggtagtctcagctaacttttaaatttcctttcagtgtttggagtctttaatattatagaaactgccatgtacttacagagtgggtgttagcacacctttcttaaaaggtaattttatcgaatactttcattatggaactagatttaaacagaaacaagtaacaacaacacagctgcaagttaaagcaggcaagtagtcggtatggagagaacaggatttatgtacaattccgttcactgttctaaacatttgccaaacaataattatttacttttggaggaaaatccctggtgtgtgtttccgacattctttaagggaactgatgctgaatgtttttctctccagctccagcttgagtcttaagtcttggcaaaggaagaagccaggggaacctttactctgcagaaggtgaatgttcttggctgtgatcgaggtaactctgcagttacatggggctcattatttccatctcatacattgaaaagacctcccaggaagagctgccaagatgtccacagcacacgtggacgcctcaagcaacactaggacctttgtggccacacggggggccatcatgcagcactctcagaagataagacctgttcttcccaccctcgctctccgccgaaactcccaccgccacttttctttactgatctgtagttaataaaaaatcatgcccatctgagtagaatcttgaaagcctccttttgtattttacaaccttggtactccaagtgtggtctgtggaccagaatcagcatcagagggagtttgttagaaatgcttagactcagaacagacctgctcagccagagcccccattttaataaaatctccaaatgatttctatgcacattaaaatctgaaaacctctcttttaaagtatctactcttgatattacacattttataagcatgctctatggtttggtagttcgtcacagtgttctatagttgttcttagccaaaaggccaagaagtgatttctctcacattgttctaacttcacttttcaatccttcaaggcatatctcttaggttgaggatgataagatttttggagtcttcaactaatctttgctctcaatcctcagcacccaattgcccaccaattatagaactttaaatcttcccttctgattgttccccctgactactggctacaacagaccgggtaagcctccatcat

SEQ ID NO: 34299 - DNA, 1025 bp, Bovine  19866881099920
  misc_feature (1)..(1): n is a, c, g, or t
nacatatacgtgtgtgtgtgtgtgtatatatatatatatatatttacatatgttgttgcttgactggaagagacagagaagaagccctaaacaacaacaatctataaattcttttatgggtttaattggagggagttgaagtccaaactgaaaacttcaaaactgtctggggaggggacagtcaagacatggtcaagtcatcaggttagagtaggaggaaatattgcagatgcaaatgaggttggagcctgaaacagcaaagtcatttccaaggtcagaagcagcacaggtcagactggaaatatgggtaatttattgctttttcaagataagtggcagaaacaggtcaggcttgaggcgggatttctctagcccaggaagtaagccttacattttaaatacctgtatccccatgctctgcttctctttgtctgccctggattatgggttgatcctcatatacacagattgcatatttcttcaagatgaggaggttaagaaggtcaccccattaaggatgtcaaactccaggcaatggacaaacatgcaagtagagatgttttatgagcagttagaactcagctggagatgtagctggtggcaaggagaggtcggtttataggtgttagtgggtatttagtattggctgagctcactatgcattaatgcattcaggtgtctgtatctctcagaaattctcattttgtaaggcaatggcaccccactccagtactcttgcctggaaaatcccatggacggaggagcctggaaggctgcagtccatggggtcgctgagggtcggataccactgagcgacttcactttcacttttcactttcatgcattggagaaggaaatggcaacccactccagtgttcttgcctggagaatcccagggatgggggagccctagtgggctgccatctgtggggttgcacagagtcggacacaactgaaatgacttagcgtcatgaaataatcttctccgatccttagaaattataagatagtttgtaacccaagtt

SEQ ID NO: 34300 - DNA, 1051 bp, Bovine  19866881149163
  misc_feature (1)..(1): n is a, c, g, or t
naataaatcatctactggagtgacaaagcatcaccagcgaagtgtatccccactgccaaaactggggagagtttcccattaggaagtgtctctgatctaaagcctggagccagcaggaaagggagggagtcagtctccggggagaggagggagtcacgctgttgtcgaggagcagcctctgccagcactcccatcttggggaagagcattcgcagcagtattcaagatgctgccaagctgttcacccgctgcctgccatcctgcccaccgggcccgatcatcttctgaggaggggcaggcacgcaaattgggacattctacaaaacaaaacacagaatcccctcaatatgctgccatttccaccctctactgcctcaattcaacacacagaggcaaacgcataagtgcctagagagaatttttcttcgtttcggcatggaattaaaaatacaggaatgcctccccttagacaaaacactgccatgcacaacggagccagatcgaagacccttctgccaagatcctgcttttctccatgtataaaggaaacagttccaaattggactaagagatcacttcatggaaaccgaagagacctaactgcctgcgcccaggtgtcacaccgatgatcaaacagccactcaagtagatgcttcaagtgagatgcaaggaagggaagaccctctgaacagaacttggccagcacttcacaagcgcaccatcactccagccccagtatgccaactctctcccatttctccgcatacagttgcatagtccatttactcccattctggaaagtctgtttggcaaaacaatggtaatgataataccacattaacagataacagcttgttcccaggaaaaaactggatgtgtacacccacgtgtgtctaactggaaaaacaaacagactgggtaggttttccgaagacccagctgcacgtggagctgtgtacatgcaactcacaagcagagcctgctgagctgtctccactgcactgggctctctcattcctcccctgggacaaagggaagacatcagttccat

SEQ ID NO: 34301 - DNA, 795 bp, Bovine  19866881215643
  misc_feature (1)..(1): n is a, c, g, or t
ntgtttcacttgatgtagcaatacatatttatgattttaattattgttttggcctcagaaagtgtctgttttataaagatcagcagggttcatgagagacttgatatgttgacttgttgactttttttttttccttagactattagcaattaaaataatacactgcggtggggaagtagtttaataaattcatttaaacatgttaaagcctttaagaaatataatgctgagacctcttttcattttaaagtaattataaagcccacagggtctggtgagcatggcataatccatgcagcatgtagagtgattaacttgtaaactgggggggaaagtctcacatgccacctcccctttctttacctcattctcatcttggtagatgagcagtggctccaagaggtggaggttaattaaatctgccatctgtgtgtgcccagtcgtgtctgaccctgcgaccccatgaactgtatcccgccagactcttctgtccatgggattttccaggcaagaacactgcagtgggttgccatttcttcccccaggggatcttccagactcagggatcgaacctgcatctcttgcattggcagggagattctttaccgcttctcaacccgtgaagcccatctgggctctggcacttctattccccagagactcaactcatcagctattcctctgtcctgtttcttcaagctcggccactgcctgtctctctgcctaaaaaatgttcatttccttccattaatataaaataatatcattagaaaatccttcacctttaacagagat

SEQ ID NO: 34302 - DNA, 1276 bp, Bovine  19866881322338
  misc_feature (1)..(1): n is a, c, g, or t
natcaggcagtgagtgatgaatgtgtcagttccgccagccccctagttctcagcccctagtctctctctagctctccatctgatcatgaactgttacccttcatgtcactatgtataaaacagataactagtgagaacatagtgtatagcacagggagctctacttaatgcactgtggtgacctcaatgggaaggacatccgaaagggaggagatatatgtatatgtggggcttccaaggtggcactagtggtcaagaatccaactgccaatgcaggagaagtaagagacatgggtttgatgcaggtgacttaagagatgtatgttcagtccctgagttaggaagatcccttagaggaggacaaccccctctccagtattcttacctggagaatcccttggacagaggagcctggtgggctacagtccacgggtcgcaaagagttggacatgactgaagcaactttgcatgcacatatgcatgtgtatatgtatggctgcttcattttgctctacagtagaaactaatacaacactgtaaagcaaagctatatgccaatgcaagctactttttaaaaaagtgttctgtttcagcattaaaaatgcatgtgtcaggggagtgtgtgatttcctcagttctgtcttgctgcagcaaatattttaaatggtgtaccagtgttacagctcggttacacctcagggttttattcggcaagtaaaggaaagtacacccttgaggcgtgagggcgggctgaccccaaaggaaaggcctcaatgtgtcttggcttcctctttttatatgttttgtctcctctcccctgagcccgccttatgcaaatttggctagccaagaagggccgtgtttgtttcacctgaagttctctctccggtcctcggattttcttttgttgcattttcgtgggctttttcctttctttgtctttcaaccactgccatttttcctattctaactacctaacaattacttaatgtaaatacagctggattaaaggtttatatagatgtacaaaaatattaaatatagcaataaatatcaaaaagttttctttaaaaaaaacccatctatgttgtcgatgtgttattgctcttctggtctcatgttcttattccattattctttataaatgaatgacatgatggtttaccatagattataaacttctagtgggtaggataatgcctacctaatcatttatactcagtgtcaatccaagcatcacaaaactttaaacactaaaagaaaaaatcaatttttt

SEQ ID NO: 34303 - DNA, 1432 bp, Bovine  19866881327537
  misc_feature (1)..(1): n is a, c, g, or t
ntctgtacattaagacagtatcattgagaactcaccctcagtgtctgttaaaaaattaggatgaacaaccatcctcatttgcccaggaatgaggaggttcttgagatgtagaaccttcagtttttaaactgggatggaggagtttctcaagacatgaaactttcgttgctgtaactgtgactgtcttgggaaagcgttgttggtcaccctcctccaaaacaaacaaataaaaagacccaaaacaccaccaaaggaatacaagattctcttgaagctcaaataatgggaaaagaccaattctccttctaaaccaggatgttttcttttatctgctgatgagaggtttgaaagtctcatgtttccctctttgtcttgacctctaagaaggtccaaaggaagttctctgaataaggtcagtagcatctgtcagtctaggctgtctgagataattgtttcattgactctgctttgttttgtttaaatccttcttctcttcagaagtgttcacatggtataaattgcacccagaattacattaaataactgttgccaagcgaacgtgagagcacacctatgtctttggcttttttgcttctcttcaattggctattatttcattccacgggtgtattatttcaggggttggcaaactatggcctgtgggtcaaatttgggaccactgcatctttttgtaaataaacttttattggggataacatccatacgtattaatctacgtattgtccatggctgttttcaagttaccagggcagaggtgaatagttgtgatggacactgtgtggcccataaagactaaaatatttgctgtcaagtttgtccctttctccattatgtcacaaactgtaaaccctttggaaaagattgctatagaatttcaaattatacatatatatctgtataatttgttttcaaatgtagtttcaaagtttatatgtatgtatatatatatgttgtgtttacaaaagtaatatatgcttattataaaaatgttaacatcacagaagtatgtaatgatgacagtaaccatcctttgtaaaatagttttatctattggctgtgctgggtcttcgttgctgcacaggcattctctagttgcggtgctgagtggaggctagtttctagttgcagtgctcaggcttctcagggcggtggcttctcttgttgctgagcacaggctctaagggggatggggttcagtagttgcggttcccaggttctagagcacggctcaatagctgtgacacacacctttgttgctccgtggcatgtggaatcttcccagatcagggattgaatccgagtctcctgtattggcaggtgaattctttaccattgaaccaccaaggaagcccagtaaccctcctttttaaacttcaattcctattggggcctcagttagctagtaatatag

SEQ ID NO: 34304 - DNA, 576 bp, Bovine  19866881396954
  misc_feature (1)..(1): n is a, c, g, or t
ntgtggttccccaagcctggctgctcgccttaacatctacacatcacgccctcctcccttctctttccctgctgcccctggcttcctactgccagagtggaaggagagagaaccgtttccttttgttagctctggctgaagtgacagagttgatcgatgagttgctgtgcctgtccaggaaaaccagtttgattgccctcctgtggctgggctgacagcattccgccttttatgaactgaagagtgaaggactctttggagctcagttttgcctgtttatgatggattccagctgtattttctatgtctgctgttgttatatcattgccattagtattaatttctggttagtttattggctgtggatttataatgactttacatcataaacataaaaagaggaaaagcaattgaatgaactttagatagcgagtagacccaagtgaaaaggagaagatacttgaggctaataagattcacgtagctggacaagtctagcttgcaggcagttgtgcttctgggaaatggagccctatttggattgtaacacttttccatacttgttgaaaatgaaat

SEQ ID NO: 34305 - DNA, 923 bp, Bovine  19866881580700
  misc_feature (1)..(1): n is a, c, g, or t
nttgtatccatttcactaaataaattatagagagagtgttatggttgatctttttattcctttccttactttagaaggtaaaatttaaatgcattctttttcttaaaaagaaaagtcacactgtgagagaccattgatttacattactttgtgtggatggaaacatatgctgatgaagaaaaagaaaaaccaaatcacctgtccatgaaaatataagcttagatgtgagctaatttgcccagctttacagcttcagtattatttctcattgatcagtgtgctttagttttctttcacattaaacaactatgccttttctcccagggatttagagttttagaactatgtgttcaaacagttaatatctgagggacttgtggtgactgcaacaggcagctctgatgtaaattgtactctccatgtaaaaatacagtcttcagctattaagtacaatggatatggtttctgagtgcctgtctaaaatgatttaaatgccttatatgtccaaactcaaataactacactttaaaatactgcaagcacattcattaattagattagcctttaaacttctattgttaactagaaccccattttgaaatttgaactgaattttccatggcttattatagtcattacagcttatcactaagatgtgattcgccagaattccagaagcatataccaatcatatgtccctaattttctcaatgaatgccagccttgcttagtattttcatatatttttatatagccattataaaagcacaggattattgacaaatggttactttctaactatagaactaaaacaagattctaataagggtgttctgtttgcacatgctagtatacattctgccctacgggttaagggtgtcagattattaccactaaaggttagctggcactttttaattgca

SEQ ID NO: 34306 - DNA, 588 bp, Bovine  19866881609245
  misc_feature (1)..(1): n is a, c, g, or t
ntggcatatagtgaaaatagctctgaagttttgattaagaacaaaaaaggactgtaaaaagtccctcccctcctctctttctctgcctctttgctctttttggttgggtgggcgcttctgtgtctctgttgcagggcagagactgtcaatgctgggagacagccattaaggagacaaatccaagttcacggtagcctggaggccagtctggagttcaaagatcctgggcaagatttcaaattggctccattcaagagctatggacttgtgagtggcagactctgcttccaggtcactgctgatgcagtttctcagtgtcttccccagcaatgtgacggaggaccaccgaagatgtgtgaccaagttagggaacagcaccgacaaaagcaagaactgggaaagattgttattcagcaagacttgttaatgcaaaaccacaatgatccactgtttctacttaggatgaaaggatcattcagactaaacactagtcttccttccaagttaatcagttgttgcttagtcactaagtcgtgtttgactctttgtgactttatgaactgtagtccgccaggctcctcagtccat

SEQ ID NO: 34307 - DNA, 859 bp, Bovine  19866882060570
  misc_feature (1)..(1): n is a, c, g, or t
ntgtgacttgaactgttcagtctattatgtcttagctccatcactttagcctcaacaagcagatacccaatatgccagaatctctccggcatcgttggagaaatgcttttcatttcattgtcaggacatgctgtgtcccctggtagtgttttgtgcacagtttctgattttcattctccggggggtatctgcagttctgaaacaattaagttcaacctggcatgtaaattgaagcatgtcttgcaaacatgaggtgcatgtggtgactgtagtaaaactacacattgatttctgacctaaggctctccaaggagtgtccccgatttcccaagggtaaagtttgtgagggaatctttgattaaactataagattaaagcaagtttaagtgactggacagctccctattcactgcatgttcgagacgtcttgagaacatgtgttattcttttcaaagttggttgtaaatcaaactctctaaattgcttccagatcagtcttttcaggcgaagcattaagatgatggttctaccagccaaaatgctaatgtttgctccaatcacacacacgattatatattcccctttcctaatatagaagaaggagatgccaatccagccagtcatcgcttctctaggtcagcagatgtgctgtctgcattagaagatgctgtcagcaatttggtcacgatatagctcagatttttgagagctcagttgtgtgtctccgtgaaaagactttggcataaattcccaaaatattcttcttctgaatactgaatgtaatatcagatgaaagtagaatactcaagctgaactaaagtagacattctgacaggaaaatattttatagttcttcaga

SEQ ID NO: 34308 - DNA, 906 bp, Bovine  19866880112089
  misc_feature (1)..(1): n is a, c, g, or t
naattgatgcttttgaactgtggtgttggagaagactcttgagagtcccttggactacaaggagatccaaccagtccatcctaaaggaaatcagttctgaatattcattggaaggactgatgttgaagctgaaactccaatactttggccacctgatgtgaagaactgacttatttgaaaagaccctgatgttgggaaagattgaaggtgggaggagaaggggatgacagaggatgagatggttggatggcatcactgacttgatggacatgagtttgagcaagctcctggagttggtgaaggacagggaagcctggcatgttgcagtgcttggggttgcaaagagttagacacaactgaacaattgaactgaactaaattgatgagtgtaaactgtgtaccttgatttccaatttgaaaccactaaacagttcatctgaattatatattaatttctctgaaataagtgacatttccactcagatataaggatctgagtgagattcagtgagaattaaaagcattaggagaaatttatttggcattaagaaattcaactgatcttttattataaaggaaatgaacaatgaccagtaaatctcattaaagaaaggaagcatttaatgtcttaaaaatacttcagagactcccctgttggtccggtggttaggactccacacttccagtgtgggggccccgagtttgatctctggtcagggaactaagatcctataggctgcacttcgcagcccatcacaaaataaaaaactcaagttttaggtttaaaaataagtttttttgtagtagaggccaaaacttttttcccacaaggagatttccttcttaaaagccagtatttttatataggagcatgattcttagaatcaataaaacatgttttttcct

SEQ ID NO: 34309 - DNA, 768 bp, Bovine  19866880380944
  misc_feature (1)..(1): n is a, c, g, or t
nctgacttgtctatttctaaattgctttgcactgaaactagtatagaaattgtcagatgaaatccaagttttgttgtattatagagggaaaaattgacactagtattttctactactttgtgtcacagcatttaaaaccctcatatttttagcagattcagatgctttttacttgatgtttaattcccgtgaacccaagtgaggaaactgacagcctcttaaatgggcttgtttcttttcctgtgttttgttataacatttctgatagatttatttgaaaagtatttactgagtagatgcattaagtattttgttagaaccaccttagaatatgaaagtgtctttacaaagcccataggaagtcagatctaggtttacggtgaatagagaaacttataaaagcatcaactatgatgacattctggaaccagttctgtagttgagaaagtgaataattgtttagtgatcaagttttgggattcttattctccttgtctctcctcaaattgtattactttgcaatcattattaacctggctgattcctccctcgccctcttctttgtgagatgtcattgttgctatcagtagatgcttctatgggaattctcaagttgcttttatcttatatatattataaatataaaatataaaaatttaaagagagattcctttaaaaaaaagagcaaaacaactgtggtccacaggcacacctcagagatactgcaggttcagttccagaccaacacagtcaagggacaggcaggaa

SEQ ID NO: 34310 - DNA, 2128 bp, Bovine  19866880514515
  misc_feature (1)..(1): n is a, c, g, or t
ncagaaatttaaagccgatgatcgttttccttcttttagccctattagcatatctttgaagataaaacttttaaaatccaaatttgaagcctttggtgagtgtgagaattctggatgaaaggcctccctttgctatgcaccccctttctgaggggactcctggagagacgccctttataaatgcggccaggggcagctgggtgatgggggtcagccagcaacggagagcctggcaccagactgctgaggtgggttgggggacacaggagagaaatcagggttctgagggtgtgcccaggcagtgccagccagcactttcccatccccctcttccctggtggctcagatggtaaagaatctgcctgcaatgtgggagacctgagttcagtccccggctaaggaaagatcccctggaaaagggagtggcaatccacttcagtattcttacctggagaattccatggacaggggagcctggtgagctacagtccacgggatcgctaagagtcggacacaactgagtgattaacacacacatgtgatcagtgtccatgtctgcagctcgccaccttcttggcctctggtgcccccccatccacagactgctggcagcccaaagtggagcagtgaccgttgcaaaacaccttttaccagtgagatgagtcctctggcttgatacatagttgctggggaaggggaggaattggagaaccacttgcctgtatagaacctgcagtagtgtgggtttataaaatcacagcttcttctgtcccagaggctggactgggttcagggctcaggactccttgtgatattaggctttaggaagaagagaaagcaatgccagactgaacagttactgcctgggcagcaggcacatcagtgaggagtgtcactggctgcagcagcatatgctttcttctttgggaggtgaactcagagacatgccaactaaaggccttgccagctgcaagcctctgaggtctctttggaggcccccagcaaggtctgtggcattcgagcagtacaggcagcctgggtgccacagggtggagcggggcgggggcggggaggcaccgggcaggaagaaacagcagcccttgctctcctggactctctgcatcagcagccgccaccaccttcctatttcctggagatgtggccccaggcctcatgtcatcctctctccagagaaccaagtcttccagggacaaaggtcacgcccaggcagatgtgagtgagagctggggttccaagtccagggccagcactcacacttcatggtgtcctcagccagggcagggttggtctgaatctgtcatttcatttttctcatcactctccctcttggtcagcaggttcctgaatttctccagactatggaaaatccgaggagaaggggagagaaaggcagagagagaagggaggagaatgagcacgtggcccatccactacctcatggcaccagggtggtaaacatttggagagaagccaatcgtctggcgcctcaaatcttccacatctctccagccaagattcagacctgtatattctgggctctttctgccccatttcaccaggctttaaattacccagacctgggtctgggttattttgtccaaaactttcctctggaaatccagattgtgatgcaagatatacattcttggaatcagatttctgaggcctaaatgcacgacagtgtggacttagcagtctgcatcccatttccaccagcccatggggtgaatacacagtgaggtaatcatcacttcctgctggctcgggagacagcaatagtacagataaattgggataacctagccagggctcagcttgtcctggctattcagagagaataaggaagagggcctcagatgatttgtacaatcaatcccaaggttgtcaaattgttccttcactgtggaattattggtttcaaaatccacccctagattctgttatgacagaagatcattttggaaagacaaccaaagcccaatcccagagagtctcccaacaagtgctgtagtaataatactggtgataataatggggttaataaatatcactttgtgccggttaagttcaatgcttcacgtgggtctgggggagggcaaggaccatc

SEQ ID NO: 34311 - DNA, 1341 bp, Bovine  19866880567858
  misc_feature (1)..(1): n is a, c, g, or t
nactccccaccctcgaagcatgactccctgtttctaacactatccttaaggaatctggcttctgcgacttccagtaattgtacaaatcacccatgatgaagcatctaagagcactgttagacaaaagaaacaaacattaagcaaataggaaactcattaaaatgctgcctttggttacttttattcctagcaatttatgttatcaaacaagtctttcttcattgcttttccctgaaagtaacacttcaaatgaatttcaatggccactgagtgattttctccagacccacataatccagccatgatatgcactttccctccccgccccccaccaaccagtactcctccttgtcaccctagagcctctgacttagctgtgttcacacccagaagtcccaggagagctttcttctcacattatacaacacaaaaaagcaggcaatgaacaaccaacccatgctcctaaatgcttgcgataaagccagactgagctgacctctcccatcccacagagctgcatatcaggcacataaacttaaaagaaccacgagcagcctgtgtgtgatatatataaacaaactaattaaaacccaaggtctttcattctagatagtgcctaataatgggaccaatatgcttgactctgtgcaaaaaaaaaaaaatcactccaagctggcaagaggtattccttttcctgctccctgtgaaacatctctttcaggctcaataaacagcctaaaagaagaggaactcaagggttgccattcattcctgtaagacttttcaaataagaactatcagcttggcagcactgagccaaaagaccactccctgattccaagtggacatattgatcaattgcactgacatgtgcctcctcctttctctcccttagtaacaatcagctgcaccagggaaatccatttcccaaaacaaaaggcaactcactgctccttatctgacaatgccaagtcgtgtattttttttaaaataataataatggtgatgatgaggcctaaagacagagataggagtttaaataagcaccatacgtgtttatcgtagagtttcagaaatgagttgaggttatgaccaagcccagagatctgttttcaccacagtcgctgagggttcagctatttattcatcttgccagattctggttaaagttaaacaacaccactgccacttccagaggctctccacagggttacccttcactgcaactgccgcagaggagacttggtacaagtcagcctgcaaataactccagctattttggagactagcgagagatgaaaaaatatcaggcagtttttcaacaactataaggccatagac

SEQ ID NO: 34312 - DNA, 1385 bp, Bovine  19866880575140
  misc_feature (1)..(1): n is a, c, g, or t
nccagaagaggaatctactatatgtttaccctctccccataatattacatgactcatgtacatagattgataaaatttatgtctcaccaaactgccactcttctcactagatttaggacctttaccattatgtctacatagacattttaaagaatacgtatttcttattctttgatttccagatgccaacagaatattagattacaagcacaaaattgacatcatgttcaaaataaagagaatattcaactttctgatttgtcaagtataaacttattctcaatgacatgtcaatgtctttaaaagagggaattttcaaaaaacaaaatttagaaacagacaaaatcttcaacttcaaagaaagccaaattagaaaaataatgaagatcattttatttgtaaaagatggttattgatgataagctgttttattttttttaagctgttttattaatatttacttatttggctgcaccaggtcttatttgcagcgtgtgggatctagttccctgaccagggagcactgagtcttagccactggaccaccagggaagtcctaatgacaggttgttttgggtttctaccatattacggtgtcaacactcaactttttctttgagtcatttctctttccttattccaggaatcttggtgagattgacaatcccagttgtcctgtctccctcacccccggaatgagcacttaatacaggcctcctcaatcagagtccttcctcacaaccgatatttgaacaaatatggaaagtcatctctttccacaattttcagtgacttgggatcaacataagcctggagttgcttgttggccaacttctccagttgcatggaagaagtccattttctaggacagaagaggccaacaagtaaaggaaaacagagggaagatagtgtaagagagagagaaaagggggagggagaaagaggcctgacctaataggatcactgatgccacttagttaagctgaaagctagtttaacccttgagttccccccagtacatgaaccagtaaatgtctctctttttaaaggggtttgtttacactagtttagttttaatttgcaattaagatcaccaatatagtacctctccaattttagtgacaatatctattattatggagaaataattaggtacctataatttctatacattactgttagattttcttttggtctcatgcaacagaaatatgactacagtttcttaactaaatatggattaatttattctagtaacaagaagtccagaggaaagaatccagctggtaccaatgttcaaaaaagtcacaagctccttctagcttcctgttctaccaccttaacttgcaacatgtgtgcgtgcttagtctctcagttgggtcctg

SEQ ID NO: 34313 - DNA, 3641 bp, Bovine  19866880582087
  misc_feature (1)..(1): n is a, c, g, or t
ngtgggagaattaatttaaacaatgaaccaataggatggttaatcagcttgctttgcaaagaacatttgatttctcccctgaaaactgcagtggtgacaaataagcctgatctatgaaatatcttcaggtataatgtaatatgtcccttattgcctataaaagaaatgccacctgaatcacaggtatatggtgcgtgaattatcatggatgcttctaaattaccatgcatggggtcttcgctctgggttgtctgacaatggttcttctgtttttcaaactctacaactgctatttgaattattccagaatagaggtttcaaacttaaagggctcaggcagcagcagtgggggtaaatggacaggagcagagggagaccatgatgaattggagaatactgctccatctaaggtggtcaactcttgccaagtgagtcacatcatctcattcttagacaaaacccagaactgttagtcagttttttatatcaaaggggccatacagatggctaggtaatttgcaaggtccagtgtaaaataaaaatgctgaaccccttgcccccaaaattgttgagaatttcaagctggcaagagtagagcattaaagcaagtgtggacctctctcagcacagagccctgtgttgcagcacaggttgcctgcctatgaagcctgtcctgcagctatataaaacaaactcaggaatcacctagtgtgagacccattctaaagcttctacattctctccttatttccccttgggactcaaagtaacagggctggaagagtttggagtatgccctatagtgaaagaactgagacaaacatggctggtggctgacaaggagaataaagtatcccttgttctgaccaagtcttaaaaccaactgggggattcagctgttgataggtgtgtgcttgtggataagaaatcttaggccttccgaatccaaaatacataaaagtttgttgccatagccaaagtcctataaaaagtgatactccctggaaaagctttcacactcatggcccatctatagagctgggtatgtcggaccaccatcaaagaggaacacttaatccaccaagtgacagtcacaagttagatatccttcacacatgcatgaacatgaaaaacttcatgaaaatttataaaaatacaatcaaagttttgcatacattagttaatacgattgtttagacaaatgcttcccactttaaagtgatgtttgtaaggcatactaaggtgaatgaacaggttgcttgtggctagaggtgactggcacatacctccaccagcatgctggccatttagagggctcaccagagagtttttaaagatgagaactatctttcattaaaataaaaaaacatccttaaactgatctgtcatatacatttcatatttccatacatcaggtttacatcaattgagatagacatgtaaaacaattacaattatacttttcataacagcttaataccaacaaaatgcttattgccatattggctatggtcacacccagtaagattctaatccaaactcaagaagaaaaaaatcaaagctattcttcaatgcagcaattttacctccatgtgtaggccatatctgtatgtgtgcacagataattggtgtatctctgaaacataagtaaacagaaatagtattacggtatcaaaagaataaattattccactataaatttgcctgttttatttggtctctccatccccattcctgatagaatgtagtggggaagaaatctgcatctatctcgtcccactgctatgttctccaacattgcctggcacatagtagatactcaataaaaagttgttaaattgaattgaatacataggatcaaaacaagttatcagtctctgattctaggattttttaaatagagacatgtggcagaattttttccctaaattctactggcttttctattccccaaatagaacctaattcctgtagtcactgtacccagcaattctattgctttctgtcagcctctaattcccatcgctcacagagacatgagcttgggcctccttgagacaggatgggagaaacattaacttcttctcagaacctagaaacagctaatgagctctgaggaataatatttctaagtgttcaccaaaccagaatcaatatcaatgtgctgtcagtgtgtgcattagccccacagtcaaacaaagaacagccttacagcccaataatgacactgggtgtggataactgggatgggcaagatgatgcagagatgactgtattagctctcctcaaacacaaggctcccaggatgttgcacacgactgtcattcttgtactctgtcagaaataggaagcatttagactcagccactgataatattcagcaaataactctcttttaacttcttaatccaggagatggattcaaagtacaccttcctggctataagagaagtttactcttctattccttgtctggtgttggcagggaattcaaatgccttaaagttagcagagcactacataatgcagctgataagacaggtacaacaaacttgaatcattactgactcatgtaagacctcctttcagtacagctccatcacgcccacactcattcatgtagcatttcccatacacagatcctgctagaaaggtatgtagagcaagggtactggcaaaaggtctgaatatctgttgtgcattgctttaatctataggatctgaccaagattcatgctcatccctgtagtaaaactgatcttagtgttttaaatgagatttcattctctgagtgaaatctgattttccaatcagaatgagaagggtggggtgagtatgatagagtaaaggtggctgctctcatggtatacacagttaagatgtcataaaactaagatgactgggtaagcaggtgggtatcacagtcaaagcacactgatttggaatcctggtccagtcacttattaactctatgaccttagccaaatttggtaacctggcgaagacttggtttctgcaaaatgtaaataataatatctaatcctataaaatgagattgttactctctatttcataatgtcattatacgggccaaataagttatgttcaatgtttagttcagtgccacacaataaaaactaaataaataagagcttggttgttattatgatttttatttttatcaccccaccatggcctaattatccaaagagttaacttatttgtaactttgtaattcaatgaagaaagctataaccaaaagcatagagaaggttagtttctcataaggcttccatggtctaaacttggccatacaataaatatgatcataatgatctttctcttatcactgtgaaagaaaattctctacattctagaaagtttcagtgaaacaccacaaaatgcagccatagagcaatctctcccttccccggtacacacacacaccccatctaccccttggggatatattaaaactaagacaactgaaatagccttagccaataattaagacacacagctaatcagagagcagcacgggctctgcaaagaaaccgagcactcaggataacagttcccattattagggctttgttctccggagcaaaaagagcataaaagcatcaagtggggagctgcaa

SEQ ID NO: 34314 - DNA, 1233 bp, Bovine  19866880597509
  misc_feature (1)..(1): n is a, c, g, or t
ntctgttctctatgtttgtgtcttcactgctgccttgcaaataggttcatcagctcccatccttcttgattccatatattttcattaatgtatgatacttgtttttctctttctgacttacttcactctgtataattggctctaggttcattcacctcattagagctaactcaaatgtgttcctttttatgattgagtagtattccattgtgtatatgtaccacagtttctttccttttatcttcctgagcatgaattcttcatgtcttaagtgaagataaaattatgttcttcactggattgttgtgatagttaaatatgatgatgcatataaaatgtcaagtatattgtacatggaggtagtaaatatattctttctttttaaaaacagttttgtgggtttgagaaggatagctcaagaaaatttatcaattactaattagtagccaaaattcttgcaaaatcttagtgattttattcatttccattcagtcttaaggatcatgtcttaggaagaactgtcagaggtagtagaggagttgttttagcctctgggagacaaaattcagagatgtatgagagctgtctttaaatgtgtaaagggctgtcatgtggaacagacatttgttctttatgactcaggagagcagaactatgatcagagggtgaaaactacagggaaggttattttggcttattaaaatgaagacacttccaaaaattgaatgagtgctctatcattgggaactgtgtgcatagctacatcagttatccagaatgtatcagcaatggaaggttttttaaatttagtttgaatatttcttcaacctggaagcattggaacataagctagatgaaagcagatttcttgtcttagcaccgtgatatcctcaatgcctagtactgtgtcagactgtgatctgatcgtagtactatcatatgttgaatgagtgagtcagttgcgtacttcaagtatgattatctgcgttcttcactcctcttcactctccttaattaagtttagttactgatttttggttgatatttttatatgtttgtttcagttaaaaataagtgaaactgtgaattgccatttggtaagaaaacaaatgagtggaattaaaattccactaaaacaaattagtggaacgtttctcaacagcaacactattgacgctttgggccaggaagaggttatcttgtacattgtaaaatttttagcagcctcgctag

SEQ ID NO: 34315 - DNA, 2859 bp, Bovine  19866880602856
  misc_feature (1)..(1): n is a, c, g, or t
ntccctcacatggaggtgataattcatgctctatatgaatttcataaaaatatttggaagagcatgtggttaattaatctttgggtgataatccagactaaatactaaggaaatgtacagataattctcaatctgaaattgttttattgtgatccttttgcctgtggcaggttcgtgatgctgtgcacgaggatgtgttaggaaaagttagcagaagtaggtctcattatctatttagtgattattcaaagccttcctgggtaggagagggtggagatggctaatgaataatctaagagtaaagagtatcacggagaaggcagtggcaacccgcaccagtactcttgcctggaaaatcccatggatggaggagcctggtaggctgcagtccatggggtcgctaagagttggacgcgactgagcgacttcactttcactttcatgcattggagaaggcaatggcaacccactccagtgttgttgcctggagaatcccagagacaggggagcctggtgggctgccgtctctggggtctcacagagtcagacacagctgaagtgacttagcagcagcagcagcagcagcaaagagtatcaaggaacgtactgtacagaacataggggctaattaatctctgttgatgctggatagagaggaaaaaggaaacttgtattaaagcaagagagatatagattagacgtaatgaagaacttgctgctaatgagcattttaagttgctgagcagggcaagtaaaactatcatcttgaccttggccagctcagaaagcaatgaggggagttccttggtggtccagtggttaggactcggcgctttcactgccaagggccggggctcagtccctgattggggaaccaagattccataagcctcaaagcacagccaaaagaagagaaaggtagtgaagcaggctagatttcctgcaaggacctaaacaagttaggtctgctttctggtatagcaggcttcatttccccacaagcagcactccaacctgtgagcttggcaattttttagggtctctagctagaaaggtgccttttggaaacaagagcctgtctcattgctgtgaaagtgaacttacagttttaggaagatggtagatttcttaactgggagagtctttttccaccctccccccctctctttcttgctatttaaaaccttcttattcagtctgttataccaccacagacacagattcttccccgggggctcttctgcctcccacttagggaaactaccaggtcgtagcacttgttttccatgaactctcagaagctttttccaattttccaagagctctcagaagctgctattaggccattaactgctttactcaatgcccgctctcccgtcttcctcctcttccctccagtctggctacttcactgctcttccttcctctcacgttctccactgccctccctgcttccctacatcttcctttgtacctctctctcttctccagagagctcctccctccttccttccttctcctctttctttggttttcttcctcccttcttccttttccttctttccccttctgaaccatgcttgctgtaccttccccagagccatgaatggaaaaaatagattgcttcttgactctacaatagaaagcgtggctgaaaagcctgtgaagtgcgggaaagccacaacatgcattcacatttgtttattcattcaacagatatttgttgagtagctactatgtgccatgtccctgagattaaagctcttgtcaatctttaaactgagagagaggtagtcttgctcatctgacacataggcttaaatcgaagattagaagctggactaaaagaccttgtgttattctccagctctgtgttcataatcagtgattattgctacagaaaagtacagccagagccttttacaaatgttgcaaacatcccaatggctatactagtttgccttggaatgtcactagggttaagtgtggtaattagtttcctttttcccagccaaagacgccttcagcatggcagtatctggccctttcaaattctttgagcacccggtttctagaccattgtaatcaattgtttcctatgggcaaacccttctagataatgagttcatcctcctatcaggggaaaatacagcagcacaattaatatttagggatgaaaatggattactgttttctgagtaatgagccctgagtcatggttcagagctgaatatacagtgcaagaacaaaatttaattcttttcatgagaaccgacagactttacttcaaaccaactacacttcattaaaactctgataagagtctgcaaagcagcctagaaatcttgcagctgtgggttctcagagagaagcaaagaatccttatattgttcaagtatgacacaatgagtttgcaatggagtcaccccatcccagatatgttcagagttcagagtcaatgcattaattctcctcgcctgccacccgggttcccttaatggtgaaagggaggcagcatcaattctcttacttgctttagactgtgagggattcaacagccaagctggggaggtggggaggtgcagaagcccaagaaggatcaacttcctctgaatctgagtctggtaccaggaacagtggtttgagccagtcacatccagtccagatatggaggaaggaaaaatgagtagagactggacaggcccctactgcattagtgagcctgcctctggcctagggcttggaggggtctgaggctcctcagagaacatctcctccaggaagccttctgtaattcctcaggctaagttaggtgacttctctgtgctcgccaggtattttgtacatattcctttatag

SEQ ID NO: 34316 - DNA, 4036 bp, Bovine  19866880602857
  misc_feature (1)..(1): n is a, c, g, or t
nctgctctttaagttagagtgaagagaaaaggtcatcatttctcttgctgcttaaactagagcatgactcagaagaacaaacagggaagagacggctcgaatccccacattattttttaataccccacgtggtcctgcaggctccactcaataagatctaggactaaagtaagtctatctttccttacgtaactgtttacctttgcaaagccttcctaatctcccaggatgtgcagatggctacagaaaagaaactacattccttcttgtatcatatgggacagacacccagcaggcaagactggtttcccctagggtcaggcaagtggacagccagccccgtgtcagaacagaaggttggagctgagagtgtgggctgagcttctcctagtcagagaagggggtggggactgaggagagagcaaaaggccacctccccagccagcacaccctcccaactcaagagcatctgtgagattctatcattagagattccttgtctttgtctcctgagagaagacaacaaatcacacactgaattataagcaaatcggtgggaatctgttcatcatgtgactccctctggaagtggggctccggggcagtgggagttcttcattcacaatgctgctcaagccctgtccaagaggacgagagctggtgctgtgtacagggacagagcaggcaagtcttctcttcttggtccagccagggttggttttgtttttggtttgtttgttttaactgaagtacagttgatttacgtggcttccctggtggctcaatggctcaaatggtaaagaatctgcctgtaatgtgcaagacctgggtttgctccctgggtcaggaagatcccatggagaagggaatggctactcactccagtgttcttgcctggagaactccatggacagaggagcctggtggtctatggtccatggggttgcagagtcactgagcaactaacacacacacatagttgatttacaatgttgtattagtttcagatgtatagcaaagtgattcaattatatatatatatatatatatatatatatatattctttttcagattcttttcccttatgagttattacaaaatattgagtaaagtttccagtgctacacacctgtccttgctggttatttatttcacatgtgcaatgtgtatatgttaatcccaaactcctaatctggggaaagaacaccccttccccttccctccttgggaaccctaagttttttttctacttctgtaggtctatttctgttttgtatacgttcacttgtatcttttttaaaaaagattctacatatgagcaatatcatacagggtttgccaatggtttttaagactccataactagtcttacatcactggcctgctgagctggtacacctcttgcacacatagaacagcactgctttcagaatggacccctcaccatcttgatctgtagccaaaggttttcagcccagggatttcctggatataatgtcaaatcaggtgaatagaatctctttggttaccttggaaattctctctgaaagtaaaaccttggttttaaaagggaaaaagggaagttgatacctgcccagctccattttgggtgaggttggtggagttgcctttgcaaagttaagtgttaccaggtcccccacccacgctgtcccaaacaggctgcgtgagctagagcttcctttactctccaactcctgacaatacagtgtcccactggcaacttccaaaacacagggtatgaactttctcttctggatttgaaggctggaatttcagaagcgatttcaaattttgattgcccagttctcattttctgtggattttggcaagccagctgtttgtgacactattctcatctgctagccccaccctttggtgggacacatttcaaactgaaatcatcccatcttgagccatgagatcttttgcttcgtttttaaaaaagcaaaagagcctagcactcagctgcaaacaaattcctaggttaaagaacacccattttttgtcagcttaagcagatattctgactttctggggacgtttaccccatgaaaatgtactctctctcctggtggaatgcctcccagaattcgctgggtggatcaagtgacatttccaactagagaggcgaagaggaatggaatgggaaacacagtcatgattcttttcttctgcaaccaaggttttcaaggaattggctacttactcttttggccttggtatgtctcaagcagctgtattcacattttgttttggggcaagctctcactgtctgaattgctatcggccgtttaggccaaatcttgtgtctgaatctcggttaatttaggaacaggctagaattttacctgtatacctatcttcactttctgttttactttggagacctggattttttaggtagaactggaatctctcaatgctctcaatgtggattccctgtgccaaagcagctgcattacgaagttgaaaagggatctgatttgactttacttccatctcagtttctatccagttttagtaaagatggaaactgcacatcttcttttatgcccattatttccacttcaggtaaaaaaggaagaagttaatgtccaaacatgttcgcttgtctctgtctcagaacatttcttataggtctatccagagaggacagaggctgtgttgattctgcctgggaagactgagacaagtgggtttaaataattcatagcttttcaatctatcaaggcggtggctgtgggggttgtttatcatacttaaacaactgagaatgggcaggaactgacattcaaatgacaccaacatgagggcatgggatgggaaggaggaacaggggtggtggtggcagagcagaatgatgacttatgtagcagttcacccctctgccagcatctgcagcaatgctactcatttcccctatgctttgtttctcaaaccagaattttcagcttcctcctcccaaggaatatgtagccatgtgctgggcactggtagcccggggattaacaaatccatcttcctagaatacaaattttgcatgaaagatttgggggttgggacatgtaaagcaacttaactagtaatttaaatagttttatgtttaaaaagcaacatattaggaatagcataatttcaaatatatattttaacctaaaagaggagagtgaaaccaactcttccaacttccatgagtcttctactaaatcccaggcttccagggattgcatgtccacactctggcaggtgggatccctgagcagaaacatctgaaaaacccatcctgctgtatctaacagaagtacccaccacaccggtgtcccgaggctggcctgcagctggcttctgttgggcagggctgccccaggcacgctgctgtgtggacttgctgcgtgatgcctgggcccaaatgagccattccacccctcttgctccaaataaatcccccactgtctgcctgtcatgattgcttctcactggatggtagttacgaggccattagtagaaaacaagaatctgctctttccccatctgcatattggacaagtcttgcactatttagcttgtgaggcctgataagaaggcagcacaatttgcccattgactgctgccctcctttccagccccgagtaccagagtctcctggcttagactctgattttgcatgtccctagctgtcccccattgaatgctttcagtcgcacctgcgtggcacttgtgagcaaagaaaaagggctccctttgagctaattcaaactcctggccctcacacttgttccactcttgtctgtccccaagatctctaatttgaggcctaaacatgttggaagaatgctgttttcatgcgtccacaatgcactgtttattttgatccatactcctaggaacatgctgggtacttcccttgtattttttttttcccccaaagaaggcaggcactgatgacacggctctctctcctcttctttttcatgaggctctgaggtcagccgtgactgtgtccaggcataatct

SEQ ID NO: 34317 - DNA, 2920 bp, Bovine  19866880619242
  misc_feature (1)..(1): n is a, c, g, or t
ncatccccatgaattatttattatttacctgtaaatttgtaccttttgactcccttcatggatatttccccaacacccaccctgtgcctctggcaaccatccatctattctctgtatctgagagcttctttttttcttgcagaacatatggtatttatgtttctctgaattctttaacatagcatactgcccccaaagttcatgcatgttgttgcaaatggcaagattttttatgactgaataatatgccattgtgtgtgtatcacattgtatctatccgctcatccatcactggacacttaggttgttcccacatcctggctattgtaaacaatgcttcattgaacatgagggtgtgtatagctttttgagtcgatgttttcattctcttcaggtaagtactcagaagtagaattgctggatcatatggtggttcaatttttaattttttgaggaacctccatactgttttccatagtggcagtgccagtttacattcccaccatgagtgcacaagagttccctttcctccacgtccttgcgggcgcttgttacctcttgtctttgtggtgatagccattctgacaggtgtgaggtaatcgcttctcgtggtggtgattagcattttcctgatgatcagtgacagtatcttttctgtgtacctgtgcagatttttgtcatattacttctttgtgcctcagtttcctcatctgggaaatgaagatagcagtagctgctcaaagggttgttgtatgagttaaatacattaataaattttagctctgataccctgtaagcatgatgaaatgaatgctgttttcattcactgtcatttatattacagatagagaaaacagactgggaggttaagagtctcagctaagactctcaaacccactgccaagcaggggccctcacagttcaggggcaagaggatcaaagggtgtctctgtaaatccagagagaagatgacactccatccccatcacctcttcctgtcatatcttagagttattaatactttgctcgaggctcataatgtcttttctttaaactgtgttttcatttatttcctgtcaaagctgttttcttgttccccaaattaagaatatataaagaaaatatattttaggatgaaataacatgcaactctttagttatgcctgctatctctgaaaggtatgaaatacagttgtttgccagagagagaaaaggaaaatcatacaccacatgtacacatacatattagaagacatacgggacctggaagagggcacataatttttctttcatttcagtctaaaaaccatctagcccattctgtcaagcccttctctctcatctccctccacatctctgattcccacctgttggagacttgtttgttttttttctctctctctcccctctctgcatcctcttggcttcattctaggatgtcataggtggggctcctcagaggctgctgctaagataaggggtcatgtgaaaatgacgtactaggaagcatttccaggaaaaattggtgggaaggtaggatcaggaagggaggtctaggaaagcatcaggcaaagtcccatggagttgctcttggagacagatgagttcagccttcagagttgtcctcatcaggaagggatggacaaggagctggaggagttcccacctgtgatcaagggctgtcctgcccccctccctcactaggacagaaatgcccccgtcacttccagctgtctgagtgcaggcctgagaagtgggaagcaggtgctggctttgaaaatgaaggcacagctggagctggtgtgtatgaagatagtagatctgaggaaagactccatcctgtaagaggccgcgtgaagcccctgctgcgcagggctaaggaggccttaaattcttctgagtggaaagtctgcaaaacaaacacacctttctgttgttcgtgtgcatggtctctggacaaagttttgacatgtcatgctactcagggtctgttttttcatttgttttaataaattcagagaagggaaagaaatgacatggatgaagtggggagaaaccctcatcagttctcaaacatattttagtttcatgttattggtttttaaacaaaattcagagacaccatggggtctcggcggacctttgaaggattcttgattcagtgtcaggtgcccctataatcccaggctcatcctacatctttattgtttacttcatctgccttactcttcccctttctgtacaaaattggccttggtttatttccttctccttttttctcctttgaatgctatggcttcaacagtaaggggaagatgctgagaaaggtgggttgaatacacagtctggatccttttggagatcagtgctgtatttgaggtgataagagagttgggggctagcccccagtggcaggaatgaaaggggcacagggagggatggagagagcatgctttctggactctacatgtcacaaggtgatttcagaaacaacgttcttcctaatgagggaagatgggtttctggcctgcaggtggaggggccagtgcttggtgggggcagggtgctggcagcttgcacctgtggcagggaactgggccactcaccttcactgtctcttggcagaaaggcaaggtgcttcctaatggagaatgatgaagccggaacgcagataatgaactgaaacaggattcctcactgaaatgaaagtcagggctggcgataatgaacgcagttgtctctattgagcccagaagctccactctacgtggaactttgtgaaatgaggtcttccttgtaaaacaacaggttgtgaggagtggaatctatgtttaaattgctgttaaactgagctaagcaaagtcaagaaatagccttccaactcaagagattaatcctgcaagcaaggtgctcaaaaatg

SEQ ID NO: 34318 - DNA, 1119 bp, Bovine  19866880672978
  misc_feature (1)..(1): n is a, c, g, or t
nggatttgatctatgttatttttaacagcagctgggataaaggtggtattatctctaatgctggaaaggtgaccacagataagcatttgatgggggaggggaacaggaggtcattgggttccaaaaaactggttgatcactcctctcgtacagctttagagccagagttataactgcgtaggtatccgtatatacttgaatcagtgcttcatttgcatcttcagaagttgtggtctattgacttccccccacgccccctcaaatttatctgtgactggaaaggaatcttattgcatgaacccctgtaaaagaaaaatacaaaacttagaatttgaaaggatgtatagagttgtgctgaatttcctactatttgtttgcattcaaatagagtaattaatttgatggcaaagcaagcttgagtagttgagataagggcaggaaaaatgcacatgaagattgttattgtagatctctacaatatgaggcagttttcctttaagtactaatttatcttggaaatcagatgtaattttgtgaaaatcagaaatagagggtggttatccatgggtggtacatttagttgtgaactactggaattgaaaattaaatgtttattgtaattagttcccatgaaaatgggtaattaatcaattttatgccacttcctgggcttgctctgctgttatgacacatacggtattccttccccaggggcaaagctggtatgtgagggaaagcaaatagacagaagttgaaatatacttcaagtaaagtattgctttgctttactgggttatgggaattctctttacagtttgatcaattaaatatagaaacatcccatgcaggttgaaattttttgaaaaatgttagtggctcaagtatgtccgactctttgcaaccccatggacagtagcctgccaggctttactgttcatgaaattctccaggcaggaatactggagtgagtagccatttccttctcctggggatcttcctgacccagggatcgaatctgggtctcctgcattgcaggcagattctttaacatctgagtcacagggtagatacaggaaaattttgcttttgcagcttgattataaggtttctttgcccgtt

SEQ ID NO: 34319 - DNA, 1813 bp, Bovine  19866880695506
  misc_feature (1)..(1): n is a, c, g, or t
ncatagcctcatgccacagtaaaaccagctctcaactgtttaaagactcaaatcattttgcagtgtctttgtgtttataggtaaaagtgtttgaagctataaatcagaccttgaactaagtacaaagtttgagtcagaccaacataagttgtctgattgcattcctgacccacacagatgccctctgtggataaaagaagttgccccatctcagtcctgtctaaattcatcatttccctgacatggcaccagccactgggctggcggcttctccacaaagtgtcccttgacagcttcagccccagggctctcccttgcccacctggcacggctctacttactaccacacagtcgagcacttaactgtttaaccatcttatgtagaacgatcgggccttccttcctgtgtctaagttcttggaagataagaaacctgtcttctgaatcttctacatacctagggggcttggcatagtgctaggcacacacctgagactacagatcttaaaccttcacttgtgtgtgtatgtatgtgtgcatatatgttttctcatttaaagctcattgtataatagactgcttggcctacttgcttttaaaaacctggttctgggtacttttaaagcgtttctttgcggatatgtgatcgtggcagttaatatcagccagaatacttttcaacaagtctgcaggcagtcgtcatgagcagggacttagagacagggtttttctgtgttggagccagaattcagaaatgctctgcttttcttggttaaaagagacccagggtttttcttttcaacacccatttgcactgacctctttttctggcttctcagtaaaaggattaaggactcaggaagcactgggggaaaatggcttgtttagctggagaagggacttaggcatgtctaacagtgtggagtggaaaagccacgaagcttcctcttcgggcagctctacaaatccaggtccctgtccagctcttggtcatcccccagtgatgtgcatggcagtatctgtttgtgtgtgtgtgtgggtgtgggtgtgtgtgtttagtcactcagtcatgtggaattctccaggcaagaatactggagtgggtatattgcatgaaactattccctcaggtcagcacatcctgggagttagcaggatagcatagggtgctaagcactggggctattcattaacccacacctaaacgaccatttatgttgtcttccagagggttcagtctcttctgagaatgtaatccaacgcaacgtgttgatccttactggaacatcttgtgggtttagctaaaacataaataccctgatatgcttaaaaagtgaaaacagattcaagcaatagatgaatgtgcctttctttcttccaaatttccccagagaaactgccttctcattctgacttttatgtgacagaaaaatcacctacaaatgcactggaaatgttgaaaataatttcactgaggccttgtagtaggtcacagcaactgggtcttatggcttgctcctaacctgagctggatttaattccagaacccaggtgggctataaagcaacaccctcttttcattatcctttttttttttttaactgtgattctacagtagtttcagcaataaacaggctgaaagaaatccttggaggcttatcatcaaagttggatatagaaaaagagatatcaggcacccagcaagaaactgtctagacaagagtcccagagcttctacttttgtatttcttccttcctctgtcattcaacaacatcattgtcttcagtgtttttcataatggtctaccctgga

SEQ ID NO: 34320 - DNA, 929 bp, Bovine  19866880707935
  misc_feature (1)..(1): n is a, c, g, or t
nacctcttacacagctacaaaaggaagttcactgtgtcccattttccttttctctaaaagggtgatcataataatagcatctacttcataggattgtaatgaacataaattaaatagtatctgtgaaatgcttagaatgatgcctggccataataagtgcaatacagatgtagctattatgatgagagtcttagatttgtcagtcaataggcattgcctggctggggtttagcatccacagtgaatctttcacataactggacaggacagatctagtgggcatccagtcctaaatgccagaaggaaacactaagagcaaaaacatttactgagcattgccatgtatggagtttggggctttcatatttaatgattaagagccaacatcagtgaatgttgatgccaagaagcatctctctcacacacacacgcacacacgcacacacacacgcacacacgcatgcacacacatgcacctgaaagccaagttcctctgtgatttttatcaaatgttacaagaagacatcacactcaggtctgtgaaacaaagggatagatgttagggagctgagggtccttctgctaaacagatgactacagagttaagtaagtgacttgtgaggaggaaaattccaggctgcaaatggagtcaagatgtggagcagcagcagttaagctaatacaccatgatgacgaggattaaagatgaaccgaatatcctcagagggaaagccaaacgagacagaagacacatcagaggagacctctgccatcagcaaacacaaaaatgtagtttgatatcagaaagagataattagcatgtggaaactagatttagcctgaagtatatgtctgcccaaggtgcaggtcagaaaaagaaggtttataccaggtagttttatgggagaaaccaggacacacaaactcca

SEQ ID NO: 34321 - DNA, 1410 bp, Bovine  19866880718713
  misc_feature (1)..(1): n is a, c, g, or t
nggtccttcttttgttgactttaagaaaaacactgactttaggacatgaatagctcggtgccatagtcccatgaagttttagcacatttgaaaattattatcatgatgacagactattggatgccatgataaattaggaagttcagatgccaatttatcatgtagtgagatttaaaaagaattgctatcagaactgttgctaccagaattccttttgtgaagagaactgactgctaagttccataaggataaggactatatctcctttctcttctttgaatacccaatgccaagctcagtgaggggcacaaaataggagctcgataaaaatttattggaaaaaatgaatgcataaaaacctttaatgggccatttagacagactaaatacagcatctggaagggccagaacaaaggaaaagctaaatggctatacataagaaaatggaagaaattccctcttaagagggaagagaaagggaaagagagaacagaacatttcaggaggtaggctcagagatatttaagttcagcagtgtattaaattcaaatttaagctatgcttgaattataaaatccctcatctcctcatgtttattttatgtaaaactgctacacacacaaaggtttcaagtgaagacttttttgttgttttacttgctaagcagtgaaaggtgctgaattttctgtatggggaaagtaccacaggagtaaggaatatccacaatgatgctcagaggacctagaaactactccactggaagcgggaatcaccagcaggggttgttgcttctcctctactcaaatcccaggcaaacttgcatagtgtggggtgcagcccacccaagagggatgggactcattttggtctcctgtgacatctaatcatggtaagacatgaccactgggctacgaacttcattgtatatgacaccactcaagtccttgtttttgcattcaatccttcccattatcctcctttcccattttttttaatgccttaaaacattttcactatcatgaaatagaaagtttctgctgagaacaaaatgagaaatatgtttattcccatgaggattaccacccatgaaatctattcttgcctttataaggctcagcttagaatataggtagaaaagcatttgaaaaatgcttgtaatcttgaatctgaagtaataattaattggtgtgaatctgaagaggcttccctggtagctcagctgataaagaatctgcctacaatgcaggagaccctggtttgatccctgagttgggaagatccactggagaagggaaaggccacccattccagtattctggcctagagaattccctggactatatagtccatggggttgcaaagagttggacacgactaaggactcactttcctttacacttccactttaaa

SEQ ID NO: 34322 - DNA, 1130 bp, Bovine  19866880750305
  misc_feature (1)..(1): n is a, c, g, or t
natcatctgacaaaaatctagtgacaatctcacattccttccctaattaatgacttcattctttagcctggatgaccacaggattttttttccttcctcttcagagtccagtgatttttcactaatctgaaaaacggtcttttttaagtggattttttgctgctttggaatcctttaagaaaatgaaagcaagcttgatatatttttaactgttaaaacagctttagggtagtaaaagaagtgccatcttgaacaagttaactttttttatatatgctaacatatatttgccaagggttttcattcacactaacttgctatcaaggagggagattgaacaaaatatgactttgatcactggggaattatctgtagcaaatggatggaatccctaccttgtaaagtcaattattgtgatttgctaaaatgatgaccaggtcagccttataaagttggaaaaggaaggtttcaggaaagtgaacataaggggaacttttaaatttttctgttttgtctaacttgggtcctattatataattaaggtttacagcctctgaacagagatgaaaatgtcaacgggaacaattcagaaaatcaagtttatgatgcagacaaaacacatgtggtctagggatggggcccggtctgtgcagcttcaccagggcctgaactttatcaggatgtcagcccgagcagcacacagggaagaatttccagtgtcgtcagcacacaaatatctttctgtttggtttcgctctcaactagctctgtgttaagtcctgaagttgattctagatgaataagaagcttgggatttctaggttttgcctgccctggcctagtgctgagtacaagaaggaaggggtattctcaccatatctgctatacagataaacttctaattttgagctgcctccactctatgctggggccatttgagagctaaaatgtgaagcagataaaataaagtttggaatcctcatgacttcccctgatattactaaaaatgctcattgtcagggaagcttctggcccatcccctcctccccgatcaaaacccacatcttctatattaaatttcctcaagtcctactcagtagatgataagaccctattctgtacattaaatt

SEQ ID NO: 34323 - DNA, 1050 bp, Bovine  19866880793220
  misc_feature (1)..(1): n is a, c, g, or t
naatggcggcaaggatcagcagtagacgctatgagacgttggctttggagacaaagaagtcgtttgtcatctttaagaggctaatgtcagtgagatgtggagtttgaagccagaaaacaagatgatagtgagtgtgtcatagaaaagtagccacaatgactgtctcctcagagggcaagaaactagcactgtctctgtctctcctcaaataacctggactagggaggggaaaaggccctcctccatccagggaggccatctcttccataatatagggagaccaattctcccagtatgctcaggattctcccaggtttagcaccaaaagtcctacacgtggggaaacctctcagtcctaggtaaaccgggactgctggcacctgatgttcatatgggtgtgacactttattttggtaaagtcttgatacatgctggtaatgatcattttaaacaattttattgtggtatactttgcataccataaaagtcaccagttcaagtaatcatcgaaagcaagtctcaacccaggttgtacattaaaatcactggggagtttctaatgaataccagtgacaaaccttcagtcacagggatgcctgaggcccaggtgttgatatttgttttccaaagcaaacccagttgacctctaatgtgcatccggcattaagatccactggtttgaagtaaagagcaatacataatatcagtgctcttctaagttttcaagaaggagaaatgaagtaagaactcaagtggatatgataatataggcttcttaaaatgagtaaatatttgaaaaagtaggggaaaaaaagagtatttcaagtatttcttattttgaattctagtgccaaattctagaactcagatgggtttttcctttcattaaaatgcagtatagtaattatcttgctaggaaaattataatgtgtgtccacattttgcatgaaatcctgcttctgattacacaacggtcctacaaataagaaagtataatttttaactttatacagatgaatacatgtttcctctgaatgtgtaaaagggaat

SEQ ID NO: 34324 - DNA, 2627 bp, Bovine  19866880795980
  misc_feature (1)..(1): n is a, c, g, or t
naaaccctgaatataccttggtccatctaccattttccttgaagaacaatgtgaaataacctaaataaagttgcttaaaatttaaaatataagtactatttttggtagagaagagtttcacttgaggttgagcttgagtggtctttagagactttttttttttttttcagaaaggagctacggattgaggataaggttcatctaaagggagtggagagagtggatagtcccaatctttggatgagacagagacttcgactgagaaagccaccctttagactgggaggggaggaaccttgttctctttctgggttcttgggagaggtatacttagattcttataagtacagcaccccagtgtgtggtcaactggcttctgccacatagaagcatccagaaaaccaggcaggcgggcactagaaaggtaccctggagctatgtaaaactttgaaggtaacaaaactgctataaactgagttgtacccctcaaagttcatacgctgaagccttaaccctcaacatgactatatttggagacagagcccataaggaggtaatttaagttaaatgaagtcatatgggtgggaccctaatccaacaagaagaaaaatcagagagcacgtgtgcgctgccctctccccatctccgtctccctgtctctcccactgtctctcttcctcccccttctccctcactccttccgtctccctccttcccgctctctctcatgtacacttgcacacatttttctctttcttccatgtgagcacatagcaagaaaaacagccacctacaagtcaggaagagagctctcatcaggaactgaattgctgagcaccttgatctcatacttcccagcctctagggctgtgagaaaacaaatacgtgttgtttaagccaatctatggtatcttggtgggcttcccaggtaacacagtggtaaagaatccacctgccaatgcaggaggcataggagacaaggattcaatccctggagaaggaagatcccctggagaaggaactgacaacgtgctccagtattcttgcctggagaatcccatggacagaggaacctggcggcctacagtctgtggagtcgcagagagtcagatgcaactgggcacacacacatggtatcttgctatggcagcccccaagtcaaccaagacacatacccattaatagtaactgtttcaggatactttctgtataagtttctgtttgtttcattattccttcatcttaaatagttttatcaaacctgacagtctagcagatccctcaagttatttgaaggcctaatatgctttgtaaactgtgtgaggcaagggaaaacaatgacaaatatgacagacacagacactgcctttatgatcagtctagacaggaatatattaaatatatacatatatatgttcatgataattgtaacaagtgccatcctaccatatgagagcatacagtagtctctgccgtgctatgcagaattaagaggagatcctggtctttgtatgcaagaatcgggcaaggctagtgtggtagtgggggcagccacagcctgagggagattagagatcctataccacataaggcaatggccaggcttgatgaaaagactgggcatcaaccatctctctcttgttcactacaacaatatccccagaattttgcacaccctagcacactgcagacactccacaagtatttgtttttagatggatgggcacgaatgacagtaccgtgggggaaaatctcagaaataaatgggaggaaatccgagaggactatagccctatcctccagtatataaaaacataaagttgctgtcataagagtatgaagaaaaagtgacactttattacaattctcagggacattccagtaaaactgactgaagatttgtttcggggaccatgtcagaaatgctctgtaataaacagctgttgtttctgcccaacagccatttccaaaagttccaagagattcaaagtttttacctctgaagcctcttttcctttcggagagaagatccaaaatttcctttgggaaatcaccctctaccattctcctgtcacgtggtttccatggaattgaattcaactggagctacaggggagtccctgattggctttaaaaaaccaacatatcccatccctgtggctacactgagtacttccagaatggcacagaaatcagtcagagccaaggaagtatgcttagtctttctccggtattggtagtgggagtgtataaaaccacaaagtgaaccagtaaagctgacacccaaatgaagcaagcctagagactgaacatggtgataatacgtgagcactggaccaaaccgcactggaagctcagcctgcctgtgtactttacgtgaactgatacattcccttcttacgtaagacacttaagaatcctaatggatatgccctgcttgccctgtcctcactgtcttataggctgaagtaggccgggtcacaggagcaatctgcccacctcaagcctctctggaaggcagcttggatttctctggcagggctccacaggcatcctgccagcaaggatggtcctgagagagctccgtttgccctggattaagggctccgtcctacaacctgccctcc

SEQ ID NO: 34325 - DNA, 2561 bp, Bovine  19866880858323
  misc_feature (1)..(1): n is a, c, g, or t
ngaaaaatccctgatgctgggaaagattgaagacaggaggagaaggggatgacaggggatgagatggttggatggcatcactgactcgatggacatgagtttgagcatccctgagagttggtgatggacagggaagcctggtgtgctgcagtccatggggtcacaaagagttggacacaactgagcaactgaactgaactgaactcgtgaaaggcaagaccaggagtgtgtgtggtgtggtcttaggagaggaggagagtaaacagatgctgagtactgaatctatacagatacagaacaaagcccaaatctccaacagcaatgttgtttccaaacaacaggaaagagcagaaccctgacacagcatgaaaaaatcaggaggtggtgggatgcaagtgctaatttcctaatctttcttactagggaagtatcgcatatggtacaaaatttaatcagcagttattttaaaatcacagcaacatctcaatattttttaatttttttctttttaactgtaggaggatacatcttttataaatcaaaatgtatctgaagtacaaaattccttcaattgtaccacaatttccatttcttcctttaaattcaaggaaacataatgatgccattattttcctatttttcctcctgtctgtctcttctgtcacatcctgtgtaggttcatgaagctgtgcctggaaattgtccatcaaaagtttatcgcagacgtttctgagtaacagaaatgtttattatacattctgttttgttttgtctagtatttcttgaattattttttgcagtgcatatttgccctttttacaacaaaaatctttattctttattaagatagaaagcagtgttaacagttgcgtacctatgaggtttatgttttgtgtttatttatgtcccatttgagagtccctcggacagcaaagagattaaaccagtcaaacctaaaggaaatcaaccctgaatattcattagaaggactgatgctgaagctgaagctccaataatttggccacatgatgtgaagacctgactcgttggaaaagaccctgattctggaaaagattgagggcaggaggagaaggagacgacagaggatgagatggctggatggcatcactgactcaatggacatgagtttgaacaagccccaggtgatggtgaaggacagggaatcctggtgtactgcagtccatggtggtgtaaggagtcagacatgactagatggctaaagaataacaacataaaaactaattaatgcaggttacagaaatttcaattcaccatagatgtgaagtatcagtatttttctctcatttgcaagtaagtcttgttctgtgaacacctgtatttctgagaatccatttgtaaatcaaatatcagtctcatttacatacattttaattatagaaatgaactgtatgagttccttttcaatttttagtcacttctaatattttagctccttgtcaactcattaataaattagtgaatacatacagaatgtctgtgacttaaccactcaaactactcaaggtggtttgactcaagactttttggctttaggatggtgtaaaagtggcatgtattcagtagaaactgtacttggaattttaaatttgaccttttcctaggcttaggaatatgttctcttgtgatttgggcagtggcagtagccacgcctctcagtcagccaccagatcatgagaatgaacaaccaatatcaccattctggacccgtacaaccattctgcttttcactttcagggcagcatttgaaaaattacatgagattcaacactttcctatgaaacagacattttgttagataatttctgccaactgtaggctaacacgtgttctgaacacatttaagataggttagtttaacttttgatatttagtagattgtgtgtactaaatgcattttgacttaaatattttcaacttatgataggtttactaggatgtaatcacatcctaagtcaagggagatgtgtacttaactgaattttttaaaggtacattttagctaggcaaaaatacctttagatttatgggtaataatgactgattcattagttttgaaagttcaagttttgactacaatgcatttttatcagtgttcgacactagtattttgatttcctttcaggataaataaatatataagtaaggtgacacaaaggcattgtgagacaaaattatggtaaaacgtcaattccaattgtgaagtaaggacatttgaagaactcttataattaccttttatgtcaattccaaacattagagataagtgactgtgaagacctttaatcaggcttttaaagatgtgagaatttatttggcttttaatatctttccttttttggactacattatttttcaggcagtatcaatttcacatgtaatcctgagaagcaactagtatataaaatctgattcacagagatcagtataacactgggctaaaagtgtgagacggggggggaagaacatactttcatcaagtgatgagatgtagaaggacattgaggacatgggagtcaatt

SEQ ID NO: 34326 - DNA, 989 bp, Bovine  19866880967408
  misc_feature (1)..(1): n is a, c, g, or t
natgaagaatagcgctgatagtccacaattaaatatatcaacaagaaggtgatcaaatgtgttattctctctgaaaagagaaacaggaaagagtaaagtttcctacgacatatgtaaatgaagacaaatagtgagggatataaatttgcaggtaagcattttccatgcattacatgcccttttgctgatggaaagtgtcacaaaaaataaatcataccatgttttggtaattcggtgccatcttcagaaagctaaggaaaacccagctaaatatcacacagcttattttattcactatgtctacataatacactcactacttgagctgtcttatatcatttatgttgaatgtatatatcccctaactgtaaggttttcataaatataaataaagttacatacttttataaaatgaaattttatataaataaaattatatatatttataaaaataatataaataaaattatcactcaagaaggagaagaaagaaaattgcatcatgaaaatttaaagaagggtatattctaattcggagagaatgtgaaatgtattccttctctggaacctcttaggctttccaagatatagagacatggagcaagagtatatttgcagtttgtctgtgattaacttattagaaaatcgtttgctatggactgtataaatgtctcagacattccctgtatagactacataaatgtcacagacataaaactgtaatctaactcaggatttaatgttatgctattatatgccaataacgaggctaaacacaagaagcagcacacagtagtgagcaaaacagacttgaagcttgtacgctaactggagaaacagattgaataattagtgcaaaaattgattttaaaaactagaacagtttctctagaagcaaagtacagagtattagaagactgtagagaagagaggactctactacaggagtcacagtgtgggggaaatgtttgatactacgcttgatctta

SEQ ID NO: 34327 - DNA, 1694 bp, Bovine  19866881065593
  misc_feature (1)..(1): n is a, c, g, or t
nagacatcgataaacatggaccatgtagcatcagaatcccaatgtgaaagaatacataaagaggagagctctgtcttgtctgctatttcctatgtacacactcttgtgctgtaagaagtcagaatgttagagccggaggagacccaccagatgtaaaaaccgaagtctgaggaaatgtggtaacttgcccaaggtcacgccttagtttggagcagattctggactgggactcagatgtcctaactcacactagacgtttgctccctctagtccctgctcagttatgacgccttctcctcagctgtacttttgggaccatggcatgcaaacatttctccttcaattttgaagtcccctgtttcagaggtgagccagtctcactcttggagaaaggctgctgaaagtagcaattacccccccagattttagtccttctctttcttaatgacatctctgatcaattggtggaaatattggtggaaatatttcagactgctgtctgaaatatctcaaattcagcagtacctccttatttcagtggctatgctaactttaagagaggaaacacaggagaaacaatttagttagaaatgctatgattttctcttctctgcctcgtactctcttatctccctgtgtgtttatttctcttcctctcccttacacacacactgattatttcctgtactcaaagggttgcaaagcagccggagaagttattcaatttgtcccccttagacacggccacacctctacatcctagatgtaagaaaatctgactgtttgtgcagaggactcctcccttggaagtgcccttcattttctaataactctgactaagagcaaaccatgcatgagtacaccccacacacgggcacagtgtgggcagcacgggaccagaggacctcccactgctgctgctgctgccgctaagtcacttcagtcgtgtccaactctgtgcgaccccatagacggcagcccaccaggcttccctgtccctgggattctccaggcaacaacacaggaatgggttgccatttccttctccaatgtatgaaagtgaaaagtgaaagtgaagtcgctcagtcgtgtccaaccctcagcaaccccatggactgcagccttccaggctcctccgcccatgggattttccaggcaagagtactggagtgggatgccattaccttctccgtgtttaatcatagccatagtcaaaaatcaagtgtttttttcccaaaaaatgtaaataacggcacacctcctgatgcacacctcccgacctcattcactgcctgccctgcacatcccacctggacttcgtctcccaccaggtggcttcgacttcctgagagaggaccagtcgtccccggtgccagactcagggctcagctccagctccacttcatccagcatcagtctaggaggcagcagtgggaacctcccacagatgacccaggaggtagaagatgcggacgcagctgccgactcagatgagaaggcaaacaagctcattgaatttctgacgaccaggtaagggagtcaggagatgggctgctgtttgggggtcagtcttttggaagagtgccatcactttaaaaccgaagatgaaaattctaataagtctcctctcttctgaattgcatctgctggcgtctgtgtacgaggcagaccctgggaggcgctgtctacgactc

SEQ ID NO: 34328 - DNA, 635 bp, Bovine  19866881066063
  misc_feature (1)..(1): n is a, c, g, or t
ngcaccattccgagatagaattttgagattctactcaggagggaagagttcaggtgttttttttttttttttttttcccccagtgaagagtagagagagaagctgaagatgaaactactttcaaggatgagaaaactatttagatgtataaaaccaaaattatcctaaagtgactttaaaaaatctgttatttcactgtttgtcaaaaataatattatgtcacattctggcctgtcacagagcagacctctgtgtttgtgaatgtgtgtgtgtgtgtgtacaaaagcacactatgtcatttcctattctactctgaaaaaagcagattaattatctttcaagggcctgtattattttctaaaatcactatagtatctgaaacttgtaatttatcagctattctgaggctgagacagaatatctgaatttgggcagttccagaaaatccggtatccttgcctggtgacagtacagtggagttttacatcatgggacatttaaaatatacagactcagccagtaacttgtggaaaggagtttaaatattgtgactcgtcctacatgctgaattaccccaaagcctaggcttgtctgtggagctcccttaggatgcgagacatgctcttgcttttcct

SEQ ID NO: 34329 - DNA, 832 bp, Bovine  19866881084041
  misc_feature (1)..(1): n is a, c, g, or t
ncttctcacttgacattgtatcatgagtatttttccaggtcagtaaaaatcaaaatcctgacactaataactacagaggattttgtaattaaacatgtcccatgttttatcgtcctcttcagcagaacctcagtttggatgagggaaatgatcatgggcctagttaccagtacttccccagctcctgctaaggacagccttgtgatagctccgataaattaagagatacaagtagatcttgagcaaggatctaatacaggggaccgtgatacaagttcggatctactgtatcacatggtgactatagttgttacatgatttaaaaaaaaaggtacaagtggaaatctgcttcctatgtatctgatacaaaaggacagatttggcaagcatgaacggttatcctctctccatcctgcctggaacacaaacatgcaaccaagaagttccagagccatttgggggcatgaaaaagacagccacttgttccagctggtacactggacagactccaggagcttggatcatgatggcatgcctggaggatctgctgtaccagccttggacttactgatccatgaggataaacacctccacagttaaagttcagtcgggtttctgtgacacgcagcctaatgatacaatggtagaatgtgtgtgtatagaaacctccaagtgtatttctgatgatttccttagaatgagttgctagaaacagaattactggatcaaagtatttgaatatttccaaagctttggatgctttctttcaaattgctttctatgtagttttaccattttattcataccccctacaagaagccacatcacctca

SEQ ID NO: 34330 - DNA, 1386 bp, Bovine  19866881105088
  misc_feature (1)..(1): n is a, c, g, or t
ntagccattagaataaaaagtaagcaggaccagggtacccagtgaatgggaaaggaagacattctaagtgagggtcaactgtgtcttatattagagaaagtaaaggtaggaaagaagggcaatgggtatgtaaggtttagggggagtatcccaggttatacgaaggagtttagtgggaaagaaaaggaagtcgaatcatagcggggctcaaatgagagttgtaaaagcttctgtggtttgtgggatatgggacataagaaaaagtagaacacagagtatcctaaaagagttctaaagtcaatgataagaaaaaaggaaaatgaggttcataattagagacagataattcaggtaggtctagaagggcagacatgattctgtcaggctgttccagattatatgaagtgatgaaagccatgattcaagccaggccagtaagtctttggttggtgcccttccctctaaatcctgggaactggctcaattttagtatttacttagaaatgttagctgtgaaatgaccgtggcctgaataaaactacacttcgggacctaagcctgtaagaaatatacatatacagagacaatcaccaatgcacgtgtcccctcaacatcccctcatatcctttctggtgtgtttctgatatgtcctgcttgctctgtttttctcattataaaattaagacatgttcactatagaaaatctagtcttctcactgctattaactttaacattgacataataaaccattattgtattaacaccaacagctgcaattctatactgagagccagtgtgcctggaaaccagccaaaggcccatgaccagtatgaccagccccaaagacaacactagtctgcccaagaatgatttggaggtctcctagggcttccctggtgactcagacggtaaagagtctgcctgcaacgtgggagacctgggttccatccctgggtcaggaagatcccctagagaaggaaatggctacccactccattttgcttgcctaggaaatcccacgaacagaggagcttggcaggctgcagttcatggggttgcaaagggttggacataactgagcgactaatactactttcctaaagcccaaaggagactgcttctagactgccttcaggtcttccctaggatgtataaagaggcccaaagcaatctttcaggagtcagaaacaaacaagcaaaagccttgaatgcaggagacaccaatctagaccactggttggatactcaccacatagggtgcacgggtttaggcatattcacagacaagtttatttttattagagataacctagattagaatatttacagcctaaatgggttaaaggactagaactaaacttagtaaatccatcagtcaaatattg

SEQ ID NO: 34331 - DNA, 898 bp, Bovine  19866881187083
  misc_feature (1)..(1): n is a, c, g, or t
ncttaagtatataaatgtataaattaccagttttagaaaatcttactattgtcttacagttactctttatagataaggtagaagaagtaagtagtatttgcattttaattgtttaaaactttgaaatacaaatgccaggaccattgttctaactggactgtgcaggctttaggtcacttgtggcccacttgatgcttgggagctgctttttgtgttatgttgtactggggtcgtagagatggacaatgtgacaactgattctaggaattcttgcatggtgcttaaatctcactggatggaggagcctgtaggtgcttggtgctggtatcagacaccattcccaaagagaatgatgaaaatgctttctgaagatcaacctaggatggtatagatagtcttttcaaaaatgactaacaactcttagtgccaaagaagtatggcagtatcccactcaggatatcaacttttcagaagaggaaggtgtaatttttctgcagctggactgggttgctagtttgctgaaacaggaaatagagtttgaaaaacagtaattgctgctactaaatattgatttttttttttcttcagaaagttaccctccaaataacctaaaatcctttctcctctgccctgcccgcaatgttcacagcagtatcttctcactattgaatttcatcacattctgttcaactcagcagacagcgacggcagtttgtgagtcacttgatgtgtactggggagaaatatacagcaaataaatctattcttttccaggccaaagcctacctaaggattgctactgaagtggtaagaagattaccaccacctccagagtcattccccaagtgtcttggaaatttgcctggtctttgacagttaaggccttggaagtcagcag

SEQ ID NO: 34332 - DNA, 1421 bp, Bovine  19866881197183
  misc_feature (1)..(1): n is a, c, g, or t
ntagagaaggattggggattttcaggagatggggcaccccccctctttggggccttttataattggcttccaaactgtcatggcacctgtgggtgtatatttagcatatgaaaatgtattacagcgagcatatagtgtggctgaaggtctactggaagctgaatcttcttccaccttgagcctagtaggttctaacccgttttggtcttgtcctcttgtttttcatggttgtgtcattcttttaacggttatgtcctgccgtcttccttcctgtctcaataccttggcttctctgtttcctttttgatacatgtaagcattagtactaaatttagtactaaatttaaattagtactaaatttagtcagtcagtagagacttgtagaggattttctattattattcttagttccatcatcttggaagcagaggaaattaacttcttgtgatctccctccctaccctctttattcttatgtgataatgtgtaccagcagctatctaggtgtgtatatatatatgcaaaatccactcctaccacagcaaattttagagcaggttttcagttttgttttaacccatgatgccaagggctcacttgtagacaagcatagttttcttctagaagacaggacagatagatgataaatagattctccctaacattttgaaggaaacttaatgatctagtgatgataaaattgagcttgcaatcttctattgcaagcacccacttcattgttttcttgtttcttgaaaacataaacttagaaaactaagttattttacttgacaggtatttttagaagattaatttgaaacctgggacctaaccctttcaagttactttaaaaccaatcttaatataaatgagagcaaggacaaagaatcttagaatgttttttgttttaattgccattattattattttatggtagcatttagttttgtaggtgtcatggaaaagatatggaaaagaggtgatagttataatattagcagacccatagataatagttaacagttatctagatttgttaggtttgaaaatctttttatccatagtgaatttactcctattttcaatttaactggattcttttgtttgtggtttaaaaaggagttaaattgggtcagaatttctcattgaatgttctacctttttaaagctactgactgacctgaatttagtaccagtgcttcagttcagttcagtcactcagtcgtgtccaactctttgcgaccccatgaatcgcagcgtgccaggcctccctgtccatcaccaactcctggagttcactcagactcatgtccgtcgagtcagtgatgacatccagccagtgctgacatacatcacaaaggtaacagaggagagaaaggtatgaagaccagtaggaagagaggaaagtgagaagggacag

SEQ ID NO: 34333 - DNA, 1240 bp, Bovine  19866881262272
  misc_feature (1)..(1): n is a, c, g, or t
ntatgctgacatttgttggcaaagtaatctctctgctttgttagtatacaatctaggtatgtcatagctttccttccacggagcaagtatctttcaattccgtggctgcagtcactgtccacagtgcttttggagcccaagaaaataaaaatctgttactgtttgcacttttttcccttctatttgctgtgaagtgatgggaccctatgccatgatcttagtttttttaatgttgagttttaagccagctttttccactctcctcttttaccctcctcaagaggctctttagttcctcttcactttctgccattatcatctgcatatctaaggttgttgatatttctcctggcagtcttgattccaacttgtgattcatccaacctggcattttgcgtgatgtactctgcatacaagttatgcaaaagatgatacccagatgatttatatgtgttttttggggagagttatgctggatctttgttgctgtgtgggcttttctctagttttggtgagcgggggtactctctagttgcggtacttgggcttctcattgctatggcttctgttattgtggggcatgggctctcaggggtgcgggcttcagtagttgtggcttgttgcctctagagcacaggctcagttgttgtcgcgccctagcttcactgctctgcaggcatatgggaacatcccagactagggatggaaccgtgtctcctgcattggcaagtggattctttaccactgatccaccagggaagccctgtgttttaaaggctacttttagtgaaatgagaaagtcactgaggtaaggctggtgtgagatatttttctgcacggagccctttcacagcaactaattgctttactttgtagtagcagataacctcatattctcccgctcatattactggggagcgggggaggagggaaggggggaaaggtgaaagtctgcacaagagacttatcagtgatgagcttccttaatttccaaaaaactggctcaaaactcaccatcaaaaaactaggatcgtggcatctggtcccatcacttcatggcaaatagatggggaaaaagtgaaaacggtgacacattttattttcttgggttccaaaatcactgaggatgttgactgcagcactgacattttaaaaaattagtcactgaacagcaactacagatttacttatattcacacaatccctgtttcttctgttttcagggagaagtgtctcttgt

SEQ ID NO: 34334 - DNA, 1197 bp, Bovine  19866881287916
  misc_feature (1)..(1): n is a, c, g, or t
natgttcgcttttaaattcccagcacttcaggtgaatacctggcagatgcagctggcagttaataaatatttggaatgaatcaatgaaatctttgttaagctggtgaattattaatcttttacatttggaatattaacagtatatactgttgttgcctaatgaaagtatttaatattcagctggcattttcgtttttaatgttttcaaaggctcatgtgtgggagaattaacgtgtagcaaagcttcagaaagattttttaaaattcacaaaatgtcacattttctcttagcatttatttaaaaatatttgtattttgggtaattaatgtcacatcgtgtctaaaagctgttttccatatctggataagtagaggttaagttttgtgatatgtgtttatatgtgatataaaaatttggcaaacattccttggctcatgtgaataatagacacttacaattatatcttccatcaagagggaactgagaaataatttataggtaaatgcatagagggaatgagactgtaaaaatatgtacaaataaaaatatgtacatacatatatgaggtgtcattcaaaataattacttaaggaaattgttcattatagttgttgaataaaatgataagtttccttggtaaaataatttttatcctaatatttataagtagaaacttaaatgactggtagattttctcctccttgtgtccttaggatgcttccgctctgcagcacattctgggctccagagttgggcttgtttgctatggccaggggtggtcctctcaccatcctccagtttggcacacaggtgtcaacaaaggtgatcatggcctttccactggaaacatgatgctgtatgcttctcgccttcagtatctcctgttagggatatagtggaacttcttcagacttgactcttggtcaagacatattttattctaagtgggcttgtttgtttgctcctttgctcatttccccatttatttctttatttaatgcaagtttattgtggtttgtcatgtagaaagcactagctttgagattgtagagaataagatagaaatgaacatggcatgatacacttaccccaaggatgttgccttggataactgcactttgtggaacatctcttctggaattgcctttagaatgagtttttcgttacctatgtgcctcattcatttatagtcctat

SEQ ID NO: 34335 - DNA, 1509 bp, Bovine  19866881314084
  misc_feature (1)..(1): n is a, c, g, or t
naacagaatagaaaattaaacacaaaaataccaaccacataaaaactccaccgtaacttgaacacgacctatctacagaagacttagattaaaaaacaggagtcagcaagattctcccgacagggccaaataacagaaaatattttaagccttgtgaatcatttgatctgacagtactgagtcattgccactgtagcagcaaagcaactacagacaacagtgtgaacacaaatgagcatggctgtgtactataaaacttcatttacaaaaacagacaggatttagtccacaggtcatagtttgccaacagtgattttaaaaataaactttttcatgacaaagttattcagctgcccaacaacctaattttggtgaagccaagagcaggcaggacacagtcatctcttacggtgtcagaggagctacctcagtaaagatttacttcctcatctttaattggatagtttttaaaaataataaggagcacatgtattaggctgtttcactggaacttagtatgtcttgttttgattttataaaatgcaaataaattagtgcccattaaatagaaactccaaagcctgtattaattaaagtatattgtactttgattgtggcacagctaccaacctgataaaattaccatagctacaaaaatcagctgaaacatatcttcaagtctagaattcaataatgttcaaaagatgcaaaataaactttgtttttcaaaatttacaccattatttttcaataggctcctattttaagtgtacgaacagtttcaatttaaactttcaacagtttcacactgtaggaaaataaatgagcaaggtaaaggttacaaataaatatatgcaactgattgttcaactaagttttataatgcctttccacctcactccttctaaaataattatatttagtcaagaaaggtccaattaagatttctttcattacagccaggccccaaagaataatcactacaaaaacctcatcaaatacacaacaaagaaaatgattattagcaaaaaaaaaaaaaaaaaaccacctgtaaatgcactgttgtaaggtgggctttccaggtggttcagcggtaaagaatctgcctgccaagcaggagacgtgagctcgctccctagttcaggaagatcccctggagaaggaaatggcaactcactccagcattcttgcctgggaaacctaatggacagaggagcctgatggacgacagcccatggggtcacaaaagaattgaacacgacttagtggctaaacaacaactattgtaaagtagaactgccatgataaacttaacctaataccgttggtacctgtaattataccccttctgtgactctcctgcagtactctcactctagcagacaacaaaaacataacacatcaaaccccaagatactacttagatttttggatttgtttctttatatttcacaataccctgtgagagctagacaaggcggcagaattattcagagtgattataatggt

SEQ ID NO: 34336 - DNA, 1063 bp, Bovine  19866881376175
  misc_feature (1)..(1): n is a, c, g, or t
naaatagaaaaatgcttttaattctagccctttactttcttttcctataaaattatgagaataagatggcatgtggctagaaatattaggttaagattccctttttaatgtacatgtggtttcccaaggcaaaaaaaaaacctatcatatggcagagtgattaacattatagttgaaaaaaatctattcatttcctagttagtgaaggaggagttattacattgcttatctaattgtgttttattcacatccaaaatgtattaggatttgtcatagccatatgcctctctggtaggcttatctatactagattaggatttccttgtaaatctaaatgtagggcttggaaagctaggtttttgctaaatgcaaaaaggactgaatgtacctataaaagaaattagtatttgctgaaccacttcttgagcatacagtgtctgctgtatatcaagtgagcctgagtaattgaaattcagtatgaacagaataaatctttttttttttgcatgactacacagaataaaagataggtttgtagcaaattcccacttgtagtcgcaagtatatagacataaactatacatgataagacattataaataaatttaatggggaagaatccattttatactttgtggtaaatttttcaaattgaaaaaaactgctttattcaatgtgtcatgaatttagtctcccataacaaacctgcagtagactttggggaacggtcacgtcatattccctctgtcaataaatgggaaggatgtagagaaaagggaaccttcttacactattggtgggaatataaattgatacagccactgtgaagagcagtatggaggagggtccttaaaaaactaaaaatagagctaccatactacccagcaatcccactattgggcatatacctagagaaaaaccgtaattcaaaaagttacttgcacaccagtgttcattgcagcagtgtttacaatagtcaggacatggaagcaacctacatgcccatcaacagagaaatggataaagacgatgtgatgcatatatattatacagtggaatatta

SEQ ID NO: 34337 - DNA, 857 bp, Bovine  19866881460184
  misc_feature (1)..(1): n is a, c, g, or t
ntgccctcctgtctgatgtatggaattgtgtgtgtgtgtgtgtgtgtgtgtgtgtgtgtgtgtgtgttatcatttggagaaacctcttagcatatggtggaaaaaaggctgttttgttacttttatgttttatttcttaatggcctactttgcagcagctttagtggaatggtttaagctcaatctgacttttttgagtcttttactctgtgacagtgactcagctgggttagagccaagatgtttacctgattgaggctgggggttgagggggggggggcgctgtgcctcggcctcagcttttcccacttttgcagagagcttacaaattgtaggcactcagaataaatggcatcattagtgggcgtaaaataccctaagggcatgggaatgatttagaattctaggattcggtaaagacagtgcatgctaggggctcaggtgtctgagagaaatggatccagtagtagtgctgaaatgtgaccttggttattatcagttgaccttaattctttacttttaaggtgaatgtggacattttctctttattgaaatgctgctggctatcagggcagtatttgtcaagcacaaggaaatctttttgctttaagacaattcttttaggtaatgttttgcacaagattacttaacatgggcagcttcaatctaagattctgtgaaaattgcatatgtcacagaggacatcagctcataactagagaggtcattggcaaaataagctatttcatttccctgaatagggagagatgagctgggctcttggaaatttggtgtttgaaatgaaaatgaaattgtataaatacttatcaaccagatttgagccaaggtcaaacaat

SEQ ID NO: 34338 - DNA, 1089 bp, Bovine  19866881518138
  misc_feature (1)..(1): n is a, c, g, or t
ncttcctgccaacgtgctcacctcgggcccagctctctgctgggaggacagcacacagctggcagcccttggcctgtcctctcagaagccaactattaatagatggtgcataacgctgttcaccaggacaaggaaacctgtcagtagaaattggcttacggctcttcactcatctccccatggccagaggagcccaacaaatagaaatttattttgattctgaggtggctttctatctcattagcaatcccatgagtccctactcttttcactcaactgtcaacagtccttgatgttctgaataaagaagctgtccaaactgggattaaaaagaaggggggaaaaatcaccattccttttctcagactccatgtggaggtgctgagctggctcagctccctagagagctctcttttccttttctttgtagccctagtgactatgcaggattgacgtatttacatcacacagccttgattcttgctgcaattccttccagcaaaaattccacacaacagaaggacagggtacagttaaaattctggtagaatcaatgttgacttgattgggaaattctagaaaatggaattaaaagtctgaaaagagactaagttactaattagctagggttgcaaaaaaaaaaaaaaaagcaatgtatagaaatagaatacaaggaagaagacatccagtaaaatggtcatcctacattcaaccagaaatggacaccgccatctcatatgtggaaaggagatgcaagtttggagtggttgcctcctttcaagagattcacagtttgacagtgttgcagtatatccccagaggactgggtaaaattggagggtgggagggaaaggcacattggagaagaaagtatcatagaaagcgagtaggtcaaaaacagaaacgaaagcataactttaaatgaactcgtactttgacactctatagctgggggtaacgagaataagatccaacaaattaataccatgccacatggcttagaatatttggggtggtcaacaaccaggaaactcatgactcaaagtgtacttaaaaactttttaaagtcccccccccatttatacaata

SEQ ID NO: 34339 - DNA, 1136 bp, Bovine  19866881537598
  misc_feature (1)..(1): n is a, c, g, or t
ntggacctgatgtttgggtttgagtccttggtatcagtagcaagagctataggagggaagtttataagcctttttagattgccacaggagacttccattggagtttcagaaatttttagtttcatgtttttatatagaattcaagaacatcaaacatttatacagatttgagttggcccaggtttactttgtaagaaagtgaagttgttacatctttatatctgatctgtagatatattttcagcatcttgcactcatcctctaaaatcttcagtacttctgttttcttttctgtctcctttatctcaacatctttagctacatattatttggaagtggacagttaaggtttgaagttaagtgttgataactaatagagtttaatttggtagtcctccaagaaccccaggaggtttttatagaataacccctaaattcagaagaccatgtttctaatggtagaacttctggcatctacaattggctggtaaagacagatttgaggttttgttttaaaaaaataacatatacaatttttatttttcagtatgtctagcacttaatcctggagaaggaaatggcaacccactccagtgttcttgcctggagaatcccagggacggcagagcctggtgggctgccatctattgggtcgcacagagtcagacacaactgaagcgacttagcagcagcagtagcagcagcagcacttaatccaagctattttctttctgtgtcctttcagataatgatctttaactattagaagaaagggcaagaaaatttaaaaagcaaaacaaaaccctgactcagtttaccatcataaactgtttaataattaagttgaaagttaaaaattttttacatgagtatgcttaatattttactatacttacattatgaaatatctacatatccatccctctatccaacccagtagcccagtttgttttttgatgcatttcaaaataaattgcagccactttcccccctaaatacttctctggcttgatttccttcttaaatagtctgcatgtcaggacaaagcaaagaattcagcaactgctgcttaaatctcattcattgctttgggaatccaggcaaagtgatatacatggatggaatgaattcagttt

SEQ ID NO: 34340 - DNA, 1097 bp, Bovine  19866881734682
  misc_feature (1)..(1): n is a, c, g, or t
ntgaatgtggtatgtatctagaaattgttctttccaaacaggtatctagtgttttcttatttatcttaatattgcagatcacacattaatacacatgcccagcgccagaatataagagggtacacagaatcaccattatggagtttaaccctaactaagaaattaattccaacatcttcatgtgccaagtgttgttctagacactgagaatacagcaatgaacaaactaactgaagctcctgtgtccctgaaatggggacagaaggacaaaaaacaaaccaaatctggtatatcacttgtaatcttgatgaaagtcatcttttgagacctcagtttgttgtctataaaactggaaattaatattactaagtatcactagactcttctcaaacaaaaactacaccaaaaacctgtaatcaatagaacttgcactacaattttccctaatcgatccttgcctccagtggtagacacataacagaatccagtccagagtaggaagtgtaagccatgccatgaaacagaagaaaaataattggataatggtgaggctcaatacaagtgttagttgctcagttgtgtcgtactctttgtgaccccatggactttaacccaccaggctcttctgtccgtggaattctccagacaagactagagtggacagccattcccttttcagtcccgacctagggactgaaccctggtcttctgcattacagggagattctttaccatctgagccacaactaactctagttagtaagctatggtttctcaaataagataatcatgacatatattgctattctggaaaatattttctcttagtttcagtactattgcccagagaagtcattttcaatttaaatatcatggctgtctgtttaaaaatctttgttatcaactagactactgttttcagataatgaatttcaaggcacatttaacatgagaattcttttttctctttcagttgaaaaataatattaattattttatttagtatgatgaacacatactttttcaaattgcatcaggataggcatatagtcagagaaggcaatggcaccccactccagtacttttgcctagaaaat

SEQ ID NO: 34341 - DNA, 1663 bp, Bovine  19866881849479
  misc_feature (1)..(1): n is a, c, g, or t
ntgatcacttttaaaggaggttctatataaaatgaataagaagttataatttaaactatggttaggtggttctattttgtgcatcagaatcttaaattgagatcaaaaatgttgcataaacctggataaatttctgagaagcaaaaaccgtgttttcagtatcaaggaacatttaggtatgtgtatatgatcacacaaaaccttttgggtatcccttgaagaatgtctgtgtggttttggatttggagggtaacctattggatatattggatattaaatcattaccttggtgggtaaagattttctagagatagatctgagacttaaactaaaaaataatagttgaaaagagtattatcctgctttttgtgcattatgtctatttaataaccttgcaaagctgaaatcttattgctcttctaacatttatatctattgcagtctcaggaattattagcttgaacaatatgcatttgccaatatttgataactttgggcctgtaaaaatatcagttttgtgtggcttattctaagtgatttttgaacattaactcattttaatgaaagtttagccttaaatccccaacaataataccaagagtgaaatattttcccaaaatatgagagccatctcattaaaagcatgatcatcaaggttacttcttatgaatacatttagtatgtatgtgctatatcttttgtgaattcttagttcctttgtctttctaaaaggacttactgtttctgctgagtgctgcctgtggtgtttgtcagacctggtgactgagagcaaacatcctcagtggctgagagttgatatttagcagtgtttgggatatctttgaaaaaattcacccttggtagttagtcaatgaccaaacgtatactctagttttagggtttctctacatgtactatctcagtactcttctttttctgacttcctatgatgcaatctgagatcactgatttgatacatttcttgtataggtatttaatgctataaattttctcctcagtactactttagctgcagcataagaatttttataggttgtatatttatttttattaatttaaaaatgctttctaatttactttctgatttcttctttaactcatcaattatttagaagtgtattacttatttcccaaatatttgggggatttttcagaggtacttttgttattgtttttaagtattctaatttaatttcattgtagccaaagagcataatttttaagacttgagtcttttaaattttattgagacttgttttataattatgatctatcttggtaaacattccatggacacttgaaaagaattgtattctactcttagttgagaaagatttataaaatcagttaggtcaagttggttgctaatgttgtttaaatcttctctatgtatgtatcagtattggttttttgtctatttgttctatcaattattgagagagggatattgaaatatccagttgtaactgtgaattactcctttcagtttttgctttatgaattttgaaatggtctcgttagatccattgacatttaggatcattttatccccttgatggacttagcccattatcattatgaaatgactctttatctttagtaatattctttgctctgaaatttactttttcgatattaatat

SEQ ID NO: 34342 - DNA, 1209 bp, Bovine  19866881864873
  misc_feature (1)..(1): n is a, c, g, or t
nacataccatggagacaggcaacatcatctttaacaaaaggaattgcgttaagttccaccttttcatctagcaagtatcagagaaagtaaattaggaataaaaccactaagattaagaaaaaccttgcatctttggtctttataattaaagaaaaaaagtattgatgctcttagcagagtcttcaaaatcagagaaaaattaggacgccttctatcaccatggtaatacagatgcagaaaaagatacttctagatactaacctctaaaaataatggtcatcttatctgtgacatcaaccagcccctttttttgacagaatctaagcctacagaactacaaacctaaccaagtaagaaccttctttcccaaatcagataaggtactgcagcaaaagcactgaaaaccaacatcaattccttcaaaatgtccttaactaaactgcaatgcagggaagagcatttacaattctgatagcagctcttgcaaagaaaagcaatgcagcaatgcaggaatcagatgtaaacacagcacctggtccaccctccagattcaaaatcacaggagccaagcatggttttaaaacccacgtcttcatgtgtcctctgctctcctttcaccaattgtttcaacactgccctaccgaggatttagagccctccttattcctcaaagagatgagatgagggaaacaaaccactgagaagaataaaaatgagagagaaaaaaggaatcggtgagatccaaggtagggaggaaggggagaataattaagaaaaaaaagacaagactgttctgtgataaagatctggataacttcttattgtacagaatcagatcgtgaaattcaaaggatgtggaacagttttgccaccaatatgttataaactaaacgaaactaagggaaaatatattgaatgtaaaatttaggtaactgttctctttctaacccataagcaaattcagcaacttccattccattccaaagagagaaaataaatttctggcaacacgctgcactttaccaaaagaaatttataaggtaggccaaacagtgctgaggaggaaacacatagcttcttgagagctattcaaagcaaaatcgctattgcttctaatgggaaatatcaaagcaagttgtgtacaacgctttctacctaaaactataaaggggaaaagcagtttggggctttttaccttctgaaaattac

SEQ ID NO: 34343 - DNA, 1631 bp, Bovine  19866880255486
  misc_feature (1)..(1): n is a, c, g, or t
ntgtgtagtattggagaaggcaatggcaccccactccagtactgttgcctggaaaatcccatggatggaggagcctggtaggctgcagtccatggggtcgcgaaaagttggacacgactgagcgacttccctttcacttttcactttcatgcattggagaaggaaatggcaacccactctggtgttcttgcctggagaatcccagggacgggggagcctggtgggctgccgtctatgggggtcgcacagaatcggacatgactgaggtgacttagcagcagcagcagtgtgtagtattacaacaaagacgtagtttctatcatcagatatagtattctgctgattgtccaacatggagcccttgagtgcatccagaaatatgtggttagtatcacaggaccaagttttagttctgtatgtaatcaatcagcagtttcaacgacagcaattctcttttgttatatatgcatatgcttccagataagattctgcccaaagggttctgagattaaaaataatttttaaatcactaattcagaatagcataaagcaattaaagaagtgttaaactgtgtaatgccagaccaaaactgagtaagtacttcagagctagtggcacagtggtaaagaatccgtctgctaaatacaagagatgcaggttcgatccctgggtcagaaagttccctggagaagaaatggcaacccactctaggattcttgcctggaaaatcctgtggacagaggagcctggcgagctacagtccatagggtcgcaaagagtcagacatgactaagcaactaaacaacaacatttactaaatatgtactatgacacacacaccctctctcacttaatgtttaagagtgagttttaatttaattatttagataatataccattttacagtaaatttcattttcatcctgctaagaattaaaggtaatcaaaacttacttctgaatcttcagataggccattgctctgttagctggaagaagggcattagcgccatctgctgctatccctcgagtatagcattcgattgctctttcatatttcccctctttgaaaaatgcatttccctatcatttcagaaagaagtatggagaagaatttaaaaaaaaaaattagtttaattcaaatttttagcaacactgctagtataccaatcattattatatcagtaattaaacctttttaattgctaaaaacccatgagatgttttagaatctgttagtttgggttgttttttttaatggtgttcttctcatttcagtaccaaaaaaaacgtatgctactatattatcttgcagcactaaccattattttaccaattaaagattagatgaagtttaaatgaaaaacacattttaataaatacaggaccaaatactgtactctttaattatatcagaatctgtgcagggaattccctgtggtccagttgttaggactccacactctcactgctgagggcactggtttgatccctggttggggaattaagatctcccaagctgcgaggcacaatcaaaaaaaaatagaatctgtacaaaagaatttcataatccaaatgatttgtggaaagaacagagtaccagactgtacagctcactattcagtaacatt

SEQ ID NO: 34344 - DNA, 1173 bp, Bovine  19866880482957
  misc_feature (1)..(1): n is a, c, g, or t
ntgcacaaaatccctgtgctgagagccgggagatataactgcatacattttcctggtgggacctaaaaatgggagtttctcggccgggttgtgttttatagactaccacagccacttgttaaaggcagtgtattacttgcgggtggttggcaacaacttctcttcctttgtaggagaatgtgggtagatggtgtgcaggaccacagaaaaaatagtgaccttcagaaagcggctgagatcaagatcagtgagaagcataaacttaagaccaggaaacagaaccctggatattataaaggggatttttcaggtgtgcagaggctctgaaaatccgaattggtgtaagacctagaaggaaacggcgtctgattggttttcctttttttttttttcaaagtgagaaaggccccccctacccattgggtcggccgccctcgtaacaggacctgcctttgtgacgtggcccggcagccgcagttaataagctcatacctgggtgagtgaggttcagagccagtggccccgcgggagcgggagcggggccatggctgaaggggttgagcccatggacgaatcccaaggtactgaagttaaaacccagcagcccacggaaagaggcctcgcgggacccctgaggcagagctcgtgctccgtgctcaaggtgtcccagctgttgctccgcgccatcgcctcacacaaaaggctgaccctggcggctctcaagaaggagcttggaaatgcgggctacgaggtgcgcaggaagtgcggccgcctctcgggcgaaaggtccgggtctgaagggaagggccttcacctccgggtgaccggcagcgaagccgccggctactttaggatctggaagattccgaagccgaagagaaagccaggacgcccaaggctggaggagggtgggcgctcgccggggacccctctcggggcgcggaactcacgcaggcgctctgcgcgccgcacggtggccaggaaggtgaggagggggcgctcgagggcagactcgaggaaggtgaggtcaagggccaaggacctggtgagttccagaaccaaggaggaagggagggccaagaaggaagacatcaggcccaaatcccgaaatgcgaagaggccaagctccaaggcctgggaagaaaagaagcaggacccggggaggccggtgaa

SEQ ID NO: 34345 - DNA, 2425 bp, Bovine  19866880526863
  misc_feature (1)..(1): n is a, c, g, or t
natcaaaaatgaagacataagaattgtgaattcacaaaaaatattggggcttctaaaggttttcttttacagagaattatcttttctatcagcaccaaggggaaaatttatccaaacaattcctagagttgatcacgggttcattgaggaacaaaagagcagaaacatgcaatttcatggcaactcccaccaagcgcagcctctcattaccaacaacaagccaaatgatttacttagcaaccatgctggtggcatttagcctttgtctttctcacatctggtgctccaagtatgatgcatttaataaacatgtttataaggggtaatttatttctggcactatttttgcttctttttacaccaaacttcattcatggggaggaacattgtaattgtctcattgttaagtgaccttccttactatattgttatgagattttacaaagctcgtgaacaagaacagtcttagaaatcaagcctagtataagctgcaagttgacattttgtacaacagtcagaagtgaagcatcaagtcaaggagtcggggggtgaggagagaagctccttctcaaaatattccctggaggattcccagagtcaaaacaatgtcaggaaatcactctgatgtgtctcatgacctctagataacagtgcatagtgtttcattttactgccacatattaagatggaaaatcaaatagaactaatttgatttggtttatgaaaattttagataaaaaagcaggcatatggagatgctggatagttacacaacaaccaaagcttatttagtatgtcttcgaaaacagaggctcattttacaaagtctaaattgatctcctttgcagaacattatccatgtatccttgtgaccattgttgactccctgaaggcgtagactgcaccagaggttacttctcagaggacagaggatcacctcatcaagtcggggggtgggtagatggattcagtagtcctgtatggtagaaaattcctagactgggaataagaagcaacttgattccactcctaggtctgcctggtaccaatagcctctgtcatataacctgaatctatatatctctatctcagttagctaattgccacgtggcaacaaacccacacctcaaaacttagcagctaaggaaaaagccacttccgattctttcaaatcaatgctgatcttggacaggctccactgagctcaggtgggctgtgctcctctctctggggtcaactggtggatctcctggggacttctggttccaggatggcatctgctgtggcagattggttcagtgtcatgtagtctatctggcccttcagcaggttagctcaggattgttatgatagggggagtcgggggtgggcaggggagaaatagaggaagagaggaggggaggagcagggaggcgggatgagcagaagtaagagaaagagtgaggaagggaagggctggggcagggagagagaaagaaagaacatggcatcttgagtcttgagatccagggttggaactggccctctggttcatctctcacattctcttggtctgccctttccacacttgtcttgagaactaaatgagatgatcttgtgtggactttataagtcatcaagtgtcgtaaagcagatgtaatgtaataagacatcactgacacatcctgtctgagtgttgtccttcataagatacacaaacttataccctaattagagataaagccagagatgatactgggggcagggaatgtcatgtgagatatattatgtatttatgtcctagttccacaagctttgaggtagattgctacagaaatgcatatgcaaaaataccagcataccataaataagaacaaagaataaagactgttctgtttctgtttgtagaagcttgtgcacacaaggacccaggagaaaggagcagtgaccgaccccacaagagactgacccagacttgcccaggagtgccggagtccagctccagcagccaggaaatcagcctgaagggatgagcagtgtcggagaagaatgatgtagcctctgactcaaggtgcaggactacatgtttatttcaagcatcaggtcttcttttatactttgacaaaagcattaggtcagaggtttgacattttcagttccccctcacccagatttattgtttccagaaatcattgttgccctacaaacagagttcctgcttcagcgattctctcagaatcggctttactatctattatctacttcctcttacgtgtcctatacttaactcaagctacattcctcagtttatttcttatctttctaaatcttgttagctcctagcatcttaagatcactatttcctaaaaaggcttctagctattcttaattattcttaaaccctaagctcagcaaacttcttttgccataaacattccgctcacaa

SEQ ID NO: 34346 - DNA, 2606 bp, Bovine  19866880537334
  misc_feature (1)..(1): n is a, c, g, or t
ngcttacggctgacgagaaagactctctctacttcgcaagcacttcttgttcctgctttcactttactccctgtacaggttctgacggtgcaagaaaggaacagatagggaagagctagttctgcagcaggcaggcttgaggttagatcccgagaagaacgtagtatcagaatttatcccagaaacccactcttatgtcactcaaggctctgttttcctccagaactcaacttccttcttagctcttattacacaaaacttcagacagccccccaccccgttgctcttcattcccctaacaacagaagttccatctgcctgcaccccagtttcatcagcttcctcttccctttcagcttggctctaccactgaggccctcaggctcttttcatctgggggggtgcggtgaggtggggagacctcccagaggagccggcaaaggctcaggctgggggcaagggtcagaagcccaggggctgccccaccctgcaatgcagttagaaggttcctgctgcccctgtgctgtctgggcaggatggaggagactgaggcccacagaaaatcagggaggcgagacagactaaatcacagagtcgaacagaagccgagtcaggaagagtcagggagcaagtcagatggggggtagggagctgacggtcaccaggcagaagcctggccaggccccacagaaattcctgtggcctctgatggcagggtgggctcaggcctgagggccattggggtactgtggcccagcatggtgtctctggcctgggatggcagcgggggccctgcctccatgcccagttctcccaagggagccctccactggagtcagagccagcacaggggggacactgttgtgcagactgggccttggagccctggggtgctgtggggtggcagagaatgcctcactgtctaggagagctagaagcagggccaggaaaggctgggaagtcggggggtggggggggcagacattccaggcatgaggaaggaccccagtgaagcaggaagtggtgggcctggggaccaaggatggggccatgctgctgaagaatgcggagtggcagctaggggcagaaaggaggctgtctggggttcagggaactttgcaggggtgagaataatgccagcccggaagttgggtgggcagctgtgcgcatagctctcagccctctgtggtggggaggagctgtggggaagaacaggctagttttgagtggacctacagcaacccacacctcttaggcacctctgccctcccaggcctcccctagcaaagaaaacaacactggtctaggtttataaatgaaatctctacttgttaggtcacccttgctgcacagctaaccctgacctcagagagtatgaatgggaacttatacttgctcatattattttacatttatgctgaatatgaaacttttcaaaacattttttatgaaacatctcatacatctgttaaatatatacgtatatgaacagtttaataaataattataaattaaacatccttgttcccatagcccagaattagaaccctgccaggacctcagaggtccttgtgtcctgccctgatcacagccctattctctgccctggagggagccagatcctgacacctgattgtcatttccttgtttgtcttccgaagcatttcgtctcatagatattatcatctttgagtttcacaataactttattaatcccatgttacagatgaggaaactgaggctcagatggttttaataaccttagtccaagatcacccaacgtgtaagcggcagaatcaggatcacatttggactggctgaggcccaggtgatttcttaatcaaaccgggatccaaaggaaaccctgggacaacccccagttttggagatgggtgccccagtgccccagaggagggggaggccatcttcatgaccaggccatgcactcctctcctggatttgttgactcccttgactgggcagggtcctgctgtgtgaatacctggcaggaaatgctggaggcctggggggcttgggaggggaggggagaggaggggaggcggagtaaatggaggctggggaagcaagaggatgggatccgtgcctagagagagcttcgggccctgccagacacaagccaggggagcccaggtctgtggggatgtgcctgagccaggtgtgcacccaggtttttgccagatttaccagatgtgccctccttggtgggctagatgtgcttggtgtgagcatgcacacaggagtgtgtgtgtgtgagtgcgtgcacacacctggcatgtctatgcatgtgcccaactctatctacatacttagactgctctaaaccacctctccaaccctcatctttttttttaattataaaattatacacgcttgggggcttccctggtggctctggtgggttaagtgtctgcctgcaatgcaggagacccgggtttgatccctgggttgggaagatcccctggaagagggcatggcaacccactccagtgttcttgcctggagaatcccaaggacagaggaggctctcaggctacagtaccatggggtcagaaagtgtcagacacgtctgagcaactaagcacgca

SEQ ID NO: 34347 - DNA, 887 bp, Bovine  19866880568362
  misc_feature (1)..(1): n is a, c, g, or t
ncgctgcgggtggagaggcttccaggggttaagatgcatcccccgagttagtcccccttccaccacacggggtggggagagggctggcaaataggggtgagcgatatgattgattcttgatgtctgcccccgctgcgggagcgggagtcggggctcaagtgctatggaccggctgtttcttccaggtatacagtgatgtctggcaccccagagaagatcctagaacttctgttggaggccatgcggcctgactccagtgctcatgacccaacaggtaggggcgggagacacgctgcctgctttctgactcagagggtggtcagcaccacctgggagagagccaggcacctgcatctgacctcatcgggtgctcgattggcctctttggtcagctggccggaagttttcgttcctgtgttcttggcttgtgtaggaagtgctgtgacagggacggggtgtcactgctccctggcccgtggcgggattggtaaaaggggtgtcccggttgtgcatatacttgggctcaggagactcgactgctgaatccctcacctgtcccctgtccctgccttgcagagacattcctcagtgacttcctcctgacccacagtgtcttcatgcccactgcccagctctgtgctgccctcctgcaccaatatccttccagccctgggggtgaggatggtgtgtggagcggggaggagggatcccccgaagcatggctgtactgatccctccaggcccagcccattcatgggctccgggtgtcctgcccttcctgtgccggttcctgagggtggtgggtggtcctgttggacactgtggttcccttgactgggactcaccttccacgcggagcccgccgggggcagcgagcaggagcgcag

SEQ ID NO: 34348 - DNA, 1249 bp, Bovine  19866880599812
  misc_feature (1)..(1): n is a, c, g, or t
ntttgggaactctgtgtgccccaccttaggtctggaacgctggggattggagaccctgggaaagctggaggcaggctcgtgccttgtccttcagccctgctcaggcttcttgccttcatcatcctcttcgcagaagcccaccctagacatccccgatgccctgatttccaaggcccaggttcccttggacagtaccttgcaagggaagatcacttcagctcatttgagcctcagttttctcatctgcaagatgagcgtgatggccaccacctcagattcttgtggtcctgttatctcgcccttccccgctaccccccccagtccagaaagggccctgaggacacgcctctgtgttgtgtattcttgtgtctcaggcacctgaagcggcacaaagcagtggatgcaaaacggccacttgctgaactgaattctatgggatatgatgatgatgaagaaatgtgcatgaaagctccaagcacggtgcctggctttcgggaggcatttagcaaatgggagttaaagctgaatttgaatgactctcccctgtggaagtagaactggagcccctggcccggactgtgagatggagccccaaggtttcagccctctcctccgggacccccatcggacccatcgcagaggacctttgtctgtgcccctcgcaggggcccctcccccagcgcggacctcccggcctctctccacgcaggcagcagcttcctcggcccctctggggcggtgggcgtccctgtgtcggcacagccggctgggcccctctccagggaaggggctgaggggtgtgaaggactggtgtgtgtgactttgtttattttctctgaaggatcctgcctgagccctgctataaaaataacctgcctggaaacctcatctccgagggggagaaagaagcttttgtatccaaagaagtggctctgagagcctccctgtaccttcgtcccagccccacacatcaaggaggagctggctgaggcaatggggggccagggcccaagtgagaggggtggggggcggctgccgatggagggcatggcagggttcgaaggaggagaggagggggcaggggaggagaatggggaggggaggcgctcggcagcctctgctagcagggctgaagcatctccgtgcctgcttaacccaggaagttctaaagaacgatagagaatgagagaggagaaagaagaaatcaacaagagatactctggataccatgagaggaacaaagaggaga

SEQ ID NO: 34349 - DNA, 553 bp, Bovine  19866880608562
  misc_feature (1)..(1): n is a, c, g, or t
nagtaaactcaggaaaacatattaatgttagaatcctggattacccgatctttttccgagatagcctgttgtttattctgttgctcttcaatttgttttttctctccttcatctgacttaaccattgtatcagtttcccctggatatgagtcttctttggaagtcagagcctagaagacagagcagtcagcttaaataaaacaaataatggaagacacatacatgtttgactttaaaataacaaactattcatattagaattcctgccacacttcaaataattaaaatatttactccaattcaaaatctttctactaacaaaactaaaaagcaaataaatttaatgtacatcttattccaattaaagtaagtaatattcactaaagagctgttcatttatttattcaacaaagattcttttgaatttctacactgttctaggaacaatttttaaaaataaagaaggtaattgagaccacatcaccaaatctctcaaatttactattcatagtcattatctgaccatctaggataaacacaaaaatatacaata

SEQ ID NO: 34350 - DNA, 1161 bp, Bovine  19866880672489
  misc_feature (1)..(1): n is a, c, g, or t
nagtcggtgatgccatccaaccatctcatcctctgtcatcccctctcctcctgccctcaatctttcccagcatcagggtcttttcaaatgagtcagctcttcacatcaggtggccaaagtattggagtttcagcttcaacatcagtcctaccaatgaacacccaggactgatctcctttaggatggactggttggatctccttatagtccaaaggactgtcaagagtcttctccaacaccacagttcaaaagcatcaattcttcagtgctcagttttcaaatggtaataccactcaaacaaaaacaaaacaaaacaaaacaaaaaaatgatacttcctctccattttttcattccctctcctttattaaatcaggaaatccaaattcaagtcattcactgacagcaagtaacttaagttctgtgaggctcaattttttcacttgagaattgagtattaatgttatatatattggggattggagatacctatagagcatgttggcttccccgatagctcagttggtaaagaatctgcctgcaatgcaggagacctgggtttgatccctgggttggaaagatcccctggagaagggaaaggctacccactccagtattctggcctggagaattccatgaactgtatagtccatggggtcgcaaagagttggacacgactgagctactttcatgtcacttcattgaggacataaaattggggattaatgatatatcttaaagataatatctggctggagtcatgtgacacccaaatgaaattatgtacctgaagttgctttatataccataagcactatataaatataaggaactatcatcaacaaggaaaagctcaccctgtgcaaacagtgaggcaggagtggggaagtgaggaagaagggaccatcttggcaaataacagaatgtttgccacccaaaactagggcggaaggaaagattgttgagcacctactatgtatccgcattggttctggatgcttttacccttgactgacactcatgaaatatgtttaatgaattacatttaatcataataataggactttaaagcctgagagagaaaaatagcccaacttcgtagaaatgtcaatagaaatggatcaccctgagcatctcatgtgatggtatatatattatcagag

SEQ ID NO: 34351 - DNA, 1330 bp, Bovine  19866880706695
  misc_feature (1)..(1): n is a, c, g, or t
ntgcttctctctccaacctattaaaagcagggaaatattatcaaggtctggctggatagctcatccctcactctgatttctctcttgaaccatcacgaggttactgataagtattcaccttgagcatgagtgtaaggattggagagaagatgtgtaagtggtctggagactgctgagtgctcaggaaatatggctctaattatagaggaatcgctcctttgataccacagagcagatgcagtggctgggagctgaggtgtcaggttgcctctcaggcctggctccccagctcctggatgcttctctctgagactccgaagtcctaatgacttacaggccagacaagctccagcctcgcctggaactgtatctctgaaagcccccccagctaaagcactggctcacagagcagaaagcggtggaagcatggggcagggatcagactttcttcctaagtggtcatctgcagatgaccagtcttaattttcttattaacttagaggccaccgtgaggctggagccctgggtgtagaatggagggagatgctgtgttatttgtgtgtgctctgccatcctgcacatcttctagtaaatagagcctagatttagcccttttcttctgctgctcgttactcagaaaattaaggaaaaacactgacgtttctccttctgtgaaagtgtgtcggggcgggggtgtgtgggtcctggatgggcagggtccagtcaccagcccagagccgggcagaatctcagtgtgggatgggaaggaacccagctgtgtgcggaaccctggcctgagtgttgcccttctccctcagaccaaggacgtgaccagggccatggatgaaaggagattcgatgaggccttgaagctgaggggccggtgaggagatgaccaggaattcactagccacagaaatcagacatcagaatgaagccagaaatcgatgtagcacagacccaaaataggagcttctgttttcttctcttcttattgtctgtacaacagtttcttcccaaagagaactaattgtgagatggccagggggcttggttcactcccaggattctttccctggccttagcttttcacagtttgttattgctgtatgtggacccagctagatcatgagggtctctaggcaaggtgagggtggtgctcaggggtgtttggtaagtttatggcctctttatacccacctgctcccacgccccaccaatccttgctcaggctccgcttctgtccttggaggcttgccctgtggaacttcaagctgggtttatacccacccgcccccgcccccaatccctgctcaggctccactcatgt

SEQ ID NO: 34352 - DNA, 1525 bp, Bovine  19866880718864
  misc_feature (1)..(1): n is a, c, g, or t
ntgaaagtgaaaagtgaaagtgaagtcactcagtcatgtttgactcttcgagaccccatgggctgcagcctaccacgctcctccgtccatgggattttccaggtgagagaagcatgcactactttagtcgaactccttatacttacctactttggcaaaaaatatctcagtactattaggaaacggccttgggtgatacataaattgggtgaaagatacccaggttatagatgcaagtccctctccctctaggatttctaaattactttacaaactcagccctttctccactctatcacttcatcctgatttcagaattgggagtgaaggattaatgtaggtttcatttaaaaggttaacatgagggacttccctggtagtccatcggctaagactccacgcacactcccaatgcagggggcccgggtttaatcgatacgttgcaacttagagtctgcatgcctcgatgaagctcaaagatcctacgtgccacaactaagacccagctcagccaaataaataaataaaatattttaaaaataaaaagataatatgagaattagattcaaggcagctggagtggacacagcagcaaactcagagttctcaacccagttctggttgagaactggggtccaacactggaattcctggtgctgaacttcactgggcagtgtctgttctctcacatcgatactgtgaaggatccatggctttccactgttggcctgccctataatgttggagaggctgtacttctcaaatacagatttctggacctcgcctagagattctgatttaggaggtctgggataggacctgaaggtgtattttgggaagcagtaggttgagaatttccaagacttctttgggctcaggataggattctgactttgtcttctggatgtcccagaagctccttacctgaaccctgggatcatcttggcaaagccgatgaccttctggatgctataactgaccaggtcagccaggtggggcagcatggagagctgggacaggtccagggtcacagaagggtcatcggagtcttcttcattcagatcctggttggagaagctggttggctccattgtgtctggggaaggaatagggaagaaaaggaattactcgagccagccttcctcctgtgaggccctcctgttctctggcagcagcgccagttgggaattcagcatgactgcctctctccaaagtcacttctgcccaggcgtccccctggggtttcccgcgtctttcttcaacagagtgatgaagcatgaaaatcaaagagcagagacattctgagatatgagacttctttaagagtgattttatatgtcattcctaatgatctcgagtcaaagatgaatttggaaccaataaacttgtggaaaacaatgttcagcctcactagtgatcaaagaacagccaagaacatccacttttcacctctaaactagaagcaaatatgtttaagggttgataccagtatttgtaaagatgcaggagacaggcaatccttgtg

SEQ ID NO: 34353 - DNA, 1300 bp, Bovine  19866880753660
  misc_feature (1)..(1): n is a, c, g, or t
ntgagctggcccgccaggtccttggtgctcaccaggtccagcccctcggcagagcccacagtgggccccagctgatcggggtgtggggtctgcaggtggaagagtgctcagaggggtgcctggggagtccagggggcacggttgggggagagagtctggggccaaaagtctgtgcccagggccggaggcacgtcaggagggcaggggtgctgcaggaagtggaggcatgccccaaggaagcatgccctgacagctccccagtgctggggcccctcccacttgagagctcccaacagttttccccttgggacttcctccatcggctgaggcccactcctctctcttcctccttaggagcagccacagccaggccctgctctcctttccatgtggctctctcctagcacccacccgtaccactcccaaaacagcccttcccggggccctggcgccctgcctggccctaccagctcgtgcacttcctgtgggttgacaacaaagagccgctcgttaagccccagggatgtggccacaccacgggcatctggctgcaggccaatggcatctgcaaagagagcagagctgtgctgggtggggacagagagggaggccagggagcaaccggaggcggggtggaggctggaagaggtctcccaatagcagcactggagtctaggcaggtgttctaaatgcatgggtgcgcatgcccacacatgcacaggggcaacatggccagaggacaatgaaagaggagtcttggggagacaggctgacactgggcgacgctggagcctccctgagtcccagcttcctcctttgtcaaaagcagacaccaagatttcccgtgactactcatcagtcaaatgaagtcattgatataaatagcggctataaggatatgatacatatacaagccctttgaaaattgggaaatgccttacagaaatcttcgtgtggatttccatcagctcttgtggactgggactgggttttcagtcatgcttgagccctcagtccctagaccagtagtcttcaaagtaaggtacacaagaccattccatgcgtccaggaaaaaaatattagcacttatactgatttttcttacctgttttgtatttgctttgtgtgttgctctatgatcacatagcaacagtgtaggaatgtatgtatgtgacttgcaaggaaatatacacaaataagggagtctgtaataaaatactgattactgcatggggtgtccatcaaaacaatcagtgctctaaacactgggtttggacaactgcaacttgccacatggcca

SEQ ID NO: 34354 - DNA, 909 bp, Bovine  19866880780803
  misc_feature (1)..(1): n is a, c, g, or t
ngaggaggcctggtggggaggggattctggctgaagggcgagatagctgaggccatcaccccagcactccctggtggagaccagatcctctgagggcatgcaatggagtaaagcaggggctattttaaaggaagtcttcatatttatattactgagaacaactttggaccatctcccatcccccgccccttccaaagcccttgtcacagcctccaacctgttccagcctcagatacccgctctccctggactcaccatcttctcaaagttgatgagattctccaccaatgtgtgatttccctcatggatgaaggtcatgtctacaaagagatgggctctgctcataggtccccaaactccttcccctcccagcagccaaggaaaggtaaggggccaataacagggatgctatgcggccctcttcctccctgctaacttcctggaacagtttctttatatctcttaggcctcatgtcatcagccatctgtctgcatgtgttaactctgcttctatccggtgagctcctagttcacctttgtggccccagggcgttggcacactggaatcacccagagggtcaggtggacactctggggcagcgatggatgggatgggggcagggggggcaggggctggtgcccttacctttgagaagaaggggcatgaaggggatgaggggaggggagagcttggtgagggccagacggtacactcggtggttccatgaggggtcctgagagggaagaagccgcagtgagagagggagggtcccgcacaccatgacctaccacgtgccacagcataaccaaatgcccacccgccaaggagaagccgtgcgcacagtccttggagctcagcctcctctcggccccagatctccccaaggcaggctgtgcggcaggcagagg

SEQ ID NO: 34355 - DNA, 1400 bp, Bovine  19866880783091
  misc_feature (1)..(1): n is a, c, g, or t
ncgggaggcagtggacagcacaggccagcaggggtgacccaggaaaaggactgacatgacagaatcctgggtggttcctgcctcatctggctccctgtcagttcccccagagctaagacgggacatctgagcttcctttgagccctccactgtagaaagcactgggcagagcccggaaggcgacaggactagggtgtgaatggcacatcgcgggaaggtccccccaagagggcagggccagcaccagcactcacagaaacaccgggttcaccaggttcaccagggttgccttgaaatccttgaggtccctaaaaagtaaagcgaggacaccaggttggccccccagaacggacatcagagagcttgaaagcatctgtgtccccactttccaaaaggaaaaacccaatacttacgggagcaccagcagggcctgggggtccccgaggtcccatggggccctgcattggaacagaaaatgaggagctttactggaaaggcttcaccctcggcctccacggtgctgccgcctcccagccaacagtccagacaaaggacaaggagttactctgtgagcagggggccggcaggggctgctccctctcatttccctctccccttgcaacattctatttttatttataggtaccatttggacagagaagctggccttgctttcccctggacagcagccatgtttactaaagtctgagtttcatttagcatgtgccaagtgggagctgcggggctgagatttcctgctggaagtcttgtggatgctggagaacagtggctgctgtctgcattcttcagttctcattccaagagcaatagcaactggccttctgacagatcagcctatatgcctctctccatcctcattcttcttagtcactccagcgcatcattaaaactggcatccatcgccattaaaaaccaaatgctctgggctagctaaatgggaggttatataactgatggggaagggccgctccaagtaattatctctaaagtgaggttgtcagagtccctggctctgctgagggccacctcttgccattttggctgcaaagaactggtgccttttcttaccattggtccctgcattactcccatctgggcgccaccagccttctcatcaaatccaccagccatctgggcagcaaagttctgcaaataaacccaacaacattaaaagcttgagaggctacatgcttttcctacatggctaggtaagctatatctggatagaaaaaaactctgttgaagactaatctagcattgatcagaaacactaatgattcctaaaaaaaagttttggaaatggcttattagatgacagtggcataaccatttccctgggagatgaagtgttacttggaagagtatccattacttgcagt

SEQ ID NO: 34356 - DNA, 2591 bp, Bovine  19866880792584
  misc_feature (1)..(1): n is a, c, g, or t
naattcatgtccgttgagttcgtgatggtataaccatctcattctctgctgccgtcttcttttgcctttagtgtttcccagcgtcagggtcttttcttgtgagtctgctctccgcaacaggtggcccacagtttcagcaacagtccttccaatgaatattcagggttgatcttaattcactacttattttttgaggcataattctagtatcacttcctcaatataaagactgccccattcttggggatagttatttgattaccttttaaggagtgcatgctctggaagtgctgcccagttagaaaaagctaagccttttgaaatgcgcagtaaatttgagcaaattaacttttatggtcctcagttttgcttctcaaaatggaggtaatactattaaagggttttgtgaagtttaaatctgttaaaacctaagtgcttaatagtgagtgctgtctgtcattccgaagtactctggctaagggcaattgccactcacaggcccaagatccccctactgcagctcatacaaactcaccagccacttgtttgaccagcattgaattagtctccctactgcagtaggtttaaagaaagtctgtcttgcctgcttcactttgcctaggtgtagtttttctttggtaatgtaaatgtttaggttctgtgtttattgtttcttcttggtgacagtggtgtctccttgctgactgagtagtgtgtctcacatgttctctgttatctagataatcaccaattggactcaaaggaatagagctttgtggggtgaagggtagttagtatgtgatgtcaggatgtgaaaagggttgtattactatatctattcgagagcatcccaagtgaggtgctttcatctcaaggaagtagcatcagaaaacacagcacaggcctatgcccctttctttgctatctgttatgaaaggagcatgagaaggatgcagtttgcaaagaaagagaacagctgagaatattatgccctctcaagggacactgggtttcatgaagaagagaagctaagccaagagaggaagggttgcaagttaagaaagtcatcggcagtggtggaggtagtgtggagatttcatgtatagggaatgaagtggacccatttaccataaggaagaaggtggaatagtactgaattggaatgaaatgaaagatggttgagaaaaataggcagtagggaaaggggagttgtttaggagtatgggtaaaagggaaggaaaccggcagtctgagaagcttggtagaggtactcactattgagttggccaaaatgttcattcaggtctttccataatgtaaaaacttgaacaaactttttggccaaaccgatacttgaatctgaagagaaatattaaatagtcatgtacttaagaaaactaaaggactgaggaagaagagatttgacacctggcctctcctacttgcccttccctaacacacaggaagcgtaaacataacaacaaacgcagctgcatattccctctcctgggctagtggaggcaaacaaggtaaagttcaggctgatgatgcctcgtttttctttttcttttctctaacttctttggtgtcaactgctccctaataacctttttcttttttcttcctctactgtttctcatatagaagcagactggatgagggcagattcaggaagtgagaatgaagtgtgagaaagaaaaacagattaagttgaaagaaaatgtttactcctaaatgcctaggcagaactgaggctgggaagagcatataaaagtgctatgcaaagaaaatgaaatggaattaagtgtggttatgtgttatagatcctgttgtgagaacttagaagaaaattactcagaaaggtctccaagtctcctgaaaaaggtccaagagaacacagtgcttaaaggtacatcagatagatgagcattagacattaataggaacttccaggcctgatgctggtgccaaggaacctatgaatgctctttcctggagcctctcagcacaggaaagttatccaactctcaggactggaggaggaagctgcccctccaggcatcttcccactagacagactctgcctgggaaaggctgcttctcccaagggccctcgccatggcccccttcatttctttgtttcggaaactgtagatgacggggttgcacatgggggtgatgatggtgtagaggagggagaaaggcttgtctttgtcaggaccgtgtgtgctgcgggggttcatgtaagagaacatggccgaggtgtagaaaaagatgaccacggtcagatgggaggcacaagtagagaaggtcttgcctcgaccagaggaggagttcctgcccaggatggaggccaggatgcgggcataggagatgacgatgagcaccatggggctgagcagcaccacaatggcatcggcaaagatgactctcagactaaactgggggtctccacaggagagagcaatcactatgggggcctcacagaagaagttttctatgtggttgtctctgcagaagggattccagaatgacatatactcaagcaagatgccattattagcccaaaggaccaggcaatactcaccagg

SEQ ID NO: 34357 - DNA, 1268 bp, Bovine  19866880792585
  misc_feature (1)..(1): n is a, c, g, or t
naggagggagaaaggcttgtctttgtcaggaccgtgtgtgctgcgggggttcatgtaagagaacatggccgaggtgtagaaaaagatgaccacggtcagatgggaggcacaagtagagaaggtcttgcctcgaccagaggaggagttcctgcccaggatggaggccaggatgccgggcataggagatgacgatgagcaccatggggctgagcagcaccacaatggcatcggcaaagatgactctcagactaaactgggggtctccacaggagagagcaatcactatgggggcctcacagaagaagttttctatgtggttgtctctgcagaagggattccagaatgacatatactcaagcaagatgccattgattagcccaaaggaccaggcaatactcaccaggctcacgcagacctgctggcttatgatctgggcatagctaagtgggtggcagatggcaacataacggtcataggccatgaaagccaagaggatgcactcagccacacccacacagaagaccaagtacatctgggtcatgcaagagacaaaggagacaacatggttcttcactgtcaggtggaccagcatctgtgggatggtggtggtgatgaagcagacatccaggaaggacaggtggccaaggaagaagtacatggggctgttgagcctggggtctgtccaggtgatgaagatgatgaggccattcatggtcatggcaaggctgtagagggctaggaagagggcaaagagcaatgcccgagtggatggggagctctgctcaaagcccacgaggataaactcagtcacggtgctgccattccttaggtccgctggcgtggatccacttgaggacaaaggacaggaaaagtacaagagagacagctgtagagtaatgcagggtactcacttgattacagaaacccacctaatattagtggatgtaatataaaagataaatgagtggtggtaaatgttttgtaacttaagtaaacattatgtaattggcaatggtatagggcagtgaaaatgccagggtcaccataggtgcctccatggaatcataatatcaaaaattaaggcagggtggttatactttattttaatttactcaggcttaagtcaagtatctgtttccagtctgggaccgggaagggttagtctttaatcaaattggggagaaaaaacaagatagttttctagaacccatgccaaacagaggagtggagtacttcagaggagggggtggtagctgtagttcatagat

SEQ ID NO: 34358 - DNA, 1596 bp, Bovine  19866880825722
  misc_feature (1)..(1): n is a, c, g, or t
ngcctgtgtggtaggggaagctgtaggagaggtggcgagctgaacacgcaggcttcatgagccgtggcaggcagagataaattggctggtgacaggctgatgggaaatggggcacaggtgtacaaggaagcgaaacttttttctggggttcagaagagcatctggtacaaacactatatataaaatgaacaaggtactactacctagcacagggcatttaatatcttgtcataaattacaatggaaaagagtttgaaaaataaaaaataaaaagagcatctggaacacaagttcattaaggaatgtgactcccattcccacttccttttttaactttttgcagtgcccaagaccaatcccagcacctgctggcagaggctgactgaccactgtcaggcccaggtccccactgtgacggagtcttctccctatgtagacccaggtaatcatcagctatctttaaccacactggggaatcagaaaacaagagtggcttgaaggtttttcttttctcactccagtcatttttatatggctgaaaaattttaaccatgtcggaaaactgttagaactcaagaatgccctgaagatgacaagggactcttttaactcaacgcagataaaactatttcttggtgggaggtggcagagagggagggaacttatgtatacctatggctgattcatgttgatgaatggcagaaacccacactacattgtaaagcaattatccttcagttaaaaataaattaaaacaaaactaaaaagaaaaaactgtttccccaggatagtggaagactttgtagatgttggtggattcttgttttattctttggagcgtgagtttaacaggtagagtagtggaagcacttcctgcaggttgggttgtgaggagaaagaggtgtgggaggggggcagtgagacaagggacactgttggcagggtgggttggaaagtcccaactggtgtgcttggctcaggagggctctcttgccaactgcacagacaggtctggttttaaaaagtgccagggagccacagatttgcatgttatttgtgtttcaggcttcaattccaggtacgtggaatgaaatgaatgaatgaacagtattcagactcctggttaaggggtggactcgggaatccagaccacactgaggatccaatcactggtccaacttggatcaggagacacacagacacagacagagacagaacaaacagtcaaagagacagagagacagtcagagagacaaacaccatcgagttctttttaccagggagtttccagtcaaagcaagaaaacgaaatctacagaacttattttcaataaatcagcccataaaaacttgggacagagtcacacatggatagtcagattaaggcaacatcatctttgacctctctccacatctgccctccatcatctacacccagcttcaaactggaccatatgcctgtgtctgccttcttgataatgtccactgcttggtacctgcctggttttctaaattaggttctaaggttcttgaggatgggtggcttttatttcctggtcaaaccatctctttactccacgcttcagggccccccaag

SEQ ID NO: 34359 - DNA, 1543 bp, Bovine  19866880858153
  misc_feature (1)..(1): n is a, c, g, or t
ngggccctggacgagcaggcctcgcacatcccaggtgctctcggacgacgtgtgcgccaaccagcgagccatcgtctccatgtgccagattatgaccaccgcgccccgccagggtggcctgggcgtggtcggcaacaaggggaacttcccgggcgcccgccgagatccggagaccccttcgcctgggatcggggacagcgatttgctgggtcgcgatccagaggacgaggaggacgacgatgaagaagaaaaggagatgcccagctccgccacacccactagtcactgtgagctcccggagagcccctgtgctggcctcctagggggggacgggccacttgtggagcccctcgatctgcccgacattaccctactgcagctggaaggcgaggcctctctgtgaggggactccgagggggcactactttcccgggctgactttgggtttccgagtaaataaggggactgaacggcgcgatgcagcgtgcttcactccgaccgctgctcttgtgggtcaggcagaagagacttccttgaggaagcatttatagggtgaaggactttgggagcatcaagaattctttctgcctcaccaagcaagaagtagcaaactgcagaaaggtgaggttccgggagaggaagcgcccacctctggactcccatccaatcccctaccctgccctttcccccgccccagccaacaggagaacccctgacttgtgtaaataaaattctgctttttctattctgaaaaaggacttatctaggactatggcaaataatctctaacgatttacctagaaattaaggaattgggggtattctgttctggcaacagaaaatttacccttctgatgaaatccaagctattcagcgttctgcagaagcctctccccctcacagacctctgcggctgctgattggtaaaagaagcttgaggagggaactgcagccctaggaatctgggtgaatggggttccgagggcccctgggctgggaggagctggctctgaatgtgcatgaagacattatagctcaacctctaggattttgcatgcagagcggatcctgccttgtcactgacttcatctgggattgctttatccactcactggggcttagagaacaaagagcccagttcacaggcagagacttgaggtgggggggggattgctcagcaacagcccagatttagggggcatttgagggactcttgggggccgcagccgaaaactctctcctggctatacctgcttaacttcagttccttttcctgtcaatacttccctgcccgctgactctcggtgttgcctccataatgtcttgtgtgcattatgtgtgttgacctgtgtagtagtgtgtgagccctgaggggcagggcttgtggctctggtgttaggttcagggggcttcagaccttctatgagccccaggctctcatgacgctttcccctctcctctcctcttttcccccacaaccagggcatgaagcatgtggctgtcctggggatcctaaatgatatgcctccctcccacctcctca

SEQ ID NO: 34360 - DNA, 955 bp, Bovine  19866880862610
  misc_feature (1)..(1): n is a, c, g, or t
natttcaacattcctctcatccttggagactcacttctcctaggaaaccttcccccagcttgctctatggcttccagaatatctgttctttctggttttgtttgtttattttttaagaggaggataccatgcttgtagcttttttcacagtctttttttcttatttcccttgaagatgaaaatacagtgtcttaattctctctgtatcctcattttatacagaaatgagtgtttagtatgagacttaaactgaatttggatggtgctgggacaggacagaagagacagggttggattctcaacactgtttgcactgggactacatagtaacacatttatgctcatgaaatggaatgtacaccataaatctagaaaccctattctggacagtcctgatcctgttactctgccccaaaaatgccaaaggaaaacataaacacatcttgaaaggatgtctgaactgagtcaaccaacagaagcaggctggccccactctgcctccaccgtagctgtctgaatgaagtgtgtgcgttcaccacctgccatatttggggcaggtttacctctttggaatgtgaatccttccacactctatcactatttttaaatgggatttgtgtagagggagagaaagaggtcttttctttacagtttacctataaatatctttcccaataaggaaggctatgtccactataggtctaaatttaatattgccataaaagagagaaaaacagtgaaatggttattttgtctacacaacacaaaatgaggggttgaatccacctgcctcactgaatggatgtaatttggggcagatacactgatggtgtctgtttaatttctaactgttctaatattaggcctgccctactcaaagatgtaagtggacaatgattgccacgtgggaccttcattctagccatccatgcccttcttccactaagggaggaaa

SEQ ID NO: 34361 - DNA, 1264 bp, Bovine  19866880866407
  misc_feature (1)..(1): n is a, c, g, or t
ncgccgtgactcaagattctgcatgtcacaactgaaaaagatcctgtgcgctgcaactaagacctgatgcagccaaataaataaacaaatatttttaaaatgctgaataagtgagtgtattgatgaataaatgagataatgaaggtgttatctggtgccgtggccatggggaaagaaaggaaagaaaatgtgaaactttttagacaaggttaaatgcccgatcttttttgaggcctttccttatctctctagtaagagattgagtatagtgccccatggctgaacatcctctgattttttttgtgcctcatttgtggtacgtaatgtgctctcttaaagtgattgaatgactactctttcctgtcagattttcatctatcttaaggcaaagactatattttattcatctatctcccacaatattcagcaccttacttggtgaatagtagactgaatatatgtttagaatggaaggatagggaatcatctgaacatttgcatcttcaatgatgaggagaaggtttctccataaattaggtaactgaataatttccctgtgactcatcatctttgggaaggaggttttccaatctcattacaaaagttctttgtctagggcatgagcttgccatacttcactttctgaagtagaccaaagaaagatacaaataatggattaacatttttctagtattagtaatctcaagtaaaagtttgctatttccccaatgaattataatacagagcatttcccagcatatcccagtaaggtcaacggaaattacttggaacttgcaaacttttctcctggggggcggggtagtcgggggacagaaatccggtaataatgttgaacatactaaggaggcacttggttcccagccagtctgttccctggccaagcccctcatcccctcttctttagtgtgtgtgggaataggcttaaggggaagagaaagtagaatcaatgagaccctcagggcctcattagcattttttacttagagccccagaggttccaagtgtggacatcccaacaggcagctttacttcagatcaattaaggccagattcatttagaatgaatctaaatgaatctcaggaggttagttagtaagatacctctagggactccctgagtgacatgcctaaagaggatcaggagcagctgggatttattaagggagtgatcaaggggcacgtgtccaggagaggtccctgcagatcttgttccaaacatccgagtagcctggcaactccaggg

SEQ ID NO: 34362 - DNA, 1977 bp, Bovine  19866880906385
  misc_feature (1)..(1): n is a, c, g, or t
nctctcggaagcggtccggagaagctaacgtctaggcctctttgcaaagagaagaatggattgtctgctatggtcagctcaccccaacagatccaagtccgtgtattctcacgtgtttcagtgcattttccattaggtttccttttattctgtaactgcagccatggtcagctctagccagggagctggggcaggggccgtaagtggaagctccctgtatgtagaatttctcctgacttctaccccagcttcctgtgtcacacaaggctggactcctctagtaccactgctcgatttcagttactcggttagaattttcctaaaaataagctttatttatttgtgataatagagtcatggttcctctactactattacgacagtgacacaccataactacactaataaatgccaactggtcactgtgctttggcttctcctcttaccatcttcacaagtgcattcttgtcagccccaagcaatggactctgcccagatggacacccgggaaaaggcagcccatgtgctaactccgtgtacttcgattcttgggttctcttgactctgtacgcagggtcccagaacacaggacaccatcctcaccctcatcccacaagcagtccctccctcatcctctgtagccaaggacactcccatcttccctaagcataaagttatgttctacctcttggtcatacacccattacccagctttgctttttttccagccattccctaatctctactccgacaacccagggttcttccttctcaacttttccccctgtgctcctttctggatgaaagccagactccatctcggtggggtgacatgcctggaaaacagagacattcaattctggacctagtttggtgggttggttgaaatgctgctttggaaaaccatgagttcttggtcagctcagtttgttttctgttcccacacttcctcattagcaagcacccatgtaatacagctgtaattgcatctgcatactgtgccctgaactgatgggatgctgccctgtcaatgagaggcttgagattagagtccaagaatcagatcctggctcttggcacaagcatacatatctctcccactaacacagcttcctcacttgcttgctgaagcaggaaggaggtttggggttttccaaggaacagaggaaaggactgtctgctactgctgctgctaagtcgctttagtcgtgtccgactctatgcgaccccatagacggcagcccaccaggctcccctgtccctgggattctccaggcaagaacactggagtgggtaaaggactgtctagtacttcagttttgctggctatccaaagtatataactgctaccccctagaaacagttctaaaaaatgaccgagaagtcttgtcagagtccaacattaattaaagcagccaaatgttctctgtacagttctttaaggggaagagaaattaataaatatcaagcaccattatcactgattcttcaaaacagcctatgcaggtggtgtgacagcctcagagatgacactgggactcgggacaatgatgtaacgaaaagtaggaacagtcgaaatttccaaacttgcttttagacctttttatttccttttttttccgtacatgagcaaaaaacaccaataacaaaaggacaaaagcagacatactttttcaaattagctgtgtcagcagattctgttcatttttatttatagttcccaatcagttaaaaaaaaaaaagtctttcacatttgcataaggtcatctagaatcaacaacttgatctagcttaggaacatgaagagtacctagactaagtattgttcacaaaaaaagatctcttttgggaaggtgggtcatctcagaggaagctcttaagagtgctcttcccccactccctaactccacctacaccaccaatgtctttttgtgtagatcagtaaaaagcaaagtttccaaaacaactgaaaacaaa

SEQ ID NO: 34363 - DNA, 1536 bp, Bovine  19866880928513
  misc_feature (1)..(1): n is a, c, g, or t
nctcctactatatggacagcagcaagataatctttctaaaataacattgctgaactactgtaagccttgggcacactcatggaaaaggagcaaaaactgcccttccctttagtggtaagaaggggccagtcccttttgaatgcccagggataattctagggacatctgggcccagttctgaacctgtgcaccatctgaggcggtagtatcttcatctttgggctgcagctgttagctggaattttcttaaacttcttcacagatcaattaaaatgtttctagagggattcttccgaaagttaatcatgttcccaaaggcaaaccaaacgcacatgctaaaagtactcttcatctgcccagagaaattcagcctcactgttgatttctttccctaatgagggttggggagacctcttcctttgcagggtgcaatataaaaggcccagtaagcaagaaacagaaacaaaagtgagggacatttttttgtttgtttgcttggtttggggaggggaggtgatgtgaaggttactgttgtgacatgttgccttgaaatataaaccacacaacaggaacaactgcttttcctgttttccaagacagacggtgctacagggcaaaaccttacgcagagttgccggcctgacgtctcctccaggctattctatgagtaacaggtattccttcagagaagctggcagaggcaggcccttgacggcatctggcagatactggagtcccaggctccggcgcacagcatagcgagaaagtgtttttagagtccctggggctgagcatagaacagtcagcttttcacacagctgctggtctttggccacttctcgtggcatggtgccatttttccttaattcaaagtgtccaacagctctgtggaggagctcaaagcaagagtcctctttctctgtcccaagtcccctgactagcagagccaccaggcgggagatgggcgtctggccttttaagttgatgactctgacctctgcaccataatcaagaaggatgctgacgctctcaagatttcccttcatggcagcccagctaagcggggtgtcattgttgtaatccagggcgttgacagaggccccgctctctaggagggcccgcacacactcagcattgttcttaaaggctgcccagtgaagtggggtgtctcggttaccatccagtgcattggggtttgcaccatactccaacaggacctccacacaagcctcatctttctcagctgcatagtggagggctgttcggttgtaaccatccagggcattcacctgtgaagagggagtgactatattacagtgtatggacgatgggcgggcaaagaggcttgcatgtgcctagccactgtctttgctatgtaattttctgaacatgcaggtcaacaagcaattcccagggagttgtgctcaggatggagctgaggggcaagtaggaaaacaatagtccccagacaaccaacactctttattatgtccactggttaactggcctgtatcatctaggattttgctgccacat

SEQ ID NO: 34364 - DNA, 1034 bp, Bovine  19866880943612
  misc_feature (1)..(1): n is a, c, g, or t
ngcttaataggtttaacaggaatgtgactaggacaggccttaaataatggagtaggatattgatctgtggaaagagccaggatagccttccacacaagtgatgcaatgtgcacaggcacagaagtggggaggaacaaagtgatgtttagatgttaatggagcagaaaatttgcaggagccaaggttggagctccaggcaagagttaggtcatggaagctttgaatgcaacccaagaagtttgggtttatctgtcagtactgattatatgcagcatatttgtgaacctgtgtttgttaacaacactacgtatgtttgtgtatgttttcttcatgagtgtctcattgcatgtattttcttggcttgtgtatggatttatatgtggatgtgacctgtgtatttatcagcagctaccctgattgtcccagggttcacatctgaaacatgagctgtacttaaaggtcatcagcttctgatcgtgtgaatgaatcctctctccactgaggcctcagaggcctatgaccttcccttggaggtttatttggtgtctgaaatagagtggagaagggaagcacaagcagagggagaccagctattgaagaaaacaattcagatggaaagaggccatgaggacagaaaaggaggataaaggaagataataagaaggagaataatagggtttggtaactgttttgattcttgagattaaagaggagataaattttaaaaataacagcggttggttagcctggataactgggaaagtgatgattcagttggcatttttatggatgcgaaagtatgtcttgtattttcctttgagagagataagtcctaaagacaaaaatatgaaggtgttcacatgttatgtgtacatattcatgtctctgtggcagtgattttgtgttactcttcacatttggtagtgtttagtgtgaggggcaaggcctgaagataaaggatcaagagatgcataggaggcagagaccctgagagggatgggaaaagccagagaaagtccctcaccattccgaag

SEQ ID NO: 34365 - DNA, 1042 bp, Bovine  19866880964082
  misc_feature (1)..(1): n is a, c, g, or t
ngggctccctagccggtcccatgggttttatttaaatggttcattgaaagctgcacgcagagaagcctggagcccagcctcagggtctgcccagggggagagtggctgtctcgatgcctcctgtgccctcctgcccctgccactcaggccaagctagaatgagagccgtgagaggaggacggggacctctagaatcaccattccaggcacagagcgggcaggacagagcagagccactgccctcacccacaaggacctgatgatccaccagtgccctccagtgtggagctccggtgactcgggaacccagcatcttttgcagcactggtgctgtagtccctcatctgacagttttctccatttcaggttcttttctttggccgtatcctgctcctggagatgatgaattcaccaaggataaggactgtggctccctttgcctctgggcccaagaacctgagccagaggagatgctcaaaaaataagaaatcatacttattgaaaaagaatagtagtggtggtcacatgtgggcagatacttcaaggtcgtagcaaggacactcccactcaccccagtgtgtagttaccctcagcccctttcacccgtaccttatgttgaagctcttctactgcacacaggagcctagttcaaacccaccctaaagacattcctggggaagagaggtgagtgttcttaggccaagacctcctcaaggtctttgctggagattccagggtcagaggtaagtgcctctcaagagggaccattaggataggtaacaaggtggaatcctgccctccagtcgatagagtcacgggggctagagagggccctgctgggccatgtagcaaagccgaactcccaagcccaccagtgggtggactgcagcatccctgcaggggccactggagcgagtaattgtgagctggccgcagagaggtattttgcaactcagacgaatttcttctcgcccatgattagggtatggcccagtggctgcctccctgaccataatctctgctggcacaggcatctccgggg

SEQ ID NO: 34366 - DNA, 1478 bp, Bovine  19866880982189
  misc_feature (1)..(1): n is a, c, g, or t
nttggattttgcacaatagcaattcttttcctcactcatatttccttggtttacgtagttataaacagaagcacaactggccaaactagtttgtggacaaacacatctacctcttggtgaacctgaaccgtgggggcagaaaaggccttgagtcctgcctcctggacataagcatttgctctgccatcacacagaatgttcaactgggagcaagcaatcagttcatccagctttgaaggtttctaatataaagctgaaactccagtactttggccacctcatgcgaagagttgactcactggaaaagactctgatgctgggagggattgggggcaggaggagaaggggacgacacaggatgagatggctggatgtcatcactgactcgatggacgtgagtctgggtgaactcctggagttgggatggacagggaggcctggcgtgctgtgattcatggggtcgcaaagagtcggacacgactgagcaactgaactgaactgaatacactgtaaatacaggaaaaaaattgtgtccaggagaatccttttgctacaagtaacagaaatccagactccagctgtttttgtttttgtttaataagatgggtttcaaggctgggggattcagagatttcgtggcgtcaagggggccccacattattgccacttccctggactgctactcacaggacgggcttcatcttgcaactctggccaggagctagggcttcaggtgccctgtctcttgctaagtgggagtgaggaacaatgggcatccatcctggaatcaggtccttcccctccatcttattggcccaacttgggccccatgcccaccctgggacttcttaataacaccatcagaggactggcctgtgctgcttggtctgaacgtcagcatccgctgctggagcagtggctgtgttcagcttcccattcccatgaatcacagcagctgagtaagcacccgaacaaaactggattctaggaaggaagagaaaagcgaaatagatgttgggagaggtgtagccgctcctacaggaggcttccctacttcacagtgtggcctcgggctggctctgtttcctgaggcgccacaaacgtacctccctgaggcatctttgcccctggtcagaagtcctcccatggcatcgtccacagttagcgattctgagcagctaaaagtgacaagatgaaagcacagaaactggcctcactggaactcatgtccgaacacctggatggctctcccagtgcccgccacctgcccacgcgccccttggtggttcaccatcccctcaacaggaagctgttcgaggcttctcaccccttgaacgccaacacctgcttcctcctctcctcatatcctgctgacaccattttctcagactgtgcaaacagcagctgccagactgctccttgctcaactgtaccctctgcctctggccagggtgctgcctggcttgtcgtcgcagtag

SEQ ID NO: 34367 - DNA, 1652 bp, Bovine  19866881051247
  misc_feature (1)..(1): n is a, c, g, or t
nctctgtacactccaagtactttacatataataattcatttaataacaacaacccactgaggtttagtaataatattaatcttactttacagctaaaaagactgaatatatacagggaatttaaaagaccttgtcacaggacttgaacctagataatctggtttcagagcacacactcctaaccactatgctatactgcctcctgatagggatatggccaaaaacaacttgaacacccactaaattacactgtagaaatcttgggggccacatgattttctacaaatcctgcctacctgaaggaaccaacagctaacctaaagagtaccttttcttttagagcaagagccttttgtgaatctacatgaatcccatcttcttctgactcggattcttgagacacagaatcatgggtactctcttctttgtcaagttcatcaagaatactatcctgaaatcaaaagtaggggaacagtgtcataattacatgaccattaaaaaaaaagatatcctgcccccccaaaaaagaacattcaacagaacttaagtttttacaacctaaggacttaaaggcctataaaaataatccaaataacctctcattattaggagttaattcagagaaaaggatattcttatttagaaaaccaagatccaaaccacttacataatctgactttgaactcatataaggtaaactaagtctacaaaccaaccctaaatcacaaactgttagcagtgaactattattgttttacataaaagaagtttgcaattaacccaagtctatgtaactgcatccaaaagcagggaaagggttttatctaaaacccttttttctttctgacttttaaaacaacaaaaactgcttgcagagtacaattaactcctgattctcatagcaacctaggagggtagatataattatccatgtttttcacttgaagaaactgagaaataaaagttagcaaactcactcaaggtcactcagctaggaagtggccagatgaggatctgaacccaagccatctgcctcctccaaggagctctcaatcactatgttatactgtttatcaatgtactctgaaatatagctgactatcaaagaaaatacacaacatgctcgtccagcaatttccaatctcttttgactgagacattcctttcatggtaataaatcatttcacggattgcatcagtatttttttaaactattttttttagtatgcatgcatgcaggctcagttgctttagttgtgtccaactctttgcaacctcatagattgcagcccacctggcctctcggttgacggggattctccaggcaagaatactggagtgtgttgccatgccctcctccaggggatcttcctgacccagagacagaacccatgtctcatgtttcctgcactggcaggcaggttctttaccactagcgtcaccatatataataaaagaatgatttttagtaagattttttttttgccatgccatgtggcttgcagaaactcagttccccagcaggaattgaacctgggccacagcagtggaagctcagaatcccagtccaccagggaatgcctgagtaagaagttttaaaccagtaagaattaaagagttcattaaagctcatataaacaaaaactttatat

SEQ ID NO: 34368 - DNA, 1185 bp, Bovine  19866881077254
  misc_feature (1)..(1): n is a, c, g, or t
naggataagaaagatcaagagactgagaatactcacattgttgtggattttgtctgtcacatagactaaattttctcagcatgagagagtcgtttgcctggtgttacagccaacgtgctttcctcatctcctccacacttgtacagaggaaatgggcatgatcatttgcaagaatcctaaaccatatgagcctctgactgaagggagaggggtccaactgtgatgtccctactgtcacagacatcgtcatgaggtgacatacacagatacacacagtcacactaaaggcctgagctagactttcagttgcttgctttgtgccttcaacctaattttaggaatcccaaaagtcacccctccccatttctttctcacccatattaactttactcagagcaaaaattccaggggaactttctaaattctcacacagtttgcagtaccactgaaaataacttgtcatttcagttaaaccctgcttggctggttttcttcattgtccactgcaacagcttctcttgtatcaacacttgcaaaggctttttcacctttcggtgcatgtttagttatttatcctgtaccaggctagacctgactagttctagtccaggtttcaccaggcaattggccatagatacagacattccaagatgacctctggtgcagggtctcatgtaccctcttcatgcatcctctccatgtatcttctacccccagaaagttgcccatagcttagggcctggtttgtccccaagtcagtatccttatcaggcatgaatagcgttgcatcacctgagaacacccacagtttctggtaccatggtgcaatttttcttggcaaattgcctctcccagaatatcagtcaaatttagaggaacttatgtccaagtgtttggacagggtatggactatggtatgtctacttctgacttcttttccatttaaagaattcttagaaattgacttatgcaaacttccagttcccttctcacctgtcatatctttctacctctgacttctcttccatttaaagaattcttagaaattgacttatgcaaacttccagttcccttctcacctgtcatatctttctacctctgacttctcttccatttaaagaattcttataaattgacttatgcaaacttccaggtcccttcttacctctcatatcttgagaaagt

SEQ ID NO: 34369 - DNA, 1572 bp, Bovine  19866881101456
  misc_feature (1)..(1): n is a, c, g, or t
ngaattttatgctaaagactgaggtccttcttcttcttggtcgaagtaggtagcagtaaaagtggcgcctttgttactccactaaaccactccctgggtgggtcttccccatatcatgtgttgtgagcacatgcaaaccactgcttttaaggaaaggactgcctgggactttggggtccacccagggctcacatgtggtgcctcaggaggggaagaagctacagataaaacagccttgtacagaagcagatggacttcacaaggggcatgtaaaaaggacaagtcctggaggacagccttatgcaggtgccccaaagtccagtttacagtctactatcctggtgacacattttgaaaatcctgtgtgtatgtacgtgtgcgtgtatatgctggtggttttcatccctacgtttttacccacatccattcctacctcttagtaaggcctaacaacaagagtttatacgaaaccaagagtccttccaagcttctctcaggcccctaattaagagactgagtgaggctggagccctttgaaaacaagatggcagaactgaagaagtaaaaagcagtctctctcttcagattagggatgtccctcacccctttcacagcaccaaagtttctttgcaaaaatagtatctgagatacaaaaggaaaggcagatgtgcttgtgagtgcatctctccagggcctggtccaggatcaaggactttacaagaagagagggttgggagcagctgtctccaaggtctctggctgtagacaacaaagagctggtccccaacaagtccatgtctgctaactgagatggtcttcacaagagctttcggtggaggatttcccagaccatccgcttccggaagtagggcatgtgttgctgtagggacacagagatacctttattttcatttcttgcatgcagacctaacactcctttccttcttgaggttttcacctaaaatagtctcagctgcatttttggtctttcaaattgctcattcttcattacgtgtgattttttttttcctaatgctttttccgattactattgctattgctacttttcattgttgtaaacctaggagtttaattaggcatcaccaggaatccccaggctatcctcaaatgtctccaagaattttaagaatggtgtctaaaaaagtcctctgtgttgaacttttaagaggatatgagatctgaggcttgaagatcaaaactcattttgcccccaaattaaatgaacttcaagagtcagctcaacccaagggctgcggtggaaaatctagtataaagtcattactttaaacagaagcaaagggttaagtggaggacaccaaataaactataatctctagcctcaattcactttggtttccaaaggaccacgtggacagaaattaacaatcacaaactctaaggaagactgatcagctgcataaagcgaggggaagagggcagcataacaaactacactagatcaaggtgtggcctgttccaaaacttcattgctaccaaaaaaagggaaactgaggaaacctgctctggtcccagttttctgcttcttacagg

SEQ ID NO: 34370 - DNA, 1849 bp, Bovine  19866881159744
  misc_feature (1)..(1): n is a, c, g, or t
ngtttatattccccattttacagctaacgaaataggcccagaacgactgctacttgttcaaatctccaggtagtagcagcagagccaaaacaaacccagatctgttgaagtcgaaagcccagctcttaaccatgatactacactgctgtttttaataacaaccataggaatttggcagaaaataacaaaattctgtaaagcaattatacttcaattaaaataaataaaattaaaaattatagccatagggatcttttcacatcttccagggggtccctaagtggttcctcccctccattcccaaccttcaccacccctgcttccatcactaccacctccgccttccttccaagcactcacaagggagacacccctggatttctttgaattatatttatgctaaatttcacaaaggctccctgggcttctcaacccaccagccaataaatcaagccaagacaacgagctcaggtgagcatataaaaggcctccaaagtaatatatatgctcatcgcacagctgtctctctctctcatagctcacctcctttatgagtgtctcctaatcccttacattccttcccagtagaacaacttgtctgtctcttatgccccagagaggttttactcaaacaactatactttattatgagtatttattttcatatctgcttctccaccagattgcgaggtagaagctgtatcttattcatctctgagtctctggtatttagcatttttcagtacttattggtgagtacttactaagttcttgatcagtgaatgaatgaatgaattctctaccctacactttaagatactttccctacccagccaaatgatgcataaaattgtaataccaggtattataatatgagcttttggcataagaacttgtgccttactagaggattaaagccctttggtcgcttaagcctcagtgaaaatgatatccttagggggaggtatatagggacgttaggagagatgattgcatggggtgcctaataaggggcgaaggaagggaaagatacagaaagatagatcaaaagaccagaggagccttttgtctttaacagcttttctgaggagcagcactggttgccatagcaacagcagcaatttgtggtagttccttccagcgtcctacctgcctgtgaggaggacctgaaagctacaacctcttatcccagcaggacattctcctggcatctcttgagagtgggagccagcataggactcagggagatggcagcctgggctgaactagcttgaagaaaagaagctgagaggggcgggcaggaccatactgctgccaggaggtgaaggctaacgcgtgggcgcaagtgacacaggaataaaggagtaagctgccacagtcggcaaataaccgcagctggggcaacagttttcagagttgattacctagcgatcctcttacttaattgattttatacaacctcctgactgcgaaattgggggcctcaaacaataaaggcaattttcaaaggacagctgcttgctcaaatggacaccccacacagagttgtttcttggagttctgatgacttattctcctcaactaagccagaaaatatttttataaacaagaaatgggaagaatgccagatctatgaagagaagattgtgcatgaagggtgttgctacagtatgtaattagtagtcttcctaatcaaatcagcagctttgttgtaagatttgcccatttctgcagtagaaatgatttggaaatactaacaaaacagaatagtctttctaggttcttctttattctcagtctaagccttgagcataacttcagatcaacggtatttttttgcaaattatga

SEQ ID NO: 34371 - DNA, 1115 bp, Bovine  19866881166517
  misc_feature (1)..(1): n is a, c, g, or t
ntctgtggccggagagggtgggttctatgaggtggattaattgatttggattgaatttttatacaaaagaatcaagactataaataaatatatacctcagcattgctagagaaacattttccttccattagattgaattctaaaggaccatataaaccaaggaaaagatcaaaactcgttcctcagtggggacagtaggaagaaggaccctgggtattgaaggcagaggtcttgcttctctggagctgacagagtgggcatgaattgtgggagttctaaagattccttgtccagcaatatatactgttttccttagacatggcagaagaaaattcttcctgaggattgtcagccccatttttgcagtggcagctccccaagctcatctcattctctcccaataccttaggcaatatctgaagcaagaaagcattgacaagaaaagaaaagagtttgacgccaatggctggcagctcttcagcaagaaaagccaggtacatttcatcttggtgagatggaaatcctgagattagagtattggttagaaaaggagtatactgcttgggccctggcatccttctaagtgtctggcctgacctcagccagggaagatagagtagagtaagctatctgtgggaaaatcaataatacattttttatgaagaactaggttttctaaatgcccagctattttgctaaactttcatctatgggagaaaatgtttgcagactggttggcccttgtgggagggaccagcttttacacccttgggtatcatagaaatctcagatagtctcctgtgtgataaacatgaagtacacaggctggactgagatgctgaatttttttgctctctgagcctatgttgttctgagtgggggaccaggaccatctctttagaattcagggaaacctggaaaatttatatcctttggttcttatttataattgaataagaaggaaggaagcttggaaagatgtcacctttttgttattttttgccttttaggaaattccacagcagatgaatggaagcgactgtggcatgtttgcctgcaaatatgctgactgtattaccaaagacagaccaatcaacttcacacaggtacgccaa

SEQ ID NO: 34372 - DNA, 4651 bp, Bovine  19866881240915
  misc_feature (1)..(1): n is a, c, g, or t
nttctgtgggttattgtgagtaaaaagtatttaatgctagatattttactcatttttctgccagggctgttggattgggcccaaactgtgaccattagctttgattacatggctaatgagataggaagagacgaataatgaaagaatgtaggtctggaattctatgtcagtgtgcatctgacttgtatgcttttacagggcaataaatacttcaaacaaggaaaatacgatgaagcaattgagtgctacaccaaaggcatggatgctgatccatataatccggtgttgccaacaaacagagcatcagcttacttcagactgaaaaagtaaggcgtttccataatgtgtgtgaatattttatgtgcatatggagactggttttttttttttttaatctttcttaatgaaatgtgtgggaatgcttgagaaaattttctatttcttttcaactataaattcttattcactcccttttagtgaattctttaacttaagccattttaaacattcaggtgctcaaaccatgctccttgtagttcactttattgaggtgttcctcctataaaaattgagtaagatgccctttccctaatttacagaagaaaaaaagttaggtgggtaaaaattctttataaattaattttccttcattattttgaaaaattatgtatttactatttaatacagataacttttattatggtaagcttaaaatgtattccaacatttaagtcatactaatccttaaaatacatacttagtgttgaagaacataaatgtatatggtgttaatcctaagcagagaaatgacctagcataaaaatatttaaaaaaccaaatactgtcaaggaggatgttcttactgttttaattactatttggaaatataaattatattggtgtctgaatttttactacttttaataacattttaaaatctttgaaacttacgttattaatatcctgaaaaattaggggatatttaccttttataatatttgatagctacagtatgtgtaaatgatgaagaataattttaaataaatctgcatgaagatgcttccaagcttaagaatcagacattatttttcaaagctacctttgatattcttttccatatcctgacccttgtccctcccagctaactactgtcttgagttgtatatcattcttttgattaaaaaaaatttattatatatgtgtatatctctaatacattgtataacattgctttatttttgagctttaaaagtatatcattggatatggttttctgtggcttgcctatttatttgaatactatatttcatatttcaattcatctcataacatttgttcatgttttgcatatatcaatagctgtagatctctcattttcactgttgaatgcatatgcagttccttgttaggaatataccatcatgtatccattctctaattgctggattgctggttggttcctttattcctcaccttccttgtcttctttcttttcctgccttccaccctccttcccttaattatttaacaacagtgatactgtgagcacttctgtacatgtttcttggtgctagatcttaggatgtgcacatgttcaacttttaatgatggtgaccagttgttacaatgatagttgtacatgcttacattcccattagcagtgtataagaatacacgttacatatccttaccaacgctggtataatggggtttctgaattgttttcaatctaggggtgtaaagtggtaattcattgtggccttaatttgcatttccccagtttctcatgtggttgaacatcttcttatgtgtttattcaccacttatcttttttattttcctgtgatatgtttgttttgtctttggtccttttttttgttaggctgttttttctgttgatttttaagcattctttttttggggatactaattctttagtgtttataatatttatcttctctcagtttgtagctgatctttttttaaatgaagaaacagaaattcttattttaatgtgtttcatttattaatttttataaaatgttggcactttgaaaagtatgatttgtgaaaatagtccccttctttgagttcgtaacaatctcctctattttctcctaaaagttatgttttacttttcacgcttaagtctctttgtgtatgctgaaggtacaagtccagtttcatatcctgattgtttcagccctatttattgaatatccttgctttccacatggatctgcaattctaccattgtcatatgtcaagtttgcatggatctgtttctcatttctttcttctcttcattgatctgttgccctttactaatagccattccatactatttttaatttttatagcattatagtaaatcttggtatttggtatagggccttattattctttaggaatgttgggtattcttggacttttaccaatcagtataaattttagaatcatcctgtccgattccttgaaaaattttgattacaattgcattggacttacagatcagtttggagagaattatattgttgtatttttgtgtcttttagatgaatgaaattgctgtagttttctttcatgtctttgaagacaacctcataattttctgcatctggatcttgtacatcttttgttagatttattagtttatttttgttgttgatatttagtagagtagccactttgcttaactttctttatttttaacagtctgtctagcttgttttgaattttcttggtagaccattatatcatctgagaatgtcagttttattccttcctttccagtctttttagttctgtttctttcttatggaacttcattggtcaggacctctagtagagtactgagtaaaagcagtggtagtgggcattcttttctttgctttaaagaaactgcttacatcagaaattactgattttactagcttaactaaaagaagatggtagcacagggaactctgcatagtactctgtaatggcctctgtgggaaaagaatctaaaaaagagtggagataaataggtatacacacacacgtatacatatatgtatagctgattcactttgttgtatgcctaagactaacacaatactataaatctactacaataaaaattaaaaagaaaatagaaaaaaaaaagaaacatgccttcaaatgagaaataaatccccttttcagagatttcagaaacaaattttttgaagtttttaacagatgatttttattaacttcactttatttttttttttttaaattgcagatttgctgttgctgagtctgattgtaacttagcaattgccttgaatagaagttatacaaaggcttatgcaagacgaggtgcagctcgatttgctttgcaaaaattagaggatgccaaaaaaggtattaatgttttccaggtcatcattatctaaaaagttatttaatagtttaactgattctatacaaagaatactagataatcacagttactatcttcagagatctttctatattgaataaaactggtttttgccatttaaaaggtattttgatattttgggaaaagaccttgttatttgccactgattaaactttggttcatattctcattcaaccatgagttcactctgttaccaggggaaagttatgtatcttctctgattttcagtttcttatatgtgagacagattaaaatatcttgttggcttttgtgaggctagaggtaatgcatgaacctaacacatttttatttattttaaaattttaatccttttattatttcataaaataggcttgtgtagtataaatcagaaaatcggaatgaagtttatgtctgaaagattgtgctcctttgttttatgagatgtaacttatgatagcaagtgttcttcctgaggctcaaagaaggaggtgatctgacacaaggattaagggttttatctgtgctgggagaacggaggaaatccagtggaataatgtcagtatttcttagttcctcttaatttaaactgtcccctgtaagcaaatgactgatcttttatacaggtttttgaataccatctatctttttttgattgttgttggttacattgagtctttgttgctgtgcgcaggctttctgtagttgtggctcgtcggggcgactcgtcattgtgacttttcttgttgtggagcccaggctctagggtgtgtgggtttcagtggttggggctcacgagctcagtccttgtgacttgtgggctgtagagcatgggtacaatagttgtggtgcacaggcttagttgctctgagacatgtggaatcttcctggaccagagatggaacgcatgtcccctgcatcggcaggcagattcttattccactgtaccaccaggaaagtcccatatatcttttttttttaattatatttttaattgaaagataattgctttacagaattttgttattttctgtcaaacctcaacgtgaatcagccgtaggtaccatatatcttttaaatattctgttatcttctgttttactcagattatgaaaaagtattagaactggaaccaaataactttgaagctacaaatgaactcaggaaaattaatcaggtaaactgcagttatttaaattaagtgtgttacttattacctttattgacaaagtaaatgttttt

SEQ ID NO: 34373 - DNA, 1337 bp, Bovine  19866881247192
  misc_feature (1)..(1): n is a, c, g, or t
nctctctgtctaccctcaccatggctttcatctcccctctctctctatccccacctttaataatttttccattctctttcagcatgaatagcagaaagggcactgtccccaggaccaggaagtttcttttggttttcatacactaatgataaatggccttgatccacaggggttttgaggatactaaatggccacaattagagtcttacctctctacctttctagatacttgacaagtcaggtcacttcctctttcccgaggttctgtttccgttttaaagtcttgttagtggcaccttttcgcatgaagttcctcacagattgttgtgaggcatatgtgagagaatctaaaccatggagagtcttggatggaagggatggtcccagttatgttttcacaatctagtcttactttatttctaattttcactttattccccgatttgactttatcttccattttcttcccatccaccttttttccttttatcttcctcatgatgtgtttctcttcctcctttcccagttgtgcttttctctcacttcattttcctgtgaatagttttcctgtttatctgtgcatttttctttcctgttcctttgagaaaagatggctgaggaagtctcaaataggtttgtgaatatattacaaaacaagcaaataacatgaaaattcagtttttctcattttctctaaggaatacaaaataaataaatttaaaaggaggtagggcaaggagttgagatgagacaagagtttaacctgatatacaaaagaatttcctgatccagaagagtgattttttaaaaaccaccagtttctacccaggaattttccatgtaagtggaacattggatcaagattttaaaagatctcttccaacatacagagtgcaaagaagaaaagaagggagaaaagaagtaaaggagaaggtaatgaatgtgtactaaacaactactgttggtcagtcacattgaatataggtttttccttatcaattaatatttacaccagtcaacaaaatgttattagtaagtttatctacttccaaaccctaagctttttctatacatctgccatatatatgtatatttcacatgtagatgtcaattttcaaaatagtatctccatcacctctaaatattaatacaatgtatgtcattgacctgataatgctttagttctttccaagactttcagatggtctgtcttctctccctatctttgtatttctgattctttttacaatctgtacagtttttctagacaacataaatggcatttgtagttcacactaactgtagcccttagacttctaaaacaagcctatcttctg

SEQ ID NO: 34374 - DNA, 1231 bp, Bovine  19866881253092
  misc_feature (1)..(1): n is a, c, g, or t
ncatatttggtatacccatgagtacattaattaaacagcattttcctttgcattgataaatgatcaaaggaagctcaccaaaatgttaaaagtggttccttgtactttcatatattgatatatatacatttttatggtataaagtaatagtatgtgtaataatattattttggtatgatttataaaatgcaccaaagataaacacactctcacttactcatgacatcttcttactctttgtgtttaaaatacccttgttaaactgagtaaatattgtgtataattagtttgtttaataaagctatatgtatatgtaattaaaacatattaggtatattaaaaagaaatagatcaacttaataaatacgtaatttattcattcactcaacagatattcataaagaacttattatgagccaggccctgttttagacatttgggaaagagcaattgatcaagaccctgatgctggggaaaactgaaggcaggaggagaagcgggtgacagaggatgagatggttgggtggtgtcactgactcaatgcacatgagtttgagcaaactctgggagatagggaaggacagagaagccctgtttactgcagtccatgtggtcacagagtcagaaacaactgagcggctgaacaataaagactgtcctcacgatgcttccattctattggaattaagaaaataaaatagaaatggctttggctaaaagaatgttgaagtggctaaaaatatacatctcgaaggactgaaaaagatttagaagggttaaactcatggtattattaagcaaagtccatcaaatttaataattcttagacatatgcatttcagacagtcatattctgagatgatttccttggacgttaaaattaagagaaatacagacagaccccaaagcagatgcaaaaatagaaaactcttaaagagttgaaatcatccaactatcgatacacataagctgttatgaatttgttaaatgtgaattttaggtgaatctgtcattgtgaaaattaatcattaggctcacaggaggattagttttaggatacttagttcactccctttaggctacggtggaattaatatctaaatagcttttgtgatttttatgggaattaaaagaaatattgttatcaaatacctagctaagtctaaccttcatctattatagagcaatttatattgtcatagccttagcaaaaataagacttatgttcaat

SEQ ID NO: 34375 - DNA, 1400 bp, Bovine  19866881281283
  misc_feature (1)..(1): n is a, c, g, or t
nccacagacgttttagaaagagaaacaggtggaatgtaaaccagatttgcattctggttcctagttgagccattaactagtaggacctgagcaaatcaaagtcatctctgtgggtcttggttcctttatctgaaaaattaggaggttgggataaatgacttctaagtagtttctgtatctatatgtctatatccactctttattttcatgcactgggacagtaattatgcccatcaggatgtatttttggtattattatattattattaaactttacttagatggaaaatatccatcttaatcaatatgaacatttcctttattaaccactccattgaaggtatcagagaattgagttcaacagctagaaaaacatatatccaacaccaaactcttcgtcttcaactccctacttacatgaggattctgcaggcttcattgtttatcccacccatagagtcgtaataggtaatattcttctttctaaagtccacaacctgggaataaaaaaaattctctgtgtttatgaactgaagaaaatctcagcttttcccttccctggaacttggaaccttctgccagatttcctatgaaatcatgacaagtttgatggatacttagcattataccatgcttcatctgcagaggaaagaagaacagggtgattatttactcagaactatgctgggggctgactgactaagtggcccagtaattgccctgaaacctttttctagtttttagggtctccatttgcaatggaggcaacagtgaagacacgacgtgctcttcagagaatgtaaactaagtgagatcatttccacacattttcagaaagatggtaaaagattctaggttttgtttcttggagaatttccttttgacttaatacttttcaaatataattcaagacaggctttaacttgtatacttttattaatatattaagctaatgtatccatgttctcagagtcatgtttgtgttagttgctcagtcatgtctgactctttgcagccccacagactgtagcctgccaggctctgctgtccatggaattctccaggcaagaatactggagtgtgtagccattcccttctctaggggatcttccttacccagggatcaaacctgggtctcccgcattacaggcagattccttactgtctgagctaccagggaagccataataaattatcaagtatgcaaggcaaatcatgattaggcagaaaataatggtcacagaatctgagttggcagcatcattaagaaatcactttttctccccatgtgttccttgcctttaggttgctttgactataactccatttttaagtatttccagaaaagaaaatttcagagcttttttcaaagtctaagtatctcccactctgacagggag

SEQ ID NO: 34376 - DNA, 1028 bp, Bovine  19866881298164
  misc_feature (1)..(1): n is a, c, g, or t
nttttgaggttttggatttgatcgggctagtcaacctgtatgtaatattggttcttcaacaaacagctttcatttcctttacatagttcttttcatctagggtgagagggtaataagtccctctgggaaatgtcatgtccactttcaccatacaaatctgaatcaatcggtcctctttatcccttaaaataccccacttccatcaaagatacattgaatttcatcatccaagtgtagatgttcttgataagttatcttaatccttgtcttaaagcttctgtttcttgggcagccatttctctgtgcctagaagaatatttgcttcatactttggcagtttatatttgcacatggttattatgtcaatccaggcatgttttctctcttttcagatatttttcctaattttggatcattctcatatttgtcacattcagttttcactaaaagacaccatgtcaactcagttgctccagactgactgtgcatctggctttcattaaagagtttcctctagtccgagtaattggtcatatactgtgactccatgtttacgtgaaataggcaggctgtttcccctacagaaattcctgctaacagtatcataaaaatatactcaatcaaaaaaaaaaaaagaaaaacaggttgaagctgaacatatatactaacagaagtctcctgaacacaattcttgatttgtggcaagaaatcaaggtggcatggctcaagcctctgtcttaaatatcattcttttttcatttttaacctatttgtcattatatttgaagtggttcttataagcagcatattagttgactcttgctttctcgggcggcctgacaatcgctgtcttaaattgtgatatttacaccacttacctggtggctcagatggtaaagaatctgcctacaatgcaggagacccatctttgattcaaggttcgggaagattccttggagaagggagtggctacccattccagtattcttgcctggagaattctatggatggaggagcctggcaggtta

SEQ ID NO: 34377 - DNA, 1096 bp, Bovine  19866881335499
  misc_feature (1)..(1): n is a, c, g, or t
ngcaaagatgctttatgactctccacctttttttcattcaacaataatttgattggaaccaccagcagcacatcaaaaaccctatttccagagaattctctttctgcaattttttcctccccagcatgctcatccagtcatgttcataaacatctctagaacggaagaatctcaggcttcacagtacactgaagctggtccgaccaaacgtggttaagttggaaataagcatttggtcaaatctgtatttaaaacaagtgttttttgccaatatacatgggaaaatattcaacatcattttaaccagagaaatacactttaaaatgagatacaatataggccaattaagatggcaagggaaattaagtattgtatgaagagtaaaaggtttggagagtgtaactgatacggtctttgtgtcagataatttatcaatattgataaaagccttttgaaaacctcatgcctctgacccagtaattacatttatagggatttttctgagggcgagattagaaatgtgaataagagatttaactacaagagagttcattgcagcactgcagcaagaagatgaaacccacctaaacatccaataacaggggatgtattgggtacattgtgccacaatgaaacaccgtgtggccgttacagaaacatgatcaaactgtctctaaccacttggggggacgtgtatgctatactgtgaatgcagaaaccaattcatggaggattcacagcaaattaagtatggtaagatcataaatatgaaagctatactataaaatagatacagtgataatatatctgagaagtgggattatggctgctttttaatgtattttggtttatttgattacattatttccctacaatgaatatgaatcccaagtgtaataaaagttattcaaaaccaaatgtattatgttgcagctcacatgccctggaatatcccaataagccaaagagattcacagcctctgaaatccgataatgactgaggacatcccacaaatccccttatgttaaggatgatgacattatctggaacaattatggaaaccctgtgagtgagttctgcccggtagttaccaaa

SEQ ID NO: 34378 - DNA, 1259 bp, Bovine  19866881335629
  misc_feature (1)..(1): n is a, c, g, or t
nctccgactgtgcagacccagcctgaggatctgtgacgggcacactcagagtgaatcctcacaggaggatgatactgtctacacatcgtggggttgctttgagggtcaggtgaaataaccctgaatacaagtgcctcgtgaactccaaagagctgggcaaatggtagctctgggtcttgtcagttactcactgcagcgccggcagggccagtccgtcctctctcaccaggcaagccgcggggaccctggaacacacaccaagaggcacaagcatgagttggtttaaggaccgctcggccccatcacttaacctgcaggcccttcatggacactggaagggagggagccagtagcccccaggaggcaaaggtgtggacgcccctggtcccgccttcctgattcaggaccctcctatcacaccaaaggtttctctgccgtggcaggatacacaggtgctcccattgttacctattaggagccctgttataggcacatcttgttccttgcaatagacgaactcccccaaatgttgaaaataaacagaatttgtaaaaattgaagcacaccttcagtgtgttaccagggttatttcaaagaaatgctggtgagcccttgcacaaaccatccagttgacacactttactttttgctcataatcgaatcaatctacaaaactgagtatctactttgcccaaagggagcggtggcatctacagtggcgccatctgctgggctttagaaggtgtctcaagagtgtctggaggccctccagggggtggtgctcatactcaccattgggcctggagaaccgttctcacctggggaaccactctcaccctggaaaaaagatgcggagggtcagcgagcagggccccctctgccagcccgcaagacaattcccatggaggaagccggacgctctggtcatctcagctagcgccgacacctccaagctttagttccatgagggacaattcccggagctctccagacctgctgctcattcattaagttgtagtgctgggtgttcctaacccaagctgttcagacgtcctaactccactgagctcagcagcatctcctcatcgtccgtcccccatgcccacgtgctgcttggtccttaccttcacacctggagcaccagcttctcccttagcaccatctagacctgggtaaccctacggaacaagagaagactttcaatcacacttctggggaagccgaagaggacgattcatgtccgccccaccaagagtttt

SEQ ID NO: 34379 - DNA, 1742 bp, Bovine  19866881361512
  misc_feature (1)..(1): n is a, c, g, or t
ntctactcttactaatgcctctacttatgctctctccagatttctcagaagccctaaaagtacaattgaaagtggttcctaccacttccctcttgctttgaggtggtatgctgagggccaacaaggcactgccagctgcactagtagagcacccactgagagggtgcgctatggttctattcaacacgcataactacactagtatttgtgattgtgtcatgaacagggtcccctaaatgtaatccacatcttcaaaggaccacaatggtgctgcaccttaggcagaagtgaggagaagggccctttctccaactttttcactgaggccctgaagcctctggtttaagaagtcttacaggaaaccagctctatcttctgtggtcagccacacactcagtttatagatgcagtgcctgttttgtttgtttcaaggcacaaggatccccttcattctagaactctctagtccctctgctttatacgtctccacagccattaacatccgtgatactgtatttttatttgtttgtttatttatatatttatttattgtctttcacctcccactaggtgtgaagtgaaagatccctaaagagccattagggcagaggtttggttttgctcacggcctggtacctggggaggtgctcaataaatatgtgttgaatagatgaatgaatgaatccatacctagaaaaataaacatctcccttaaggacacctagcctgcagagctccaactctgccttatcttagagagcaggttatctatgatttcagccatctacttctatgatctatggcttatgttcacacaattcaatggctcttttagtggctttccttgaataaaggaatacttactataagacacatggaagtccccacctcttgcaaaacagaaaaagacttgtaactttgaaataagaattaccatatagccagccacccactggaatccccagtggcatattctgccaccatccccatcagagtctcaaaggttggggccaagttttagtccaatgtcaaggtcagaggattgcatgctctcccctcccctcaaatgtttgagaatggaatgatgccaagcctgcatcctgtatgtcacagagaagtcctgatttatacttttattctattagagacagccttcaaaaaagtaccctgccaatggttataagattggtagctaactgagaaaggatattattactatgctgtaaagattactatgctgtaaagttagggtttctcttccctttgagttcctgagctgatagactagtaatttagtgtaatgttagcccagggtactttatactataaaaaaaaaattgaggcctttttgtcctctccttatcccatccttacttatgttataaaaacaaaacaagcaaaaactctccacattgaccaaatatataagacatataaagatcagtttttccaggatagtaaaatcaaattaaaaaccaaacatcaaacatagatcagaaaagcaatattccaggaattgaggttagtcttcaatcaatattagtaggacaatttcaataacaacttgctgttctcaacagtgttatctaggtctctaagaagcagagggcagtttcactggtaattgcccagatcaaatgcattaatctggaactcagttcccctcagagggcgatcctgagtcacatatctaatctcccgttcatcacatctcatctatcaccatatcacacacacttcca

SEQ ID NO: 34380 - DNA, 675 bp, Bovine  19866881378522
  misc_feature (1)..(1): n is a, c, g, or t
ncatggcatgggcatggagaaggccctaaatcaatggatagctggaggccagcttccttttcccacacctccctccactgcctgttaccttgagccattgttccccaagctgggcagaaaatagctcactcaagagaattatttttgtctctgttaaacttcaatcctaggctcctgatgagcctggctgcagaattgtttttcaggccagggggagttctggggaaagtgaggggtcagggcataaaggggaagcagtggttggaggggtgccacctcttcccccaaaggaccatgatgaccacaaagcaccggccctcttccctaggacgctgcccagtgggcggcctgactagtggccaacagtgtgcagcctgcccagcttcactcagggctcctttcaccaagtgcaggccctgagcaggtccagggctgtttgcctctgcccagagtgttgagtgaaggtagtggaaactctgttacatggcgtggaggtccaggtgggcagctggggggctgcagacggctgactgccaaggagggaaagaggtttttgcattggagagccgggctcagctcctcccgtgccctgaggcagcaccaaatggcacagttcagttcagtcgctcagtcatgtccaactcattgcgaccccatggactgcagcacgccagg

SEQ ID NO: 34381 - DNA, 902 bp, Bovine  19866881444140
  misc_feature (1)..(1): n is a, c, g, or t
ntgggtgacttctctggaggtccagcggttaagaatccaccttgcaatggtaaagacaatggaagggttccttccctgatcggaaaactaagaccccacttgcctgggtacagctaagtaagcctggagccacagctagagagtccctatgccacaactgaaagatcctccatgatgcaatggagatcccacatggtgcaactaaaactctatgcagccaaataaatagataaaatttttaaataaataaaaatgatgaaatactgcacatcggtattatgctcactgcagaagttctgcttggtgtcatccactcaggtgtccccacttttctctgctccctccatctttcctgtttctgcttccaggaaaactaccagactccactgtccatttccttctttaacccttttctatttttttgtctatgtcacacaattagaccatttcatccactaagcatgttagaatgctttgcaaacaaaggcaaaatctttgtactcaaggagtttacagcccaatggagttcaataggacaaggatacaggtaaatgtaacacaaggcagaagaaaaacattgcatcttaaatataaattaaatactatattctttcaaagcatgaggaaaacagactttgtggtgaatctctgtccgcctttggcagatgttgaagtggaggcccccagggaggaagtgattcccttaggtgccaggatctggttcttatatgtatatatataagatcaggcactttctccgtgtgtctttggcagcatgaccctgagtggaccagggttccattgtaaagtctgaaatccctaagcaaatggaggcggtctgcttttttgtgggtcaagttttggggaaatactacatagcatatcctcttttttggagttca

SEQ ID NO: 34382 - DNA, 779 bp, Bovine  19866881954999
  misc_feature (1)..(1): n is a, c, g, or t
ntggtgtcagacatcagtcattgttacttcaaatattgcctctgttcctttctttctttctcttctggtatttccattgtgcatgttacatctttcataattgttccacagtccttggatattctgttctttttttagggataagaatggcactcttgttattgtttagtggctaagtcatcatacggctcttctgtgaccccatggactgcagctggccaggctgctctgtccatgggcttttccaggcaggaataccggagtgggttgccatttccttctccatgggatcttcccaaccctgaagggatcaaacacgtgtctcctgcttggcaggtgaattctttaccactgagtcaccagggaagcccaagaaggtcattacataataataaatgggtcaatactctaagaatatataacaatccttaatatgtatgtatttaacaaaaaagcttaaaattcaacattcaaaaaattaatatcaaggcacccagtcccatcacttcatggcaaatagatggagaaacaatggaaacagtgacagagttaatttttctggacttcaaaatctctgcagatggtgactgcagccatgaatttaaaagacacttgctccttggaagaaaagctatgaccaacctagacaacatattaaaaagcagaggtgttactttgtcgacaaaaggtccgtctagtcaaagctatggtttttccagtagtcatgtatggatgtgagagttggaccataaagaaagctgagtgccgaggaattgatg

SEQ ID NO: 34383 - DNA, 3461 bp, Bovine  19866880122513
  misc_feature (1)..(1): n is a, c, g, or t
ntcatcttttaggatttgaaatagttccactggaattccttcatctccactagctttgttcatagggatgcttcctaaggcccacttgactttgcattccaggatgtctggctctaggtgagtgatcataccattgtgattatctgggttgtgaagatcttttttgtatagttcttctgtgtattcttgccacctcttcttaatatcttctgcttctgttaggtccataccatttctgtctttattgcccatcattacatgaaatgttcccttggtagctctaattttcttgaagagatctctaatctttcccattctattgttttcctctatttctttgcattgatcacaataggtatttcttgacataggaaaaataagcataatgtaaaagaccttaaaaattttccagtaattaataaatactgttgagtgataaatagctcttggtttatcccaattttacagtccccaggtgattgtcttcatagttaggataaacaaaggagggaaatatgtgatatcctttgctgtaatatatttcattggccattaacagtacttttttgctttaaaaataggtgtctgcatggcattgtcatataatttaagattattacattaaattatttaaattaattgattgttatttaaccaatattaatcaggacagtgtgctgcagtccatagggtcacaaagagtcagacatgacttggtgactaaataacatttaatttttaaattataataaaatgtggcatttttataatattaatgctcattgatgaaacttcaaaatccacattagtctaaattcttaacattgtatatgttttttctaataaaacagagctgggaagcattacctactaaaaagtacacagtgtagccattataatttatgccctaccttatttcttcccaactagaagaaccctgaaacattcatcatagagaacaaatgagaaagaaaactattctgtttcttctagaaaattcttatttggccccatctaccaccacctctcgcctatcactctggcccaaaagaccaaagaaaaattagggtgtagtgagacagtagttaaatgagattaccagaagtttcctgagatgacataatcaggggaaagaatttctaaaacggcactccccagtaatatcccgtgcaaacataaccgcaggtattaagaggttggtagtcacttgtgagttttagtttgagtcagtgaccaagagtccagtcacctctgaaacagaagacacagcatttgaccttgattgtcacctctgcaacactgcaacctcatcacatatccttcttcaaaagtctactgtgtcatttagattgtccagggtcttccacttaaaatgtcaggtagttttatgcgctaagccaaatgactgtgttttcctcctcttttactcattctcccccaaacaacttggattttttttaaaagctcttaatcagaatcgagaagcttaccaacagatatttattatcagaactcttaacatacaaaaccagttttctttccctgctttccccaatatgtgaattcagaatttaggaataaatgccaagggaaaatttttaaggtcttttactttatgtttattgttcctatgtcaagaatacctattgtgatagtttcattcaaataggtttacttcccttctctgagctccttgtgaaaggagttcccatggctaggaagaaacaatacacaatgccagtacttccctgaaggatagaccctggaaacttaagtacattttgtatatagtgtgtttatttaacttaccctgattaccatatcaaatctagcatccctaatccctgtctattctcttgccctggtttatattcttcataacgtgagtcatgttgttattactgttatgttatccgtgttatattaccttacttatggtagtatcagtctcccacactagcacggaagccccacggtcttaaactccactgaatcctcagagctttgaacaggattagcacatagtaggtgctcagtaaacatgagctgagtacaatggacagctttggttgtccttcctgatcatatccttttgctcccatattgtttctgggaatccctttgtgtgcctttgattctggtagccccacccctccaactcttcttcagagcactgctctggggttacccgagctattttgccacctcatgcagaggacctaagtgcctgggtgcttacatctcccctgggcacccacggccagtgactgactgatacagcaggatgacagcccagcttacttgcccgaaagtccttagctcagcatctgtttctaaggaaccaaacctaaaacactgagtaattgaacatgtgcactctaagatttcacacaaaccgaatcattccttaaaatgtttgcaataataacaaaaatgtcgaccacatttcacttaattccacagtaaaggattgatatttaccacatgaatctatggtacaatgaattatgtggggcattttctttttggccatgctgcatggcatgtgggatcttagttccctaaccaggaatcaaaccagtgtcccctgcattggaagcacagtcttaaccactgaactgccagggaagtccaatctggggcattttagaaagggtttggcttcaaaagtaatttcacaaacaataactataagcattggaaaaaagaattggctgagtcagcccccattaactatgcagaattatacttctcttgattaatgctgtgatttgaaaagcactgctctttaaaaaaaaacagaattataacaaagaaaaattaaaaatgcatttgcttttaatgttgcctgcttctcataacttctgcaaatgtcttcatttctcagtcgaaatgtgggtaaaagaagtttactctgcattctccagaatatcattagcaaaaatgagagcatatctgcatgactaattttgattaaattgtgcttcatctaaatatctaaacaccaggtttgcctctgcaaatgtcctttacttagcttgcctgtctctcaggatatattttcttctactagtgtggtaaaaaaagacaccaggtcaaaggtcaaaccccaagcataactgacagatttagaaatagataatggcccacattttggagtagaggtcaatataattttctgaaatcaattctaataaaaaagacaagcacttacgtttccattttcctgccctatgaattttgcagcaatgcaggcagcaggcagtttccagtaacgcttttagaagtatgactaacactcaaggaaataaaagatgacagtttttataagcagtagctggaattagtaagaaaatctgaatgcctccatttttatactttctgttttcaggtatgtagtctccacagcttcaggcatcttgttactttagcaaaatctttatgtcactactgacaccaaa

SEQ ID NO: 34384 - DNA, 5006 bp, Bovine  19866880642216
  misc_feature (1)..(1): n is a, c, g, or t
nattctttaccactgcatctcctggtctgcttacagagctctaattcacttactattccaagtctaagatatgtgggctgaaggaaaatctggaggaagcacctgcaggacttggtgaataattatacatgggatatgcagattaccagttctgaagttccggaagaatgacgacaatattgatataaaacgagagaaataaaggaaaaggggagaagtattcaattttactttacttttaatgagatgttgcaaaagtattgtttttcattctttcaatttaatttttattgaagtatggttgatttataatgaagaatagttgatttataatgtgccaatctctgctgtacagcaaagtgactaatttagacacataagggcattttaaagctattcttttctgttgtgttttatcataggatattgaatagagctctttgtgctacacagtaggcccttgttgtttatccattgtatatatgagtttacatctgctaatcccaaactcctggttgatttgcatccctgaagaccaagcaaggagatcaaaccagtcaatcctaaaggaaatccaaccctgaatgtttacagaaggactaatgctgaagctccaatactttggccacctgatgcaaagagccatctcattggaaaagaccctgatgctgggaaagattgagggcacgaggagaagggggtgacagaggataagatggttggatggtatcaccaactccatggacatgaatttgcgtaaactctgggagatagtgaaggacagggaagcctggcatgctgcagtccatgggatcacaaagaatcagacacaactgagtgactgaacaacgatgacaaaaagacttcaggtttagatacacaaggagatttcagttcagttcagtgctcagttgtgtccgactctttgcgacccccatggactgcagcacgccaggcctcctcgtctgtcaccaactcctggagtttactcaaactcatgtccattgagtcggtgatgccatccaaccgtctctttataggagttttattaaggttgtttttaatggtacatagagatgactggaagatcagtaagctcagtgcctcttaatctttcaacttgtccatatctggtagtgccaaacccaaaggcttccaaaatatttaaatacttataaaaggtttgagctaatccaaagaagatatctgaaacacttgtgacatcactgtttctgaaatccaactttgtacacataaggcatttgagaaaaatacaagttcaggctcttgtgttggcattaaaaatatttttgccaagcacacacagtaaaagtaaaagataaccctcccctttcaatcaacaaccttaggttcttatatttcaagtgctaatatacctgaattttctacgaagatcttgggtgacataagagagtgaagcaaccttttaaagaacatactacttattgattattctagtttctagtactcagtcagtttatagaaagccacatgcctggattctcttacctatctttagaaagaaatattaaaaaacatcacgctccaggatattatggatagctgacatcaaggcttcccatctggcatgcttcagtcacaagttgtaactattgttgatccccttggctctcagcgttagtcatctttttgtacatatacattttctatgtgtgccatgatgtgaaaagtttggcaagtctggcttactgaataaacagccatatgcacaacatctttttattttctaaaatctgatacttaagacctagacattaagctattcaatggtccttaaaatttgagttggtaaaaggtctacctaagtattcagcactgaaaaggattttcctgttaaattgatacattcttagatcatgggtttgaattaactcatttttctttttgaatttatttctaggaagctcaatcccgaattttgtgctcaattgcattagccatggttaccttaaagtatctactacatttacagtcattctctgcatttcaacactaaactcggttcttcaaatgctctatctaatagtttgtttttgtttttttaatggcatgcaacctatgacctttttagaagtagactgggttggaaatgataaatgaaccaataacattttcagaaaaagatgtctatatagttatgaactgcctggtattattcaatatatttctgtaagaatggagaatttaaaaaattcccctaggaagagcataataaaaaatttaacagctcaatcttgtgaactgcaactgaactgcaacacacacacacacacaaattattgaatataacattataaatttctggtttggataactttcaagatgaaccatatgaaaatgccattgtttgttgtataccacaaaatggttgaataatggcaatttcgtgtagatcaacatgactaggaaaggatttatctgctaatagggtatggttatattaacagtgataacagaactatgcctcacctgaatgacctcagcattcgataggactttcccaaatcagatactcttctgcagaatggacccacagccaactccatctgaaatattaaaagatatcccatagctttttatatcagaatcttgaagtgaactggggacccacttggatcacagaaagttgtagcttgaagtaaacttaattggatctgcactgtaaggcagttttgaatgtcaagtttattaaaaggcaagaacttagatagcttttgcatttatttactaaaaaggtcataagataattccttcaagaatagaaaagcagcttttgttgtgtatgaggagaaggtttagattttttttctccattgaaaaatcagaaaaagaaatgttttcaagactgcctgtgtgtctgtactttaagtgaacatcacaagtctttttctattaaacagaaatgatgacagttttcactgggctggtgaaaaatgattaaaagcactgactctggaggcagcgcacgtgtgtcagtttctgatctacagtgactagttgtgtggctctgggcttaacctctttacgtttcaagttcctcatctgtcaaacacagataatacccgtcataaaattatgcaaacaaaatagataatttcacaaagcactatgtgcacggcatacagtaagtgcttattaagtgtcagcaattactatcattaaaaaaaaaaaatttccccttttaaattgttagtggattaatttgcttcctgactgaagaattcagcaactactacttctctttattttcctcctttgactggaaatgttgtcattaattggagttttaggttacctgttctttacctaccaagtgcatacgcaaagtttttgcatatatggcagatggtaagccatttcactatacttgctatgaacagagctctggtaaagaatagtttagaaaatttctgagaaaagcctgcgccctggtaaatcaacatctttcttcaagaaaaacatatgaatgaaaaatggggtatctgtcttgctggccatctttctgaaaaactgttcatatcttcttgccattagaagaccatggagacgtactcactcatttgagaaacattttttactccctactaattatcaggcaccaaactagacatggagataagaagatgaattagacggtcttacctctgaggagttctcaaatttattgaagaggataaatatttatttaaataatataatcttcactcatctagcttatgagagatctgtgtgtgtaaacacagatgcacatgcagattgattattattaagagaaacaacaaacaagtgtgaaatcagctgtgtgaactgagtgtcaggggagaattacaaagcagcttcctttcttcagatggtcttgagggtgactcgtgactggtggatttctctctcagcatacagaagacagagtgtactgtatgtcctagagggaaaccttacgtggtcagcaaactttctaaaacacaaaaggataagtaaataaaaggagaaatctgatgaagaaaagtcagattctttccaatattacaagagagagcagtttcaagccaatgttcttgaagacagtgggcgatgggatgctccttgggacctatttagtttattcactagataggagtttctggtttcctatagaacgtggtatttattttacagtgagtacaaagtaaaaatgtggttaacatgtacctatgcccgtctgtttctctgtggaggtgcatttataatggttttttacacactgaaatttgtcaattttttttgttaccccagtgggatttatcattttcaaagattacagcaaacaacctttgctttagcacttgagcaggactgaatgttaaataaaacagctaggagaaaattacagtatgagaatatgacctcgaatggctgtgtcatctctgatgactgcaggagacttctatgccatatgacaatttcaaaatgttatatgtttaacataaatttttcatccatcagggacccctagggtactaaagaccatcttcttctgccagagttccactagacaataaaggccatgcttctgaagggcaggagtgctccttttagaggcgtgactctgccattagctgtggatacaaacggcacctgcagctgcccctctccagctctcctgtttggaggcaacaaacagtgagcagcaggcatggttaactaattacagagctgctccatgcccaccgcagacatctggctaaccacagggcatcttcagatactcctggcattcctgccctgacactgttcagaagaaaaggcaacaggaattagaatcttgattatttggggatttttccccaaatttataattttcaggcaaaaagcaagagagatataaatatatatttaaagggaaccagaaataaacagaaactgctcagagtgccactgagtaaataatttaatgccaacgtcaaaagtcatccttctctagggat

SEQ ID NO: 34385 - DNA, 1105 bp, Bovine  19866880694324
  misc_feature (1)..(1): n is a, c, g, or t
ncctcatttcttgagatagttagaaacaaaaccaagaaaaaacaacagagctgagttgagtgtgggaagtgggccaagggtgggcttaccagtagagcagtacactcccacacccagcctgaaattgtagcctcctgcagacagatttgcatgtcatggacttttgggttgaacacaaaaattgtcaatactacaaatattaaatctgagaatatcaacaatatactatctttacctaataatgatatcagcatatgtgaacattagttttgtttccagattttttcactgtgaaagtgatgctgttaaatagctttttccttttctagtaatatttctttgagataactctcttaaaagttgaattaatttttttaaaggagataaaccttttatgatacttcatgtaattgccaaattgtttataaaactattatatagatttgtactgtactatgtaagtagtttcagccacacatagctagggattttcatttaaagagttttggaggcactatttaacagatgaaatattggttttaatttatatttccttgtctagtattaaatttaaacatttaattttcatatatttatatatttcttctagcactcgttattcattcagatcttcctcctatttaacttatgggatcattagcagtttagttccttttcagggttttggataaattagaattttatctaagcatattatcccacttttctctttcagctccagtaataaaccgatttacaaggcgtgcctcaggtaagtctccttatggattttgcttactaatggtgacattttaaaaatggattggataagaaggtatgaaaagaataattgctatagagtaataacttatttatcagtcattttcccagaaaacagccatatgataaaatcaagaactaggaagtaaatggaaatatcctctgagtggctgaatttaaaatcccagtgtggctaatgtatggaaactcttacccaaatttgtttatttctgcgcttgataaattactaattacaggttatctggtttgccagccacagtttagaagaaggatttagaacttgggtaaaagtaaatcactcagt

SEQ ID NO: 34386 - DNA, 1543 bp, Bovine  19866880708197
  misc_feature (1)..(1): n is a, c, g, or t
nattttgtgtcctaagaaatatttgcttcatccgtgattttcaaccaggggtgaacccccacctcctccaccaaaggatgtttggtaatgtctggagacatttttgattgttccaactgggaccatgctaccagcatccagtgggcagagaccagagatgctgctaaatatcctacaatacacaggacagcctccccctacccgccacaaacaaaaaattatccagtccaaaattttagtagtgccaaagtggagaaacatctcctaattcagtatgccaagttttttccctaaagttttaattctcatatttaagtctttaatccatgtttaattttataacaattagcagtaagctggctctttagcaaaagcatacactacctactgtccttttgaagttagaaatgggttcatgctcagtcacttcagtcctatctgagtctttgccaggctcctctgtccatgggcttttcctggcaagaataggggagtgggttgccatgccctcctccaagggatcttccccacccagggatcaaatctgcatctcttgcattgcaggtgaattctttactgctgagccactggggaagccctagaacttggtaggaataatgatatagtaatacagcttcatatcatttggttttttttaagatcacgtttttgatccataatgaattcactgttggctaaaactcctaagactttctatttggaaagagtggctgctaaatcacctttctcccaccttgaattcatttggaggttatgtaggctttttggaggggaaaagcattgtataatatctgagtgcaagagttccatttattgctgttaaatttcatcttgttagatttggcctagaattagattgcatctaattttgcaacaaccatgtttagacactacggtagcaacagaactcttttttcaaattaattcttagaatgaggccaaatatataagcaaataacggcaaaattgccctgtgttagagggaacattaaagtacaagagtcctgtgagaatggaatatcagaagataggatatgccatgtctcttaggcactccacagatgcttgggtttcctgggaacacactttgagaaccactggtttaagcgttgtgaattgctttcactagcatttttggatttggtgaaaatgccatgcacatttttacccaaatcactaaaatccttcaactgaaaactttttcctaggtgtttatagtgatgctttgcaggaagatgtatgtctccacaatgtgttttcaattgtgtgtaggaaacacgtggctgttttcttacagattgaaaaatgtaaagtgatggcctctaagaaaaaacctctgtggcttgagtttaaatgtgctgaccctacagctctatcaaatgaaacaattggaattatctttaaacacggtgatgatctgcgccaagacatgcttattctacaggtatactgctgttaaggatttttttttcagttgttcaaaacaagaagtctgtactagttgtttaaaaaaaaatacctt

SEQ ID NO: 34387 - DNA, 1512 bp, Bovine  19866880719104
  misc_feature (1)..(1): n is a, c, g, or t
natatagaaagtgttcctgactgctgaatggtgggtgaaaggaaagggtgacaggaattaaaaggcacagagtttaatgataatttaaaaattaccccactactactgggaaaccatgcatgtttccagaattctcattaagagatcatggtgttcccaggaaactgcctagaaggaaattgcaacctactcaattacactgcaacttgccaggaattaagtaatggtgttcttggaattggagagtacagtgtgggcagtgtttatctaatgctgtgctgaagagtctgaccttagcttctgaggaccagcaggattatctggttggtaatatctctagaatggagagcagttcatcagctcattcagggggcccagcttttggtagagttgatgaattccatgtgaaagacagggccctagcagttctcaacttttaagagtcatttagaaagaacattttaaaatgtggattgctagaaacaacatccagataatgtaaattcataggtcttgtaagactcaggaatttatgttttaacaggcttcttctggaccacattttgataagatgagatgcataattgaagtggctagaataaaaattaaataatcagtgacagtatcacccttaggcccagaccaaagggattctgctttggggtcttaggtttagaggagcctgctctgcccctgtgatgaggaatcagtcgacttaaggggatatacgaccgagagtctaggccaaactttctagaccatgttctgggtaccgggcccctgaaattttctgcccagctggcactgagctgcctcccaggttctgcatgaagttcttccctggtctgagctccggagggcacatgctgctgcaggcatccttcagcctcagtgttggcaaggggcagctgtttgtggggttgtggagcatggctgtgtcagctgatgcgcccaccagtggggggaagaagcatctcatgaaaggctggctgtggtccacaggagtgtggctgtgggcctggagctggctctccctgtactgctgcattcctgtgcctggtgttctgggtccttttgaaggtacatttatcatgaagaacagaacatgcgtcattcagcaacttgctgctgctgctgctgctgctgctaagtcgcttcagtcatgtccaactctgtgtgaccccatagacggcagtccaccaggctcccccgtccctgggtttctccaggcaagaacactggagtggcttgccattttcttctccaatgcatgaaggtgaaaagtgaaagtgaagtcgctcagtcgtgtcccactcttctcgaccccatggactgcagcctaccaggctcctccatccatgggattttccaggcaagagtactggagtagggtgccatcgccttctccgagcaacttgttagtatggattataacttctaaatatgcagaagtttaaggtttgtgggcctttatggattcttgccttaggtcccacgaacactaagggcaga

SEQ ID NO: 34388 - DNA, 1062 bp, Bovine  19866880720368
  misc_feature (1)..(1): n is a, c, g, or t
ntatgtgtatatatggtgtgtatgtatatatatatatatatatatatatacacacacacacatatatatctttttaaaaatattcttttccattatggctcatcataagatattgaatatagttctatgtacagtagaccttgttgtttatccatcctatgtataaaagctttcatctgctaatcccatcccgcattcaagccatcccccaacctctccttcctgacaaccatgagtctgttctctatgtccatgaatctgttgttctgtcatagataggttcttttgtgtcatattttagatttctttgggagatgattttaaaagattctgtttggtcctgaaattttaaataaaaatgacttaagtttgtagaaaagagatggcattattttaaattaatgacagaacttaggatggacacacagcttttcacattcaaaacactcccaaagtcatcttcataatcatgttccttccagatggcctcctccagatgcccttgttcacattacgaaacacaagcatgttgaaagagcgtctcagcgttttgaattaaagggtgttaaaggctccactttggcctggagagctctgaaatgtacgtagccaggcagacatttcataggtgggatgatccctgaaaaggacatttgcccatgagcatagaaaagtgttaaggcatgaaaaagaagtttggtgtcactattcattatcaagtttggatcagcttcttgattaaaaataaactctctgctagccagctcattctgtcatgaccccagacttcttaggaaagtataatgttggaactgttttttcaaagacatagcagattgagagagcttcatgccaaacaggggataaaagatcagatgctcagaaaaggacttcaaaccatttaaaaattataaaaacagcctttaatttgaaaaataaattacggatagttacaagtttcttttaacacttgattttatttattttaagaagaacactgttttagaaggcaagagattctagaactgtgtctccagagattcttgaaaagataaaaataaa

SEQ ID NO: 34389 - DNA, 715 bp, Bovine  19866880753146
  misc_feature (1)..(1): n is a, c, g, or t
ncacaccagcacatccacacccacattgcaagcagcatgatagaaaatggaagaaagatgggcctattcttacattaagacacattccagagttgaacataccctcccatcatatgcaattggccagctcttagtaacatgaccatgcttaatggtacaggaggttgaacaatgccatctttatactgaactttatattggacatcccatgtaatgtccaccaatcaagggttccatcactataagagaaggggagaaaagatactggaggacaaccagtattgaagcaatctctctcttgacaaatagcaggttgaaattttagtgaataagattaggtaagaatataatagaattttctgtgaaggttgctgaacacagttaatttaaaatgtgagaaatgcttccaaatgtctaaaaatgggatagtgtttcatttgtaaatgagatgggttgagaaaagggatagttcatgctcagtctcagacttaatgtttatattcagaaatgacaaaggttaaaagactggactaaatgaaagtttaagggtctttcttgaggcagattgctatagtcaggattgtatgcttggcagaatgtagtgtgccaatgcaaatgcccctctgggtctttgtagaacatgcagcagcccctaaggaggtcaaagagaccttggggttagaggaaatggagaaaatacgggaaaaattcacag

SEQ ID NO: 34390 - DNA, 1958 bp, Bovine  19866880870000
  misc_feature (1)..(1): n is a, c, g, or t
ntaaaaggtttatttcagtcattaattgaggtaatgaggctcttcaacagacccagcagagaatgcttggctaaagaagctcaaaacttccttggaatttcaaccaacgtctttcatcctctcctatccaatgtcatctcgatttgacaactatcagcccctgaaactgttctctccacatcagaaccaaacacgtcctgaccaaattcagtgatcccttcattcccactggctgcttctcagctgttagctaccatctgcctttaccctctcccagaaagctcttttcctttggtttctctgataccaggttttcctgtttcactacgtagtttttctttatttgtttgagtggctggatttgcctttttcttctgttcctaactgtagtcttctcctaaaatccagtcttcagtcttcatcctcttaaactcatctttgtctcctctacttctctattctcctatagtcttctaacaggtcttacagttacagattctttcaatgatgttgttatacagaacatgagcatatataacatatatgctatatacaatatggcatatacacaacatattagtaaggatgctaatacggtttaagtggtcagtggtcaacttagagaattcctttgtattgaatttaaagatgttctgaccttggatatatatatataaacaaagcactttgaaaaagactatttaagaagtatctaaggatgaaattgggcagagtttaatccagattgagcataagaccagttcattaataaaatacatattctattacgattatattacattaagatcaaattttattaaaatcaaattgttaattgaagggcactgtggtatgtgctggggcttccctggtggctcaaatggtaaagaatccgcctgcagtgcaggagacccaggttcaatccctggctagggaagatcccctggagaagggaatggctacacactccagtattcttgcctggagatttccatggacagaggagcctggtgggctacaatccatggggtcgcaaagagtcagacatggctgagcaactaacactttcacactttcacgcatggtaggtgcgaatagacataacagcataaaggcagtcacaccgaagctaattaaagctatttctacaattcatcacagaggttaaatgcacattatttatttcacacacttttctttaacaagaatttaagttatttaatattacataggcttatcttctacatatttaaagtttttcatttatctgtaagcattaagactttaaggtctttagataaatcttttagaatctaaagtgtaagtgtactttgcacactgataatataacattttctgtcgttcccatcaaatactagattttgcctggcacctgctgtcaacaaatccttagagacaaagacattaatttgtttcatggaatggatgaagtcagttaagcctagtcaaaaataaacgtgcagcccaaatacagtaagtgatatgaaagaagttggcccttcaatggaattcttttcgagttttccaatttttgccacaagtatcattttcttactggtcctcaggcttaataccttggagattcctttgcctctgcctacccctttgttactatctctggcctgtctccaattaccactcctgctctttctttattttcagagccactacctggtctagactgtgagtactccaacatggagagtgagatggtttcttcatagccgtcctgctcccaatctctcactgcttcagttatttcttgcctgattaaccttacatatgatggatggctttccatgtttaagagtcatcagaggttttcttacaatatattccagcaatcccactcctggacatatatccagagaagactctaattcaaaaggatacatgcaccccaatgttcatagcagcagtacttacaatagccagga

SEQ ID NO: 34391 - DNA, 1626 bp, Bovine  19866880914039
  misc_feature (1)..(1): n is a, c, g, or t
ncatgaggcctgtgattctgcatttctcacacgcttccaggaggcaccaggggctgctggtgcccagaacacactttaagtagccttgatttaagggaatgtggatactacttgtgttttcttttgaaattgttgataacatcccaccctatggttctgacatgagtttatttggttatttctctcaaatccttttgtggaaggaggcaaggttgaagtaacaggaaggttgttaaaacctccttttcaagatctgtagtctcacggaagttacgcatggttcagtcaccactgagcctttgactccgaggtgaattcagccaataaaaatatctcttgatcagagaaacaagacttgtgcatttcttcttctgagacccaggcagctactgtttacttcttaaaaatgtcatgagtcactttttaagtggtgcaagcaaaattggaattgtttcaggtggaagggagcttgtcctctgaagtgtcttaaggataatcagagatttgaatacccaaagccggcaaaataaacactcaaaaccagtagacttggcccttaggaagtgtttacgcactgtcacaagggtgggttgtgatctgtttccttaaaggaggtaccatttaaaatttaatcatcctggtgggcttgccaggcagggtcagattgtcacatgatcaggaaggctcctcatgcacatccttggaacaaggtcacatatttagcgggttggcccttcgagtactgatagttctcagccctggaaggaaccttaaactagggacagaggtccagccatttccaggtatatgtgatatttatgttctcaggaagggtgaaggattcttcagtttttttttttttttttttactaatctgtacctgtttgaagatctcttggaggagggcatggcaccccactccagtattcttgcctggagaatccccatggacagatgagcctggtaggctacagtccatggggttgcaaagagtcggacatgactgaagcaacttagcatgcatgcatgcaataccacataattagataacaccgtcttatttaaacaaatgaaataaaattattcaaaaaaaggaaaatggcagcttcttaaagattgaaggaaagaagggtgagaaagcagctttctgtctcctttgtcatctgagttttcttgctctgagtgtaccaggcaacagtgagattcatagaaaaaacacacatttttatgactaaaaacgaaagggtaatgaagagtacactatgtctgatgaaaagaaggagtaaaaagggatagaaattctttcctaggaagagctggtagttgtgaagacaaaaatcataataaaatcattcatgttatttttataaatatggagcatttatttcatggcagatttggtgcaaaaagctttgcaaacattgtttcagtttaccctcacaaaaaccctaggaggtcttatcaatgtcatccctcattttatggataagaaaatggaatctttgagagcttaaatagcttgctagcaagtagtgttgggattattaagcaggccatttaaatgatccaaagatcttccaaggtgttagtttccaaggtttacctgcaagagttatacccacagtt

SEQ ID NO: 34392 - DNA, 1551 bp, Bovine  19866881018285
  misc_feature (1)..(1): n is a, c, g, or t
nataggagttgcagcaaagcttcggagttgtggtctgaatgcaagtttggtccaggttccccttcctccacctgtgcatcagaaccctagagccaggaaacagggatgtaagggggttgagaggtgatcttgtcacatgttgctctgtttcttttcaatgagaaacctgcttcatgaaatgcattcttacttcagggaaaatgggattcctgtgggttgaatataaatggagtctgggacttagcagatttgaaggaaaaattagtatctactgttcaaggaaaaccccccaagctagtaacttctctgggaatttccaccatcaaagggggttctggggagaattctaactggagaggggggtgccctgcaccgtgcaatgtgacgaatatgcagatgtcatggctgtttctttatttttctccataagaaaggctggattagagacaggtggaggggaagcgggagctgaaggttcccagcagcctcaagtactgctcagttccaagtaactggtgggtatcaaccctaccttgcaactctccgtacttcaggatgtagtttccatttcaccttctgattgttggctagttgaccctccagtcatgccttgtcttttctggactatgagtggatgaggacaggctctgtctaaagcagttatattccccagtggctaatagtaggagctcggtatcctcttgtggaatgagtgaatgaataaacaaatgggtttattctgtcccttactgtagtctactctaatggcccattttcttgtctgtcttccatcccaaaactggatgctgggttagggcaggaactgtctgctttgctcaccagaactgtgtatcccaaagtcaacgatagtgccaaaccatagtatttaaaatatgaaagggaagaaaggatgaggagacctgagcctcttagagtctttcttccacttggagaggacagatcagcacatggaatgaccatcagttaaactgatagctgtggcagttcagaaggtgtgagatgcccacagaaggggagatgatgtgaactggagatgggttgcctgggactgagaggaccggaaagctgtgccccaggaaagattgatcagggaactgatgatgtgagcagttttgtgggacagtattggagagctcagagacttctgaaaggaagagttagaaaaagcatctaactgatctgtgttacttgggctcaggttataggcagggaacaatgggacgtgagagttctaggtccctttctcccaacctctctgcctggagctgggctgccatgaaagcagatgcaatctggcttcccagacaagcctgtactcggctggcaaagcaaccctagtgacacctttgttggtcagcttgctttcgtctttacactttacaagtgctttgcatgaaaggttcactcaaaacagatgtaatagcattttagtggcagaagaatccacttgagttgtattgatagttgggtcagcagacagaatgttctgggtgatgtttataacccaaagagaaactagattacagaaaa

SEQ ID NO: 34393 - DNA, 1195 bp, Bovine  19866881256552
  misc_feature (1)..(1): n is a, c, g, or t
natgaggacttggttattttccccctttaacccttttaaaataagcgagattctggtctgattgaaggtagaatgtaactagcagtgttactgaccagagtgaaaccgtttttttacattctacatgtatcagttagctatttctggagctgctgttctaggatggcctcacacatctggcagttggctggctgtcagctgagtcaatgtgtgaccaggccacgtgtctttcattatctaacaggcgtgcctgggtttgtttacatagtggtggccggattccgagagagagtgtggaaatgtacaaagtctctagaggcctgagcttggaaccagcacaccattgcttccattcacattctgtgccagagcaagtcccgaggccagtccagagtcaaggggtcggggaaatagactgcactccttaacggtaggggccttagagttacatttcaacagctctagatacaggaaggggtgaagaattgtagccatttttgtaatttaatggaagacattaaattttttgcataaaacctcctcagctgtgctgatcaaacagaacagggcactcccaagaaagcatattactttcctcatggattgtcttagtccattcaggctgctgtaagagaatcccagagattggatggcttatatacaaattgatcacaattctggaggctagaagtccaagatcaaggccctgcaaattcaagtgtcaggtgagagtccatttcctggctcatagatgaagtcatttcactgtgacctcatttgaatggaagaaaccaagggggctctctggaggtttttgtttttttttaataaggacactacctcagccatgaaggcagagcccttctaatcctaattaacttctaaaagccccacttcctaataccattacgttgagggcttaggatctcaacataggaatttgggaggaatgtaaacattcagaccacattagtattgtggttgggatttcttccttgagaatcaagggattatagctttagttcctaggttttcaaccaaatcactgtaatcatttagtaatagtttctaatctcttacttcaaaccacaccagccaggtcataacaaaaggtctgtgaatcagtgaaatagtaattaaagttacctttgcagctaaacctcactgttcatttaaataaaatttacaaagttct

SEQ ID NO: 34394 - DNA, 697 bp, Bovine  19866881306389
  misc_feature (1)..(1): n is a, c, g, or t
ntggtaatattagctacaataaataaacatcaatcttttatatttgaataggaatttgtagtttataggcactttcaaaaagatgtttattttttcttaaaaccctcttgcattaaggagggcagatgttactttgcatattttttaagttgagaatttagctcaaagttacatgattcatccatggtttcctggaaggctatggggctggcagtggagcccacgcctcctgaccctagttggtgcccagtggtgcgtccttcttcaccttccccctgctcctcttccctgtacttgggttcctgagagagaaaacaccaggcacaccctgcccagatacacattgctttacttccagtgaggcctccaccctgaatctcaacgttcttccctaggtttggctgctggactgaaaaaaaaaaaaaaaaaaaacaagaaaaatggtgaaggttactgttggtttgccaagagctgatgcaggaaacatttgtgttttatccctgcaagtggatatgaagggatatgattatgagggattggatggaattttggtaattttgtcaaaacccagtgtttaccttgacaactgcatagcatatgcttggtgcccccatctttttaactacccagtcctgtgccccgtttactatgggagacagaagtcattgtcatagaacctctctacccacaatttaaa

SEQ ID NO: 34395 - DNA, 775 bp, Bovine  19866881317286
  misc_feature (1)..(1): n is a, c, g, or t
ntctattttaggcatgataaacattttatatatcaagcaaaatcacgaaacaggcaacctttcggactatactaatggctatattgaggaaagaatgtgagataatatttcataactctggttcatcaaccacaaatctgatgggattaaatgagtgcaatgagaatgagcaatgataacattaaatgtggaaaaggaagggcaggtcctgactagttatttcttgaatccgctgctttggctaacatacaatataacccaaggagaactttgatcgccatttctatagaaactgtgtaacaaaataaaagtatatttagcccccaaatctcacttcaaatgaagaactttatgataagcaaaaatgaccacattggtaagaagttcgttaatgagaaaaagaaaattgcccttttacattcttttggacagaatttaggtaaagataagctcacttggtggagaaggaaatggtaacccactccagtattcttgcctggagaatcccagggacagaagagcctggcagactatagtccacagggttgtaaaaagtcagacatgtctgaagcaacttagcatgcacacaagctcccttggaggcctggtcatattttagataagtacaggctttctcggattagctagattttttgtgtttgaaaaattggttctgatcattagagggattaaatttatccaatgttgcacagaggtcataataggatccaaagttttaataacaaaagaactgggccaattaagctgcctcaca

SEQ ID NO: 34396 - DNA, 887 bp, Bovine  19866881320943
  misc_feature (1)..(1): n is a, c, g, or t
ntggaaggtggctctctgcagcagatccgatttaagctgtcctctctcaggcagaccctaaaggaaatgagagctggggcaacaaacctttccttgaagggagatcttggaggcttatatctgtgttccctacagattcataaccaagagaagtcttggcataaacttaaagttacagatagggttataacaaaggaactccagcaactccacactttgctgcttagtgatggactcgtgttggtactgcaaatgaataagttaacaacaaagcccttttcagttaactgtgaaagcagtgaggctgagaatatatccatggaatagacatctgaactgaggagctcagaacagggccaactttatggatgtgtgactactgcagtcgcccagggccccatgctcaggaagaccctgcatttggtttcttgcttagaagtttctgtcttacaattcttagtcattttatctttgatcttttgttagtgaaatctgatgggacaatggagtgtgcctgtgagcagaggacatgcatacacagtatgactgtctgccattccttatgtcctcattcatgaataagtttgagatacaccatgagcacagaattcaggtggattaactctacctgggagttcaatgagactcaaagtgaacagaaggtacatagactacatctatgactgatgagcccccaaaggacatatttctacttgaattagaattttgacttcagaaagaacacatttatattctaagaaatacaaatgatcaaggagctctaccatatcctttcttactcacgttatttccctgtattagctaaccacttatgctgaaaatgatgacatagaaaaggaaagatggagcagcccacagtgtttttt

SEQ ID NO: 34397 - DNA, 621 bp, Bovine  19866881342959
  misc_feature (1)..(1): n is a, c, g, or t
ntatggaagtacaaagcctcacatgagcacaactgcaggacatgtggctgcagaaggataacaagcaggctggaagaggctactattcatcagagcaaagagtagagagaatgacccccaaatccaagagtgatcagcacattgaaatgagtctcttagaaaccttgggaagggaggagctggggtaatttggaaggagaagagaagactgtaaatgctaaaccattttgtttgtttcttaagttgttgattatcccacaaggttggtgtgacttggaaaaacaaaaggaaatctagaacaatgacttcttatagaagtgtccattgtatcatagatgtggttcagaagaacagaacattttaaagtcttggcaagtgccatgggctttaattaaattggattactttaattaaataacataaagagacatgctgctcagttttcagagtagcacccctgttcattcttactgagtctagatgaatttgaagaacagatcaatttccttttatgcaactgagagtatgaaatatctgtggggaattcagtccatacacccaattcagaattttaggttttagagcagatcacaatgaaaaatggggacagactctttggga

SEQ ID NO: 34398 - DNA, 1803 bp, Bovine  19866881394828
  misc_feature (1)..(1): n is a, c, g, or t
ntgacttagcagcagcagcagcagcatgacaagataaaactgccactctaccattcccatgggataaggcccagagaagtgggaggacctggattcattcaggcattaattttacaacgatgataagaaagaagccatgccaacaattttaatggggagctttgaatttaaccttcacggcatgacatgaaggatcaagttctcattttggaggaagagggacataattgctaaatacttgagtatgctgtctttaagtattatcattattagtaatctcctgattcactgaccttgggctagacaatctcccttctttaaaaaattttttttttcttttagatgtgccgcatgacttgtgggatcttagttccctgatcagggattgaaccttgccccctgcagtggaagcacaaaatcttaatcactgaactgccaggggattcctggacagttctcccttcttatggaagacaaatggaatccatgctggcattacaggaaaaaagcaaaacaaaacattgctctctttactgaatacttaaataactctgcagcttctatcattaacattagttactctaggccagaggtcagcaaactatttcccatggggccaatccaacctacacctgtatttgtaaataaaatattacaggaacaagctgtgtccattttttaaaatgtattgtttttactttcatgctacaacagcagaaacttcctaagatggaagcttagattattactttcagaatttttttctaatacaaatatttaaagctataaatttccctcaaacagctgatttagctatagaccttgaataattaaatgttacaatttagcaactctgtaatctgctatgttcttctgaggacggatttcatagttgttagtctgcctagattcaaactatatccccttacgttgtgcagcagctgctatctctgtttagttctttctgctttaagtcattgatttttagcctgcttcccagggatcttccgtcagtctgtgtaggttagcagtcagtgaagaatctgggtagagtttgtactagatttttcagttcctttgctggtctttctgacttgagctctctccactgatatagaagagtataggagaaggtgctaaatctaaaaagcagcagtttcacaaactgcctcagtgcagttttgtctttattagaatattattataatagtataattattttttaggagtccctgaggtttcccctgttcttgtgtgatttagcagtcgctaaggatgtgggcagaatttacactcagattttgggtctccctacttgtgtggctcatcactttcaggatttctctccctttcaccctaaatttgttctgtcaaccctgaacttttctgtggcacttcaagccagtaagactgtggttttctgccactggaactgtggatattgggtagtgacttcagaccaaaaacaaacaaacaaacaaaaaacccccaaaaccttacaattctatttttatctgttgcgcttgtgatctttcaagacagcatctcctggttcccatttgctttgaccactttccagtgcctttaaatagggcttttaaaaatactttgttcagattttatagttttatctgcaggaagttttgctcagcaaattcaattaattcaccattaccagaagccagacccctaaatagttgttttaaaggggttttggggcagttttcaactttgttgtatgctcagtatgaaagaatctatgaccattcattaatgatctttgattccagtaccaatcccaga

SEQ ID NO: 34399 - DNA, 1853 bp, Bovine  19866881584048
  misc_feature (1)..(1): n is a, c, g, or t
naatttacttgaccagacagttcagcaaacaaaagatactattaccctgaagcagggtaaagggtgaacttttcttcaaacaaagtacacattagctctaagaggactgaaagcaaaagtggaacattcgatcccagaagtatgttaattagcaagagaattccccacctgggaatcttggttctagaatttcccaagtgacaatggattaactaaattggagacagaacatgaggaagaagcaaaggacataatgaaagtagaacaagatgttataaaacaaagggaaatttcataaacatttaacttggtgacacaataaataggatatttagagaatgaataccttgaaggtctttccctgtttaaaaaaaaaatagctacctgtcttaggagcaactgatttctaaaattcataggacctgatgcaggcttgggatttctcacagaatgttcagcccactaaataaagactggaaagtcatagctatatggttcccctgactcagagaaaaagaaagagttccatgaaatgtggggatccctataacttagcacctgccatagaaattcatatgtgtaggtcactcctagttcccagaaacatccgcttgcagttaaatttaagctcttttgttagataatgacatatttctaaataatatatatgttactatttcgtgattctccaattaaatatttgtagtgactccctgttatgaaatgtcaggatttagtgcttttattctttcctccaacaatacagacacagacatacacacacactctttccttttctttttctggctgatatagtcataccacactttttgattgaatgaattctcattgttctcattgttactgctgctgctaagtcgcttcagtcatgttcgactctgtgcgatcccatagacggcagcccaccaggctcccccgtccctgggattctccaggcaagaacactggagtgggttgccatttccttctccaatgcatgaaagtgaaaagtgaaagtgaagtcgctcagtcgtgtccgactctgagcgaccccatggattgcagcctaacaggctcctccgtccatgggattttccaggcaagagtactggagtggggtgccattgccttctccgttaagagtgtatagggttctaaaatgaaaaggtttgagaattgccccactagaccatgagttatccacaaagtatcttcaagtattctgaacctggtgcacaaaaaattcacctggcaaatgtttatcaagtgccaactctatgcctgatgctatgctacagtggggattcagaactgaaacagagtcccttctctggagggttcacagacaggtggagaagcaaacaggtacaagaacagtacccttatacttaagggggactatgatgagaaagttaggagcctgcaggaaaaacacgcacctatgaggtggagagggtgggagggaggagtcgatagagaaggcttctcagaaaagctgacacctggtctgtctttacagccaccaggaatcagccaagggaaggcagggagaacagaatgcataaaaggtggaagctttaagaaaagaatggtgatgtcctgctcctgcactgagctcagtatgagtgctacaccagtacaagtctgtgcactgggggtgagtttggaagtgaaagaaggtagcttagagctgaagcgggcaggagccaaagcaaagggccttgtataccatattaagagatgtggattcttaacatcaaaagagggagggctaaaggaggcattggcaaggattttagggtcccacttgcatcaactttaaaaaagacttttctgtcaaggagagttgggga

SEQ ID NO: 34400 - DNA, 1177 bp, Bovine  19866881589406
  misc_feature (1)..(1): n is a, c, g, or t
ncaaaaccctttcttcaataaaatattttgtcaaagccaaaggtatggaataaaatatggccctaaaaaacatagcttgaaaatcattgacttactcttatgtcaatttgactatgaaatattataattcccattgatgtattcatggttcatcctgagaaatattcactgaatatctgcagatattaagctctgcagtgatctactgtaacttatgcaagctaggccatgacctgtttctcctagcacattatttttcagagggagaacactaattccataaataaaataaaaagttatgatacaagtacaaaaggatacacaaaataggggagtggttactgctggctgggggattgaagaatttttcatgtggggtggcatttgaacaagaggtaggatatttaactggggaagatatgtaagggtttccaggttgagcaaacatgataagtgaaggtgtagaggcaggaatttgaaaagcagtttaagagaaaggcacaaccattggttgtgatgtaaatggcataatagggacttaaagccaaagctaagaaattaggttggaatcagattatcaaagtccttgaatttcataataatgaggtttgcttttattctccaggaaacaaaaagccattgggggaaaaaattattttttagcagaaggtgatatatatagaaatgtatctagaaaatatttttccaaataaggtataataagaaatgaaaaaaactagagacaggagtgttaattagaagacaattgtctggcaagaagtgatggagacccagcctgggcacagtgctatgaaccaaaatatgtcaccccaaattatctattaatatgatgatgctctaactcccagagtgacagtatttggagacaggacttttaggaggtcattaagggcttttcaggtagcactagtggtaaagaacccacctcccagtgcaggagacgtaagagacctgggttcaatccctgtgtagggaagatcccctgggagaagaaaatggaaacccactccagtatttcttgcctggagaaccccatggacagaagagcctgatgggtaacagtccataaggtcacaaacagtcagacccaactgaagcgactcagcagcagcaagggtaaaagaagtcatgaagatgggactcaatccaattggag

SEQ ID NO: 34401 - DNA, 890 bp, Bovine  19866882158885
  misc_feature (1)..(1): n is a, c, g, or t
nagtattaactcctcaaagggcagttatagttaagattatttaagaacaaagactttggcaagccttcagtggaagggagctgtgttcttttttgggcatttgcattttaacagactgagaaataaatccactttttaaagggaagaactatttgccatctgcagttagttaatgtctgaggcagggaaaatctgtcgttcacacacatttgggatgcagttggcatattttcctcttccggagggtttcatcagcagtgactgagatcgaaacaccctgcctggtgtgttatagtgagccagccacttggcttttgcttggggcaaaaccttagtatcttgagagtagtatctgctcatttttcccttgtgacaaaagtctgaatatgattgatggaagaattggtatggtcatagataaaatagtaaagaatatagtcaccatatttccagatactggtaaagcagcccaagtgcgatcaggctacattattcaaatggccttttgcagcagggcaggccatatgtaaggtgtacagggtgtacagggaagggacaagacaggaaaagaaaaggaactcaaaaagccacctcatagaaaggactgtgtggggacagagaaaggaaattttgaccactgacatgaatgaaaaattctaaatgaggtaaagatggttaaagaggacatgtagaaaggttcagatgatgtacaccaaacaaatgttttgagctacctttcaaagaaacttagcacaaatatttatattagttctcagattgtttggattggtgttcttaaaaatgaaaccttaagtagcaacaaaatctagcagaatctaagaagtgatttggtatattttgagtagtaagcaggggtgatgggcttccca

SEQ ID NO: 34402 - DNA, 940 bp, Bovine  19866880140543
  misc_feature (1)..(1): n is a, c, g, or t
nttgtattagttttgccaaacataaaaatgaatccgccacaggtatacccatgctccccatcctgaaccctcctccctcctccctccccataccctccctctgggtcgtgccagtgcaccagccccaagcatccagtatcgtgcatcgaacctggactggcgactcatttcatacatgatattatacatgtttcaatgccattctcccaaatctccccaccctctccttctccctctccctctcccacagagtccataagactgatctatacatccgtgtctcttttgctgtctcgtacaccgggttattgttaccatctttctaaattccacatatatgtgttagtatactgtattggtgtttttctttctggcttacttcactctgtataataggttccagtttcatcgacctcattagaactgattcaaatgtattctttttaatggctgagtaatactccattgtgtatatgtaccacagagacacgtgtaccccaatgttcatcacagcactgtttataatagctaggacatggaagcaacctagatgcccatcagcagatgaatggataggtaggctattttttatttgccatcttattttgatctttggctcaaactctactataccatccagacacgaaaatatacgcacctccagtaacctcgccaagacgctccctgcaaatcctcttggcatctgtatgttggatcaaggtttttccccaactttgagtttcagaaatgctgaaagtaatctaaagtgtttgtataaaagggcaaaaaaaaaaatggtgatagcacaagagctaattaaagttcaacctaaaattagatgggttcccttgattaattgcatagcaactgcctgatgagtggaagggtgaaggaagacatccatagtctatactagtctagatgcagtaactttaagaat

SEQ ID NO: 34403 - DNA, 1337 bp, Bovine  19866880424916
  misc_feature (1)..(1): n is a, c, g, or t
ncccaacctgggatcaaaccggagtctcctgcattgcaggcagattctataccatctgagccagcagggaagcccctatacatatacataatatgccctgttttttggatttccatcccattcagctctttaccacagagcattgagaccacacagttttgaatgtcttaaaaatgcaggtttcgcttgtggctcagatgattaaagaatctgcctgcattgcaggagtccaggttcggtcgctggatcgggaagatctggagaaggaaatggcaacccactccagtattcttgcctgggaaatccccatggacggaggagcctggcaggttatagttcatggggtcgaaaagggtcagacatgacttagcaactaaacaagaacagcaacaaaatgcaggtcatcctgtatttgtccttctgtagcaagtagagagtcccagggacgggggagcctggtgggctgccgtctgtggggtcgcacagagtcatctatggggtcacacagagttggacacaacttcgcagcagcagcagcaagtagagaataagagagtctttgtgagcctgttatcctgaggagttttgtgatgtgcttggttttaatgcaaataaccagggacaataggagcaactcagaaaaagcaaagaattggaaatctactcaactcacttccatttcatgctgagacagattctctgctcttgtagagaactttctctcttgcctgaagaaattgggagtggctgtttgaggcacgtttcttagattcttctttcttttttaggatctaggttttgaaatagggctgatgcataaaaagcatgactccaaatctttagctgactgtaaatacctccctacgagcaaagattcctccgcagtggttcatgctgttaaaaatggtatgcacgtgtccgatcatatttttggcatatatttattattagaatgtgttggctgactttccctgtggtgatatttaagtcaagtagcattcacttattttatttacttatttttaaatttccagaataattcttattgtactcaggatatttacacagttctgtttagaattttggcagataaggagatgagaaaagtacacatggagaatttgaaacgtcaggagcagctgagagtgaaaagggaaggccaagggccggccgggaaggatgggcttgacttgctaacagggttgggtatttgcacatactggttttctgtgcgtgtggatgctcagactttgtctgactctttgcgaccctatggactatagcccaccaggctcctctgtccatgggattctccacgcaagaataccggagtgggt

SEQ ID NO: 34404 - DNA, 2513 bp, Bovine  19866880472574
  misc_feature (1)..(1): n is a, c, g, or t
ntggtgctgtggcaagaacacgcctgccatgcaggagacataagagactctggtttgatccctgggtcacgaagatcccctggaagagagcatggcaacccactccagtattcttgcctggagcatcccttggacagaggagcctggtgggctacattccaaagggttgcaaagagtcagacactactgaagtgtgaatattcacaaccctgaatattcattggaaggactgatgctgaagctgaagctccaatactttggccacctgatgtgaagagccgactcgtgggaaaagaccctgatgctgggaaagattgagggcaggagaagaaggggatgacagagatgattgtatggcatcaccgactcaatggactcgagattgagcaaactctgggagatggtggaggacagggaaacctggtgtgctgcagtccacggggtcgcaaagagtgggacacaactgagtgactgaacaataactgtgttgggcattgagaatagaaagataaatgtgaccttgttcctgtcctgtagggagtttctgtttcgcagagaaacagactgagacagttggaatcacagagtcatgatccaagtgtgataatattccatagacgaggagtgagtgtagtgaggggccagaagggggaagtcggagcagtgcatctggagaccaccatgagcccgtgggagctttaaactgggatgtgacatactcggtggatattttgggatgagattcagcaacttagtaatgtgatgtgatgggacctaaactagggcagaggctgtgggaatagactggaaagagcacatctgagagaggtttcagaggcagaggccgtgatcctgcagacaggatgcaggaaggattgaaggaagaagaagagagtccaggaaaatcagagggctttgggtttgcatgagaggttgatggcgatgatattattagataagaaagaaaaggggggagaatttcagaaaaaaaaaagattgacatttctttgcaacagagttttgggtgatggtgatccttgcgtagtaagaaataaaagatttgaagagtgtcatcaactgtataatacattttattcaaggccttaggcctggaagaaattaccaaagaacaagtaagtcttgttcagtgaggacaagcgggggaaagaccctaaaacaaaaattatgggtagtgccactttttcttggccttcttggctaagatgaagtgtagtacaggggcttccctggaggctcagtggtaaagaatctgcctgctaatgcaggagatacgagagacacaggttcaatccctgggtgaggaagatcccctggagaagggcatggcaacccactccagtattcttgcctggagaatcccatgggcagaggagccttggtggactacagtccatggggttgcaaagaatcagacacgactgaaccacagagtgtgcgcacacgtgtgcgcatgcacacacacacacacacacacacacacacaccactttttaagggaggggttggcagaagaggaccagaggccgatgaagaaaagcatccagagaagaaaagactagccagaaacagtcatggctgataaataatgatgatgagatgcagtgactctggttcaccagcagtaccaaatggggcagaggagcctctcagatgggaacagagaagagtgggttgaacttcataggcaggtcctgtcgtgacagtaagagctcagaaaggagtgaagactgggcaggtggcagccaggtgagaaatgggctacagaggcttctcctcctgcccctcagccctgaccccggctctgcagaaacaagctcagagaacgtcctaccctgccctcactttttacaaccatgtttataggctgagcagaaagggtgagaaggaattactggtgacacaaaggctccaaagaagttgaaagaagcgaatccaaagcccagagaaagataagcattcagaaagtgccggccctctctcatccttgtgctgaggagactcttcctgtaaaacccccgccctcagcatcacagtgtgtggtccttcagcagagcgtgtggtccgtgtgagatgcaggatgaacacgtggaagatggtttagtcggggtccctggtcctctggtctgtcggttgactgggtccactaggtggggtgagttcccatgaccaccgcatgaccatcagagggagggagaatttggggaaagcaactgcatttacagtcgcccatgatgttctccccatctcccctgcccagtccctctcaatgaacaaggaagagaggtccagcatattgaaagctcacatgccttgcacaggacccctcccttggttctttgccacgtaatttccttttgctgctgattataccggtagtctggtgggtttgagctctttgggaaaggctttactgtttaagatgattgccctctggtggcctgatggatcctgtcttcagaaaattttttaaaaattattgagtatctgccata

SEQ ID NO: 34405 - DNA, 1153 bp, Bovine  19866880535371
  misc_feature (1)..(1): n is a, c, g, or t
naatctgttacatatacattgcttctgttttatgttttttttttttttttttggccctgaggattgtgggatctcagctccccagccaggctcgaaatctgcagccctttcattgcaagatgaagtcaaaactcctggaccagcagggaagtcccctgtctggttcaagtgttccaagaaacaggggtcaggcattccttagaggaaatgtaacgttattgtccttaccactttgtgtaactgaaattctaatgtacaaaggacagcaaagagccaaattaaagaaataaagggacaacgggcatcggacaggagggagaacaagaatcaatcacagtgaatgacactatttctccatggaccgtccctggggcattccatggcctcatctttgctgctttcagtagtgccctgccttgacggcagttagaaactaatactgggaatgtttctctgtggagagtctctcctgaacctttttgaaggagacccattacgcaaccacaatttaaacatgcttgctccttggaaggaaagctaagacaaacctaatcaacatgttaaaaagcagagacatccctttgccgacaaaggtccatctagtcaaagttatggtttttccagtagtcacatatagatgtcagaattggaccataaagaaggctgagcactgaagaattgatgcttttgaatgatagatctggagaagactcttgagagtcccttggactgcaaggagatcaaaccagtcaatcctaaaggaaatcaaccttgaatattcactggaagggccgattctgaagctgaagctccaatgctttcgccatctgatgagaagagctgactcactagaaaagaccctgatgctggaaaagattgaagacagaaggaaaagggggtgacagaaggttaaacggcagcattaccgactcaacggacgtcagtttgagcaaactccaggagacagtgaaggatagggaagcctagcgtgctgtagtccatagggtggcaaagagtcagacacgacttagcgaccgagcaacaacaataacgctcaaccacaatcactgctgtaacgttcccacggggttgagcacatccagttcctaagcgaggggtacggcccgaagagactgggcctgggtgtacagga

SEQ ID NO: 34406 - DNA, 1367 bp, Bovine  19866880616293
  misc_feature (1)..(1): n is a, c, g, or t
ntttcactttcatgcattggagaagtagcaaccccactcccagtgtcttgcctggagaatcccaagggacgggggagcctggtgggctgccgtctctggggtcacacagaagtcggacacgactgaagtgacttagcagcagcagaagagtcatgggatatcactgtttttcacttgcttgaagttggtagttttaatggatcagtgaatagtattcaggagtcacaaatacttaagctgagtatatcaagatctactagcctctcttctgtacatttatatttgaaagatcaaagggagaaaaggcttgttttcttaaaaatcattagtcttacaatcccccaggcaggtaaatggtgtgaaggggtttctttatgaaatgttttgttactccacaggaatcctgttgtatatgtaaggacagagatttatatgaaacattctcctgcaggaaaaatcctaggtttgtgtcttttaataaaatgtcactgaattttcttatctgcaagagatgtaggtaaatttgaatgcagaagctactgtggcagtcaggagatggagaagttagagatgctacttctataagtggaaaaaaatgaggataaactgacttttttcttctgtagagtaaaaaattagagctgaaaaggaacgaagcctcaaatgaatgccagggaccattttttaaaggggaaatgaatcaggaattgggaaggatttcattcacacctgcgccatgcctctttggaagctaattaccatttcttttggtagtcatggagtaaatacagccttgaaaagaggcatcatggaatacagtttatgtttcttgaaaagataaagaaggcttctcttgccatcatcccagtgcatgtagcaaaagtccttataccagttttgaggatttagagtttgtaggattccaaacttttttaagctgaagcagaacacagttaacaaggtaaatttaatatagagaaaaggcccagtttagccaaagctgagcataagcgttttgtgtcactttctgtttgtgatcacaggtgatgctgttccttccagtcactgaatgattgctgattttaggtcatacaaaattaatctatcagaagagaagggagcattggaaaatagtcatctttagtgagttggcaaggataatgtgcaattttaaatggcgggggtcatccaggaaagcaaagaattgagtataagaaaaagaaaaaccaaagcactgtaaaaatcatgcaaatctaatactaaagaatgtttcggcacttgggtttaagattgggagatgtacattatagaattattaaactaatgacataaagtaagaaggaccatattaagaagctttgatttta

SEQ ID NO: 34407 - DNA, 2010 bp, Bovine  19866880634014
  misc_feature (1)..(1): n is a, c, g, or t
nccgctcgtaaggactgctggtggccccaagtagtgtgagaccatcgtgagcctttgatggatatcattgctctgggatagtatggaatgaaaagcacttgttggtcttcgatcaaatggaaaattttaactaacccctaacctcaaaaaaatctttagggacttccgctggcaattcagcggttaagatttcatgcttccacacagcaggcatggattctatccctaatcagggaactaagttcccacatgacacatggcatgggcaaaaaaaaaggtgcctttgtgagtctgatgtctgctgtgccgtgcttagtcgctcagtcgtgtccgactctttgcgaccccagggactgtagtccaccagactccactgtccatggggattctccaggccaggatactggagtgggttgccattcccatctccaggggaatcttcccaacccaggcatcaaacccaggtctcccacattgcaggcggattctttaccacctgagccaccagggaagccatggtaggtttatgtaaaatcacacaaaagaatggtacttggagaatgaggcagctttcataagttggcaccctgaatttggagaaggatgctcttattcttcagtataggaatcacatacttttacatcatttgcttctctcaccagcagatcttaaatgattatcaggtttattttagatcatttggttcagaaagaaaactgcattaaatgtatctcttgttcctttagaaatgtcagcagtgaaatgtgacttttatctgtcagtgaataatagcttataggaaggatgacattcaaataacagtgaagggctccaagtgacctcctcctggtttatattaatcactccagcagatgggctgggagggtggctgtaaacattctccacctttaagtcaggtgtgagtatgatggggagagaatcactcaatcacttaagtaacatttttaaggcataaaagggagtattcagcaagtttctgcgtcatggggcagttttctgtggccatgtagagttacacactggtgtgcttttctgctctaagacattgcagctaaagtcagaatatctgtatcctcagaagtgagatccacagagcagaggccgaatataatcgctgtgccacatacagcgttttgtgtcagggagttgagcatccagtttttggttgtcctcggaggtcctggaaccatcccctccagactccatgggatgactgtgaggcttgacttaggccccaggcctctgtctcctaacccagagctcctgaacatgagatgtgttatagggaccttgtcctggacatacaaagtgatgtttctagcatgagtatatgattttaataataagcaaaagcataaatagaatcaaaagttattattacagatgcctgggatcacctcccccttgaccttctctgccttcagctcactgtagcgtctcagtccttccttccctttcaccaagccctgatgtgactgttggggtgacatactccccaaatttcttgacttaaaaggctatattgcattgatgttgttagaaatcctgattctgactgcagaaggagataacaaatatgaatgaggtgagataaagaatcctataatgctttatctgaatatatctgtccatggaattctccaggccagaatactagagtgggtagcctttcccttctccaggggatcatcccaacttagggatcaaacccaggtctcctgcattgcaggtggattctttaccagctgagccataagggaagcccaagaatactggagtgggtagcctatcccttctccagcggatcttcccaacccaggaatcgaaccagggtctcctgcattgcaggcagattctttaccaactgagctatcaggaagcccaacaacatgaagtcataatttataactcttgattcttggctccagccgctgaaggggctaagaagccgtgatatccaacagtactgagcacactgagtgcctaca

SEQ ID NO: 34408 - DNA, 1427 bp, Bovine  19866880652643
  misc_feature (1)..(1): n is a, c, g, or t
ntatttgtttgtttggctgtgctggggtgtcagttgctgcatgaggatttttgatctttgttggggtatgtgggatccttagtggcggcttgtgaactccactagttttcatcacaggatcgctgtatgaggtaggatgtgggatctagtttcctgaccaaggattgaacccaggcctggagcaagagagtgcgggagtgcagagtctgagcctctggaccaccagggaagaccccctatgatgtacttcccctgggaagtgtacaaaaatgaaatggaaatattaacatccagttaacctaagtagaaaaattggaaggaggttctaacttttgaataagtgcaggagcaccatttttctggatgtcaaaactcaatatggtaaagatgccaattattcccttgtgtgctcagtcgctcagtcatgtccaactctgtgaccctttggactgtagcccaggctcctccgtccatggaatttcccaggcaagaatactggagcgggttaccatttccttcttcaggggatcttcttgacccagggatcaaacctgcgtcttctgcattgcaggcagattctctacctggtgagccatctgggaagccagttattcccttagctgaatgcaattccaataagaatctgacttttctttttaatatatcaacattactctaggggtctactcaagaaacatgaaaacacatttgcacataaaacttggacatgaatgttcatggcagcattattcataacagctcaaaagtggaaacgtctcacacacgcatcaagttgtaaacgggcaaccaaagtgtggtgcatccataccatgaaataccactcagcaataaagaggaaatatacatgctgcaacagggatgagctcaaaattgttatgttcagtggaagaaaccacgtgtaaaagatcatacagtggacactatcactatgtttaatattaaaagtctggaaaagcaaatctatagagattgaaaataaatttgtggttgcttcaccctgggaattgaggagtgattggaaataagtacaaaatttctttgagggggttgggaatattccaaaatgagactgaggtgatggttgtacaactctgcaaataacactgaaaaccattgaactgaatacccaaaatagactgattttttattatgtaaattatgtatccataaagcaaaggtttttctgcgtttttctgtgtttatataagaatggagagagaggtatgcagagccaaagcacttttagggaaaaaagaaagctgtgacaggacattaattattttctttgggaaaagccttagaaggagaatttctggattaaaggatatacacaaagtgaataataacagtagttgaagaccatacatgcatattgataataaacaacccagggtcaaacttcacac

SEQ ID NO: 34409 - DNA, 3446 bp, Bovine  19866880703923
  misc_feature (1)..(1): n is a, c, g, or t
ntgctgggttatccttgctgtgtgggctcttgtctagttgcggggagcgggggctactctctagctgcagtgcatgggcttcttgtggtggcttctcataggctctggggcccccgggcttcagtagttgtggttaccagcttctagagcacaggttcaatggttgtgctgcatgggctcggtgcatttgctctgtggtaagtggggtcttccggcaccagggatcgaaattgtgtctcctgcattggcaggaggattctttaacactgagccaccagggaagccccaagagtgctttcttactctgttctgaaaggtaaaaagtgctctgtgcaccagaggtttaatagccaacttgcaattcaatgaatctgattttgtaagaaaaaaagtcaattcacacagtgtgtatcaacaagggatgctgtagacatgctatgggggtagagttgggattaggtgaacttgaccatcccatggaactggagggtctgtggttctacaaatccagtgaacaactaagtaggtggtatcagtgaatggtgataatttgttattttgtagacacaaatctgacaactttactgtgtgtgaacagaggagttgagggtattaaaaagttatttaaatagcaaggaatggactggccatctgaaatagacaccctataaaaatagggaaagccactaaagataataaagggagtgataagacaggtaactataagacagttgaaggaaaacccttcaaatttagtcagaagatctttaggatttatcaaggcatctgacggcaacaaacttgaaggatagaaagaattttgctgccatattctttctaaccacctttttcagtaaggtgattccaatcaccctacttccttaggacaaaaccaaagtgatttccacccacctgaaaaatgtatggtgttctacacatactttccataaacgcttggcggctcgatggtttggcagcttaaacccgatggtgctttcaaattgttcaaactaaattaaaaaaaaatgttggagagcagagtgaagtttggagtcataaataacatgaaagcaaatgacatacaaaataaaaataccacccataaatttttctctactccctacatcaattgctatataccgatttcatgctacacacattcattcattaaaaaaaaacttcttatatcaatctcaaaacactgcaggtacagacaaccacattacgcatgtagtaaatgttgcatgtacaaggattaatcttatgaaaactaaacgcagaaaaggacagaatctgtattccttccagagaccaatttgtcctgatcttttaaacctaatgttcatggtttctctctgacatcatgacatcagctggaacacagaaatgaataaaacatttagagtctacagcagcctcaggatgacattctctccttgtatctggtctacaaatatgcatatattctatgtatccgatgacttggtatcagatattgctgattttatttgttcattggaaggactgatgctgaagctgaagctccaatactctggctacctgatgcgaggagatgactcattggaaaggatcctgatgctgggaaagattgagggcaggaggagcagggggtgacagaggctgagatggttggatggtatcaccgactcaatggacatgagtttgagcaagctctgggagacagtgaaggaaaggaaagcctggcatgtggcagttcatgaggtctcagagtcggcacaactgagcaactgacagcaacagcaagctggacataataaagaactgcgtctatcacttcattgactgagataatacattcttgacaagctggatctaacccctgccaacctctccaagctcattctacctttattctcaacattctggctgtacagtcattcagttccggcacacatcatgtccttgtctcagaatttttggtttgcagttatctctacctggacagcccttaccatttttctggatatggttaatccatacttattcttcagttctttgcttaaatgtaatttccttagtttttttcctgaccctactcattatctaaactaccttcccttttatatttctcactcatagcctttatatgtcagactttatatttactcaaataattatttgctcagggtctattttctctgaccacaaattctgcatataagaacagcagtgtgtttattttgtttaccattatacactgagagccttgcagagaacctgacctataatagttacttaataaatatttgtttaatgaatatgttaagtgcctagcacatagtatgtgtttcattgatattagtttccttctctcctgactcaaaaccatcagctcactggtttatatgatggtaaatgcatcttagtttagcctctctcttgttcttccattttataattctagtccataagtggggcactacttgtgaattagtaccatgtctctttaatcactgtggaaaaattttaagcttcttcaaatacagtttttttaaaaatttaactttacttatcagcttggcctgaaataaatagtgctaccctcaaatggaaaatcatagagagcgtagctaatcttctcatagaaatcaaaatgactgaacccaggccttacatcttttatgttctttcttccaactgtgttcacttaacagaaactacacgacaattccattttgtgtgttttgttctaatttagatcattttgttcttcagaaagctagtagagcacttatgtctttcacatatctttctgtgtcaggatctctgagtaggtttgccacctactggatgcgtgacctggggtaagttacttaaccacttctagactgagcttcctcctctgttaaatgggcatgatggtaggactcatctcaaaggttgttgttattgttcagcttcactcagtcatgtctgactctttgcgaccccatggactgcagcataccaggctgtagtcctttactctctcccagaacttgctcaaactcatgtccattgagtcggtgatgccatccaaccatctcatcctctgtagccctcttctccccctaccctcaatctttcccagaatcagggtctttccccatgagtttgctctttgcaccaggtggccaaagtgttggagcttcaacttcagcatcagaccttccaatgaatattcagggttgatttcctttgggactgactggtttgatccccttgccatccaagggactcttaagagtcttttccagcaccacaattcaaaagcatcaattcttctttatgaaggttaaatgacataatttgtgctatgcatggtatatagtttctggcagagttcagtaaatgatagctaatgcttttggttctgttccacagttgtccatcaactcttttagtagtgtactgaacataagtta

SEQ ID NO: 34410 - DNA, 1079 bp, Bovine  19866880719459
  misc_feature (1)..(1): n is a, c, g, or t
naatcttaaagacaaatatgcttaatgtccaagatgtgaaatgttgctactatgcaaacaaaaagtagtttagctaaattgctgacgattaatccatctcagactccaaggccaagttgaaagagctttaaagtcttacatggaaacatgatagatactgtgtatcaccataaattaagctgatggatttttttcccccagatgattgccttttttccagacaagaatactggagtgggttgccatttactactccatgtgatcttcccaacccaggaatcgaatcctcatctcttgcatctcctgcaatggcaccccactgaactgatcacacccactcatcatttactgaacagttacaacaagcaacattttaaagtgtacccgttttaatggtggcaattgaagaacttttttggtaacttgtttttctgttttgttcttcacagaaacgctccagaggccaagtgctgtttgataaagtctgtgaacatctgaatttgctagagaaagactattttgggcttacatatcgagatgctgaaaaccagaaggtgagtggttcaaagctatagagaatcttctggcttcagctgcccttcactgcaagaaagtgaactgacactgaatcggtagatcgtcttctccacctacccctcgcacccctacacctcacatgtactgtctgaggccctaaatgctgtttatcaccttatttcttcatgagggaaattatcgacaacttccttcaatcttgagtcttttggaaacagtaagtcagtgtttctgctcttcatgcttgagttctttatgcttccagaaaagcattttatatagtgttttggggagggtatgataataccgtcagtggatttgagccactgagaatcaaatacattgatacacgggaaacatgtccactggatgccatcttactgttaattcatctcattatgctttcatattctggctgcgtcacaatatgagaggggtcttgtcttaggtatccagtctgcctctgtagactctcacagctgatgcagccctcgttaggccttttcctcacttatcctctcaac

SEQ ID NO: 34411 - DNA, 1620 bp, Bovine  19866880739118
  misc_feature (1)..(1): n is a, c, g, or t
ncatgtgggatcctcccagaccgggatcaaacctgtgtctactgcgtcggcaggcgaactgttttaccactgagccaccagggaagccctctcttttgcttggaagagattttttttttttccatgcccttaggtcatacaaatagtaacagaattgaacttcaaacctaggttgataaattctaaagcccatactgttttcattgtctgaaagaaaatgcaacattcagccaaagggtatgtttgtccaatgcaactggtgaaaggagtggaagaaactacaggaactacagacatcaaatgaaaattagaggattgtggtattttaacagaactaaactaaaggttacatttgcttgtccatcccagcaacaaggtccttttgtccattgtcagacacatcgcctctacttcctaatttcatttgttttatttggtttgttgaagggagtacagagaaggcggtgtggtcagggagtcaggattctagcatcctcagtgctgcttggtacctttatcatcttagatgagtcatttagcttcccagcctcagttattccatttctaaaatatcagctctaccaacccaatgccctcccaatagcatgctgtacatacaggggacccacgagaaatatacatgtgaatgttaatttcatagcactgtacagaaatcatagtgaccacctcaactaaaggctatggagatgaatatttgtttttctaagaccagaaagtgtggcagaaaaaaaaaaaaagacttgagatgcatgacagattttaaagatcatttggattccaggtctgtctggctgctgtggtgactataatgattctgggtatactcgattactgtcctttgtactcggcaggggaataaatctttttatgattctcaattgcatttaacaccttgacgataaaaatgagaaattttgcatgaagcgttgatttactcatgattagagctatagcagttcagaccaagttactgaatttgacggctgaagaaatataagcatccaacagtgggttgttccaagagaaaaccactgtgctgctttcagaaacgtttggcgagagatttgtgtggggacaaaataatagcaaaggccaaaaatgaacaaatgacaaactggttatccatggatgctctatggagtcatagaagctgaaagagagatttctggctgtgatttcagggtcataattccttcttgggactgcatgcaaattaaggaagagttggcatgatgtggccatatcaaggaatttatgagtcagcataaataaataaaaatgctgactaggagactaagtaattgcctctatttcctgtctaactgcctattcttaaagttatatgagaatcataaataatgaaatctgaacagtaggaatgcatgcccacgagctggaagttcaaaataaagtcagccttctgcatgaagatttttaaagataagttatcagatataacccattccatggacttttatctattaaagaagatatcataagctccctcttgtcagcagataaaaatgaaagaattatttttagcttaaatctcaggcactaaaatattttcagcttccggagaccggcaggatgttgtaa

SEQ ID NO: 34412 - DNA, 1136 bp, Bovine  19866880804451
  misc_feature (1)..(1): n is a, c, g, or t
nctcctgttctggcgtcttttcccccatcctaaaatcgctcaggatcgctgagctaattagaagtggccagcgagcatttagtcaataagcagcttggctcagcagacagttagtgcaatgccagatcaataggaactgaaattatttcttcatttccttctatggccagtagacattcatgaaggacagaatgtcagccttcagtcaaggaagcctgaaatgtttcatttattctgactcgagacatggagagggagcaaccgtaaaccgttccaaggtccttacggatgtgatgtcagattttcattttcaaatggaataggctcagaggaggtttggcaaaaaaaaaaaaaaagggctcagctttctcaaccaaagtccttttgtttttttccttttcctggagggagccttaaaaatgagaaccgtgctgccatttagaactattagctgaatacgcagcttttaggaaatgataggtagttatctttcatcatcttacatactcaaagaaaaatgaaaagaatattagaaaacaggaggaaacattttggaggaaagatattaacaacgatattaacatttttcttcatgtgaccttctgataattcatatggatggctatttggtttcaagttcaggactgaatcaggatgaaatgaaactcttttcagtacagtgtgacctacaagaagcctttcagccccgctgttcaccaccacctggctgcaagggcttctagcctcgagaaagcgacagagcagtactaaatggagaataatccacttcctaaaactaataactcctccagccagttggggatccaggtagatggatgatggctgtcttgacttttgagaagtgagggggcctagctttatagagtattggatttctttcatttctatgattaacctcaaactgatcaccgaagccaatgtctggccctcatgggccaagagctctgtttctgaaagtcacttgtagaaagatgtctctacctcaggagcggttcatgctctacttattttcttggaacctcctgcctcctggccgcctggcaacatctcccgagggagaagcaatctggaaccagagagcggtttattttttttgttatttttttttaaaggaa

SEQ ID NO: 34413 - DNA, 1797 bp, Bovine  19866880829295
  misc_feature (1)..(1): n is a, c, g, or t
naactctcctggtttgtctgagaaaatatctgggccctgaaacaagttattaccctcagttgctttggaagatgcatcagattcactctatccaaatttataattggaaaatggcaggagattaattatggaaatgcttttcaatttcaatagtcaattaacaggcaactgtatgaagaccacaataattacattgttctataagcattgctccagaagtcttattttagtttacttagacttgtagaagagaatctgattagcactatttgtttaatgaatttgacattcaaggggtgcatgaatttcctttggatattggattataaattaatgcttatcaaattaacattgattttctttatctaggtccctcatcatagggacatttttctgcatgaatacctgccatagttgtcattatgttcaggtggaagatttcagaaggaatgtgaattcccgtggaccctattaaacctattttcttgatatcaatgggacctataggtcttatagatctttccttttcccttcaatgtggatattgtttttctctgttctgaccaacagggaatatttagtgcaggctcctggacatgttcaatttcagtaaaccttaggacttatttcgatattataattgtatgctctcagaaacacagatgctaagtgcatagttggataagttaggacagatgtacaagcaatgttgaatcaagacataacattcccatcattttacaacagtatcttgataagcgctctccctctacacagacctattgtcgcctaaactgccagggaatttgcagttattttgcttccttcttcttagaagtgtggaagaatgggaaagatagagactattatgggattatccttgaggaaatcaaccctgaatattcactggaaggactgatgctgaagctccaatactttggccacctgatgtgaagagccaactcactggaaaagaccctgatgctggtaaagattgagggcaggaggaaaaggaggcagaggatgagatggttggagggcatcaccgactcaatggacatgagtttgagcaaactccgggagatggtgaaggacggggaagccctcctttgaacatggtgtgttgcagtccatggggtggcaaagagtcagacatgacttatcggctgaataacaattgtgggttggtactcatcagtaccctcccttcttttagactttggtggagcactgactcaggaatgtaagacctaggtctcacctcttagctctttccctacttagagtcattcaggatgtctgaattttagtttccttatttgtaagccaaggatgctaaaacctatctcataaagttgttgtaaagataaaaatatgtaagcacctgacatgggacttcccaggtagtccagtggctgggactctgcgttcccaatgcagggggcccgagtttgatccctaaccagggaactagaccccacacgccacaaccaagaccccgtgcagccaaatcaatactgttttaaagcacctgacattaggaacacactcggctgatatgccgttcatccttctctggttaaaatcctgggcgctaggcattttctcaccccttcccccactccaaacaaccagtcaaaaaagtatactctagtcttttagggtaatgcatttgaaggaggtacttttctaatcagaaacactaatcattgctgatgtattaataaacttgaataacttagagcgattcccattccaagtaatatgtttgcattttaatttaagcctttaagaagt

SEQ ID NO: 34414 - DNA, 1759 bp, Bovine  19866880940604
  misc_feature (1)..(1): n is a, c, g, or t
naagtatgtactgtcttccccggggctcagcagtaaaaaatccacctgaaatgcaggagacgtgtttgatccctgggttgggaagatcctctgggggagggcatggcaacccattccagtatttttgcctgggaaaccccatggacagaggagtctggtgggctacagttcatgaagtcaaaaacagttgtctaagactgagcacagaacacagaagttatgtacgagggaaaaagaaaaatgtatcaaatataggtttctgggtacaaaataataaaattctaatgacagatcttgggaaattccacgagtcttcatttaagtgagaaagtgatcaggttgctttaatatctgaccacttagcttttctcccaaacggccaaactcatgctgaactcaacgagtttagtatttcatgtcttgttttcacaactgctttatgtaaaaaaacccgcattaggaaaataacaacagaccagttatctagacatgctcagcagctggaaattttgttgaaatgtaattgactccccattcttctgtcaacagatgtaaagcaggaagacagtgtacaaaaatcattggctaaagattacgaagagcctcaaagaatccaaataataaaactcctcctataacataaggatctttccaccatgcttttgtcccagtctttctcagtcccacagaaaggaataaaaaatgtagtgtccaccactgtgggtgccccagttacaatttttgcaatgaaagatcatgaactgtgtcataaaatagaggccttaattatagtcatttaacacattgtaactcaccagtgatttttgcattcagtgtgtttcaaacagctgagctttaagtatgtggagatttgttcaccacttccttattatccatgggtctctgcagctgtgcggcctcctaactatggttttcctaccgagtttaatgactccttggaaggaagatggaaccaaggaaaccgcagtgaaggaaaacacccaactggagagaaagttaacccaggtgtgaaagtgggtgggactgtgaataacgatgaaagaaagcaggcatcgagcctcatggaaggtggggtccagcctggctgaacgtcctgtgagctcttgtctcttattttgggctcctggagtgtatgcaggttggggaactcagagggtactttccacagataaaccccgcccacccccagcaggggtgtgaattgcagggtgagacaaccctctcgcctcctctcggacttaacttgatcatccccgtgttgaggccactccactagcagcagtgggacagggaagcccattgtcccccagaggagaacaatgttacccaagagggacataagctcttcctgaatttccctctattttttttctttttaaaaaatatttatttattttggctgtgccgggtctcagttctggcctgtggggtctttgatcttgtcgaggcatgagatctcagttgcagcatgtgtgatctaattctctgatcaggaattgaacctgggctccgtgcaacgggagttggcatcttagccactggaccaccagggaagccctccctctttttctgaaatatatttccctccttgttacagaaatgaagaaagttctctcggccatttaaaaatagataagcaaaaaaggaggagaaggagaaaaggagagaaggaagagaaggagaaaaagagagaaaaggtacgagaaattgcattaatgccacacttcagacaaaagca

SEQ ID NO: 34415 - DNA, 980 bp, Bovine  19866880969820
  misc_feature (1)..(1): n is a, c, g, or t
ngagcgcacacattatgtctgttcacagtgttgggctaaggccctggcgatgctatttcctggggcaggagtccgctgccagttcacatcagaacacgcagagagcacgacggggcgatgacctttctgactctccaagattcttccttcctctcctcccctcccttttctcctcccactggctgacaaaattacacccacatcttcagctgaaactccaaaggagcacagacagtttagcaaagaggttcttgtccaagaatcactgaccctccaatatcagaaatttccaagacagaaaagaacaggccttttcagtaggaactagaatggtctgtagcatttcctaggcgctagaataagcaatccattcgatgtcctcataataagaagtgcccttctctcactcccctcagatatgaattattaaagtctcttattgttcctctgtaagtcctgtgtataatgcagaactcatctggataaaaaggggagaaagaagctggaagcagcaaaaacaataataataatgcatctggagcttacaactcccaccaacagtaaaatcatttcttgcactttcatatgaaaatgcttttccccatttcatttccatcttgggcacaaggtaattacccttcagagacacctcgggagcggctatgagaatgtctgataatttttagtgtatttgcctctacatattctttcccatgctttctcatgcacacctgccatgaatccttagccgaggatgacttcatcaaatattaaatacaattttccgccttcaccaaatgttggtcctacacaaaaccctcaaatgccccgggcgtccaggagggcagcctgactctttctgagccacaaaggactccttgggaaagtcaccctgtcggtgttctgccggtccccctgtgaggtttgcctgcagcctgtccaatctgaacaattgctacaatagcatctctaataagggt

SEQ ID NO: 34416 - DNA, 1307 bp, Bovine  19866881018251
  misc_feature (1)..(1): n is a, c, g, or t
ntgacaagattttccttgaaaatcaatattttaaattcctgcaatgctagcctcagctacccataactggagaacctgtttcatcagactggtacactaattactgtgtttgtctactggtcttgaaaactaactaattgacttttaataatatcaagcataaacaacctactacattattaaaacatgacctgctagcctttgtaggacatggattcaagatcttgaatttaaaagcaaaaatcaaatagtcaactgccaaaggatggcagaagaacatgaagcctgggtgctctgtagattaatcctaaaggtaaagtagaagcattgttgaaaattactgtttatttaatatttcatttggaagagatgctcccaaacgttcaattctactctgtatttaagtttaaaatatgcttgaaatgactgaggatggcactgaatcacagtagtagtgtcatagcaaaatatcttaggtttaccagctgaactgccccatgctttacatgtgttaaagtattagttccgaggcaaaatgaggcaatattatgtttaactgtttgtttggaaacttgttttattaaaaaaaagatttttttcatggtaatgctattttcagtacaggtgtgataatactccataaagtattgtgtacttgatatagtgaattgaggaaggtaacggtcccactcgatgctggcctctagtctccatgagataccctagtagcaaaatgtaaatacccttttcaaaaataaagaggcctttgtgtggtgggatgagcagacaggggtggggcagggaactgtgatctcttcaaactcatgcttttggctttgacttcactgagtaaaatcagttctcagagaactgagacaaacccttctatgctccccaaaagcacagaaggaagaaagcttgtcattcacgagcagctagggacaaaaccagcggcagagtacaggtcagggggattagagatttaaaaaaaaaaaaaaaagttggagtaaagtgcacagttactgtcaaaaatatattattttgatcctaagaaaattaagagaattttatctaaggaactagattgctgaccttttaatacatttggttttcagagaacatacaatcaccatcggacctataagactagtttgctttgaaaaaaaaattgcttggaattatctacaggaatctcgtgaacgcaattcaaggctaacattctgcagctctttgggtagtgggcgatttccgcggataaaccccctgcttcctgcgggcatttctcctatcttctctctctcttccta

SEQ ID NO: 34417 - DNA, 762 bp, Bovine  19866881053994
  misc_feature (1)..(1): n is a, c, g, or t
ncacaatacagtgatctcttcccccaattttcctgatcaattgccagttcatttcataattacagcattttccccatgaaagacaggttataattttcaagattatagctcgtctccttttcgttagcatttaaattgatgccttacttcttccggccatagtcttggctctgcgggaagtctagggagaatgctactggcatcaaccacacaatgagaaaagtcttttcaaagttagttcacaacctgggaaaatgtctacatggtggatcatctcttgaatgtgataccactttttttgttgttgttaccttcaatgtcagaggcaggtgtctttgaccttgtcccttcttggacagcagagctcaagtcttgtagaatagcaggttcttagggtcagaggacagtgtaaactctagttcagtcctgcactcacattccaacaaagtgcagaggtaggttctggaagcttggaggacagtgattttaaagtccttgtcttagggacacagtaaaatagtcacagaaaaccagcttgcacacaatttcgtggtgtccgtccacataccagctgatctggtcttagagggaagtgcacacagtcaggcagcagttagtgtcaggaattgactgccatgtatgccttacagtccagcgtccaactggcacaggaagagagctgaatatgaggatcgtagtttgaaaacccagagaaggcaatggcaccccactccagtactcttgcctgggagatcccatgga

SEQ ID NO: 34418 - DNA, 1820 bp, Bovine  19866881065798
  misc_feature (1)..(1): n is a, c, g, or t
nctttcttggcatgactttggggcctggtgggtttttttttttttaaagagggaatatttctcacaccatatgcttccaacaagaaggtgggatttcctaggtccgagaatccatcagtgtaggcagggcacagctgcacccagaatattctgacatgccaaattacaggtctagaacattgatttcctacactatgttttaatcaccaagacacggaagagtcaaaatgtctcaaacacacaattttgaacaatcaagggaagggatgtgttctcttgcccacagggtttgagccagaaccactacagtgacggaccacggatgcatttttgctaacaccaaggagggtaattatcacaagtgtctaaggccaacatctgctggacaggacactgtgtttttcttctctctgcactgtgttccctggtgccccaggcaaacagctgtcatctacatgccggccttctgctaacactctgtaattcctcaggggcttcccagcctataattagactccccagctgcctcagtggaggctgctaggggagctgagagggctgtgctttatatcagcccctaaaatgtcctcttcaagacggagctgctggaagaacacggattggaatttggcctgggaggcaaacgggaattcttccaccactagctatgaacagatctaagagcagtgtctgctttcagatgcactgagccagtcacgtgggtggggacttgagactcagcatgaaaaatggggaagtgcaaaaccataggagagatcttccgattcaaagctgcagagagcatcagcactggagccgataccacagctcccacggccttttacataattttcctttccaggcaccatcgtccagatgaaccaacacagcacagcaaggaggaactaagagaaggcagatgaaaatcccatcctatttcaaaatcatccgggttccctgtctcagaaacgagagtattaagtcaaaaagtcaaagagggagcaagctttacattggactgaatctttgaaacaaaaagcagcccaattcttaagaaaatgagtaactttttccaaacacagaggaccacccaccaactctctgacctggtccaatattcataggaaacaaaggcacagaagcagattttcccaaaggagaagaacctgctgtcctggcagagggaagcctgtggctagggtcatcctcagactcctgaaaaccattatttccttgcctagagaaaggactgttataatggactgaaactcaagtgcccataaaaagtgagatgcccccaaagctgatagctggtacaggcagggtcctcagggcaacgagatgtccccgactaacaaacatattggatgctacagatgcctctggtctgtggaccacattggagccccacttatggggtggatattcacacagtctatggatgctctcctgggcaactgatacctggccacagctgagaactggacttgccaccagcttcttcaaattgaaagctcaagaccacagctaagaccaaaggttcagccacactgtgggcttctgaaatgccaaagacaaaattaagaggatgctttaaggagatacttaaagaatggacatgaggaccagcccttccatgcaatcaaggaccctgctgactaccaatgttctaggaagggcaggggactcctgttctcacttttatgaccggaagtcacgcggtcaaggaggcactaggaagtccgtgctggttcctgacactatcagctgcttcccacatgaatgtttctataaactgaggctctttctttccagtcccc

SEQ ID NO: 34419 - DNA, 1264 bp, Bovine  19866881068297
  misc_feature (1)..(1): n is a, c, g, or t
ntggtaggctgcagaccatggggtcgctagagtcggacatgactgagagacttcactttcacttttcattttcatgcattggagaaggaaatggcaaccccactcccagtgttattgcctgcagaatcccagggatgggggagcccggtgggctgctgtctatggggtcacacagagtcggacacgactgaagtaacttagcagcagcagcagcagcagcagactagatcacagattttaaattgtgggattctcgttggaatgtatcacagttctatcaagaacgttagcttctcataacctggtatgatatcccttgttggatttctagtgtggatgttttatctctagataaatggaatttgggtcttccttttgcttgtcctgccaagactcgtctcttttgttcgtgttgtctagtgactgtttcctgtggtttggttccaggatgtgtctacaaatggcaaatttaaatggccagattagatgctaattcatgaaaggttttgatcagtgggggtttcttctccatgacaaacaaggcatctttgctgcatcagaatgtgtatgtcctgtgtgacagacagctgtgtgtaactggtatgcacatttggggtcactttccaataagggtgaaagaaattccaatctcgaagtcatatttgcacttaggaatgcactttattcatcccacggctgcttgtaggcatgagtgatggtatgcggacgtacagtgagcacaaggaatttgttcttaggatggtgttcggaaggaataaagagacttgttatttcttatggaatgccatggtgacaacaaataaagtcactaaagagccgccacgttctttagggaagtgcccctagactggacttgtcaaacacacgggatgcttttcaaggattacctgaagcaaaatgcttcagttcatgtctccagttattcctttaaaaaaaaaaccactgtccaaaatatcatggtttgacaaccttccttaataataccaggtcaagaattcatcctcataggggaaaaaaaacccacccaaattctaaagataatttgtttcaaaaatacattttattttaagttagggtttctatgatgtgtactcagtcatgttcttaaggtattttacagacatacatgtaggctgcccacgtggctcagtggtaaagaatctgcctgccaatgcaggagactcggattcaatttctgggtggaaagatccccggagaaagaaaggcagcacactccagtatt

SEQ ID NO: 34420 - DNA, 960 bp, Bovine  19866881089937
  misc_feature (1)..(1): n is a, c, g, or t
ntggaactctgctcaatgttatgtggcagcctggatgggaggggagtttgggggaaaatgggttcttgtatatgtatggctgagtcccttcgctgttcacctgaaaccacaacattgttaatcagctataccccagtacaaaatgtttttgatgttaaaaaaaagatggagttggctgaatgaaaggatccttcccctataggcttgaacttggtggggaatctggtctaccctgggtagaccttccacaccaagacagactttgtcttcctcctcttgagcatccagaggatgctctcatggttctcttgggttaacattagaggaagctgggtgaaaggtttataggaacactttatatttttgatcacttctgcatatatattattatgtcaaaacaaaaagattctctgtgtaggtaattatttttctctggtttctttcaagactttttccttgttttagttttcagcattttaattatgatatttctggggatgcattttattaagattattttatttgggatttactgagcttcttgaatctgcaggtttatatatttctctaactgggagaatttttcagccattatttcttcacatttttttttcagcatcacattctttctcttctgagattctaatggtagagacattggattaaaatttttttttctcttaggattataaggcttctcatttttaaaaatatttgttgccctcttgctcagactgaataatttctattgctctctcaagttaactgatttgccctttttcacctccaatctgctagttagccgactcagtgagatttttcatttcagttgtctatttcagtctaaaatttacgtttttttcttttagtcttctatttcttttctgagactttctagttttgtatttaagagtgttcctaattgtttgttggagaattttaataaaactgcttctaagt

SEQ ID NO: 34421 - DNA, 1645 bp, Bovine  19866881122385
  misc_feature (1)..(1): n is a, c, g, or t
nattgtgccaggtgtagtctgttcgcctggtaccacaggtaaacccaggcacacacaacaccacacacagtatgtgtgtatttaatttaattctcacaacagtctaacaagacagttattaccagtttgagaaaagtgatgtttagagattatgcaaatcatccaaagtcaccaatcaggaagccttcctggtctgccctcttcctctgactttttagatgtgcctgcctagtacccaaaaaaggtcattgtcattgtgcttagccatcacaaatttaaacattctgaaatgtatgtatatttctagaccgtgtgcttctgggaaccattccatttttatctgtgtgtgcctaatgcctaactcaatatttggcacaggatttagaactcattaaataaataattgcttacacaagggaaagccaggatttgaacccagatttttctaaccacaaagctcatgcctttccattgtatcacattgtgctacattctctctcctcgctgctccatctccccccacgcccctccataaattagggtttgcctttctctctcgattaccatctatcccataaaagctaagtcccaactgacaattattttcctctctctctgggaagactggcgattaaaccaaaaagcacagccacatctttttcaaaaccaaataaatgccttttggaaaaagccctcattgctttcagatgcagttgcagaacacatgtgagcatcaaaataaactttttgttagaaatattaactacattatggacagagacttaagattccatctgttcaatggggttttcacttaattagaatcttttgaaaccagagccacaaatcactgttcctattggccacacgtggaaatatctcgcttcaacagaaccctatgtccagtgacacctgctatgaccctgcagtttgtctacacagaactgcagaaggcagcacagataagctatggcctggacttgactcatcagcagtcagtcaaaactcctgccagttcacaggagctcaaaactcaggtgaaaatagcagttggacctggtgctggaatgaagacactgctgtctcctcccattctttgccaggtcctttttttttttttttttggccagggttttaaatgcctgcttttggaggcagaatcacagagacacagacctggattctggggacacagagggctaatatgcttggctgtgcatttgcaaactggaaccttggcaagtatgaagcatctgaatcctaaatctatttccttgtctgtgaaataagacagtgctgcgaagagtaaataaggaatgcatgtaaaacagtagtgccctttggccagacagtggtctggcaaagactcttcattcctcttaaaaggagataaaggatcacacatggaaataccatgtgtgtgtgcatgcttagtcgtgtctgactctctgcaaccccatggactgtagcccaccaggctcctctgtccatgggatttcccaggcaaggatactggaatggcttgccatttccttctccagatgagcttggactttgtaacaagttcaaggtgcattaagcaatatcactctccattttaaaaacatttcacagcagttatatctattctttctatatccttggt

SEQ ID NO: 34422 - DNA, 1274 bp, Bovine  19866881132515
  misc_feature (1)..(1): n is a, c, g, or t
ntcctacatatattttgaataaacaacaaggtacaataacttgaaatggttaaataatgcagtgagccactcatggcagtctctgtcttctggatatttattaaagaaaaatgattctctgttctgatggctccagacaactatttccccgagggccagaatgagccacatgactcttagaatcttctagcattgaaactagaaggaatttaagagatcagctaagctaacggctcaaaaactgtagaatgcacaaaatcatttggagaacatgtcagaactgatttctgagtcctgctcctatggttttgcttcagaaagtctgggaggggcctctcttctaactgagtagaaatacagcaacctatttctaaccagttccaagcaatgttgatgctgtcagtccatagaccacactttgagaaccaatgatctagtttttatttcctgctgtatacatgatggagatcttcagaagctgggtgtgacctacccaaagacgcactgccaagttggagacccaggttctaaccacactctgatgcccgggtcctctgattagtagaccacatctgggtcacagatgtggtgatatctgggtctccaaaacttgtagatgaccagcacaggcacaaaaaaatgtgtctgactagttggcaatgctagtttcacatgaaatgatagaggatatgaagagaaaataatttcttattctgctcattccaatcagaggatgaaaaagttttgttgattttttcccttcctctcaatgacagatttctgtggcagttttattgttgtggctaaaatgttcttttgaaacaaaaacattatgtcatgcttctgaaaatgcaatgagaagattcttttcatggggtcactttcatagggttctaataatgacatgtttttctataaatctttagctaagctttttctttttcaaattatttttaaggaatatattttccagctggaaatatcttttcccagacaccctccctataactaaataagaccatagataatagcaagatctacaagacttggctttgaccagcgtttcacctgtcttctcccactgtagactgccaggggtctagcttcagtctactttgttcctaacccctctccctgcccccaatgccatcagcctctcctcaagccagttttggttttcatgcattggtcttcatctttctaggatctttgatccacactctagatctgtcatataacctcttttctgacttgggacctgcgaattcatctcc

SEQ ID NO: 34423 - DNA, 1686 bp, Bovine  19866881203521
  misc_feature (1)..(1): n is a, c, g, or t
nctaggtgattatcagagaacagagtgactgggcacatgatccacacccagacttatgcagaacattgacaataactttattcatcatagccagaaactaaaacatcctcgaagtccatcaatgctattgagctacacaaattgtggcagatagaggtacaacgttggtaaatttcaacaatgtatggaacaacagaaaccagacaccacagagcacgcactgtaggaattcattgatgtgaaattctagaaaaagctggaaaagctatagtgacagaaagcagatcagggacttggggacatgcagaggtggattgggactgactgaaaagggacatgggcttgaacagatgaggcctgcctcagcatcaacaagaggcaagtcagctgatgggcaggatgaagggtgtgtttctaaatattttaaaagatgtgctaaaagtaatttctttttaaatgctaatacatcaacatcttgctactcaaaatgtagcccacggaccagcagcacctacagcaaggacatcactagggagcttgttagaaatgcagatctcagacccacctgcagtctcatgagtcatcatctgcattttgacaagatctccatggcattcacgtgcacagtcaggttggagaattacaggttaggagaatatctaacatatttagttttcattcctgtagggtgttccccctcatagctcagctggtaaagaatccacctgcaatgcaggagaccccggtttgatccctgggttggaaagatcccctggaaaagggaaaggctacccactccagtattcttgcctggagaattccatggactgtatagtccatggggtcgaaaagagtcagacacaactgagcgactttcactttcactttcagggtgtcctccactcccagaaatttcctggaatgtgtttaatacttgaggcggactgattaccaagcctttttcttttcctacactccattattttttcctggagacagaaatagcaacccactccagtattcttgcctgaaaaatcccatggacagaggagcctggcgggctacagtcctggggtcgttggacacgacttagtgactaaaccaccagtgctcttaataaatccattaatccattatcacatttaatcttcacaacaaacattcaagataccataatccttctattgcagataatacagttaagtcacttatctgaggtcacacagctagtaaatagtgaagatgttctatttgagtcggactaattcccaagccttttttatcttcctacactccattgctttttcttgaacttaataaagagtaaattgtttatgcactaagggaataaactcattaaaatttaagcttatgagagatcttttgagcatgttaaatgaggtctttcagttgtttaaagagtatttcaaatagtgtcttgcacttctgtcagtaataaagcagagagagtgacgcatcattggtttcccatttctggtgtaacccaagaagtgggaagacgacatcctgaatatacacacccttcatcctgcccatcagatgacttgcgtacttgttgctgctgaggcaagccccatctgttcaaggctgtgttgagccaggtgctaagagcagtactgattgttttctgctcagactgcccatatgcctccatgcaaactgtag

SEQ ID NO: 34424 - DNA, 1156 bp, Bovine  19866881336019
  misc_feature (1)..(1): n is a, c, g, or t
ncacacccctgtgtgactgtggcttctgaaagcgacagtggggtcactgagagacgacagtgtcttctgtaaattgactcaagctggcacatctaaaacatagagtctcctgagtctggtggtttttcccacaaaatggccctgccgcttactgctttctgacttggctgaaatcaagaaagggacatgatatctttattttccaggcagaaaggtaaaaccaggcaatgacaaatcaatcctcaaggcacacaggtctattcctgaaagtggaaaacgtgattctgagagtccagcatggctggccttaaaagtcaaaattcgctgactcattcccaagtgtcaggaattttaaaatctcagatgtactgttttccaaatggaaactggtggctactgtctgacacatccactgggtatgacaaggccttgggacagagaggaggtggtgctgagggttggcgggtacatcctgaaaagcgctattagccccaggttgggatcgatgtgaaacttaatactttaatgactgggctgctcgtgggctcttgtttttaattctctggtcccgagagaatgattttcttctctcaatcgaatcttcttgagagaggaggagaaagcaaggagataagtgtgggtcaggcagtgcttagggcagagcttcctaagggaagggaccgctcctgatacacggagcaggcagccaagggtggccagtgagcaccatgcatctggactcaaacctcttctccatcccctacctatcccctgagctgagtcactgacatgatttgagtctcatctcctcctctgtttccctgccccaggatggttagtatgaaatgagatcatcacataaaaaaacattgtgtctgatgtctggcacatagtggatatttaatactgatagggaatttcaattattttatttcaatgtttaacaacttgcctagagagcaccagagggtcagtatatttggtgtgagtggatgataaatgaatgacgcactgaactcatcacaggtggaaccagctcgtgactgtcatcaacatcagaagttcctaataggcggagaccatctgagatcacaggcaagcatcagtctttatgcgtatcagctaatttagccttccaaacaatcctatcaagtca

SEQ ID NO: 34425 - DNA, 1020 bp, Bovine  19866881369758
  misc_feature (1)..(1): n is a, c, g, or t
ncttgggagtaattaggtcctgatggtggagcccacataaatgggattagaggccttacaagaaaagactggagagcctgcttcctctctcttccaggtgaagatgaggaaaagaaagaaagaaagtgaagtcgctcagtcgtgtccaagtcagacaccagtgagccactaacactttactttggagacagaaattgcggactatacggataaatagatgtggggggcaagggggaggtttcttcctctctacccggtcaggaatattgcaggccctatttccatttttctgcatcccctttgtttctctccaagaaggaaggagggaataaagattgggcagagctcactagtcttctgacatctctttccttgtggatgggtctgaggacacttgtagccccaccgtttgctcaggcagagctggtcctctgcttcttactgtcgctttgcagtttgtcactatgacaacagattcctaactacattccttcttactcccctccagcccactgtctacacaggtcatggttacttttttttgtttaatttcctcaatagttatttgatttacctgatgagacttggaagtctatttttggcctgcaacaatgtggatgttagtaagaagcatttccagtcaattttcttcttcttgatgcagaaataatgccattttaatgaaatagtattattcacactttccatttttctcactggcctctactgcttggcatcacccctttgtcaggagagcgtaaatatctgcatcaaaaactaaagccacacagaatctcctgctgttttaaaaatgagaaatgaataggttgatagagatattttccatgtttgaaaggcttattaaaaataaaaccccaagaatccattacaagttatgaaaaatgcattgactgacatttgatgttcaagcaggctccaaaagagcaggataattaaagaagataagtaaaaaatccaagaaaatatatgaagctgactaagagcatgtttaaaataaat

SEQ ID NO: 34426 - DNA, 2763 bp, Bovine  19866880210862
  misc_feature (1)..(1): n is a, c, g, or t
ncatgacccaggaaaaacctagccttgactagacaaacctttgttggcaaagtaatgtctctgcttttgaatatgctatctaggttggtcataacttttcttccaaggagtaagcgtcttttaatttcatggctgcagtcaccatctgcagtgattttggagcccagaaaaagaaagtctgacactgtttccactgtttccccatctatttcccataaagtgatgggatcagatgccatgatcttcattttctgaatgttgagctttaagccaactttttcactctcctctttcactctcatcaagaggctctttagttcctcttcactttctgccataagggtggtgtcatctgcatatctgaggttattgatacttctcccggcaatcttgattccagcttgtgcttcttccagcccagcatttctcacgctgtactctgcatataagtttaataagcagggtgacaatatacagccttgacgtactccttttcctattttaaaccagtctatggtttaaaatggttccatgtccagttctaactgttgcttcctgacctcaaaaaacaaacaaaagaaaaatcaccagagttgcagaatttcttttgcaaaaaagaggattaaaaaaaatcaagaggcaaagtagaaataacagcttgcaatcaacatgaataagccatttaaattctgtgcaaatgcatcagtttggtgtaaaatacaaggtgtggaccagataactgcctgcctcattactagctctaaaattctttagttctgatgttaaaaacatcaaaggtaatttataacatttttaaaatcctcaaacaatgacaaagattaaaaatggaggtcttagctaacttagtaccgatgatagaattggaccaactggtccagaatctgctttatcaactagttatcaagtttgcattgatgaaaaattgtcactagttctcagatttgtgaagtgatttgtgaagtatcagatttggcccaggctgtgtagatgctaaaaatacatagaaatgttgtataaggacacaagaaagcaaaattcaatctgtatcacttttatttctcatggtttttaatttgaaattactactcaagatccagctcatatttattttccttttaaagtctagtttatttttcctttcacatcagtggtccactttatcatgaatattttctctattgtgatttagtacaataagtatatatagagtaatgattacaaaatatttttgacaagtatggaaaatagtagttaatgttttccatctgtttgctgcatgctatgtcatgaaaagaaccattgatcctatagaatcaggaaacacctatgcaaggacatgacagaaatacaaatacttaatgaattaattttaatcagttacacatttttgtaaatgttaccacatgttgtttaaattacccattatcaaaactagtatccaaatgctatcacttcccagagcttcactctggaaagttttaaaccttgtaatttaaatttatttgtggaaaatgagatgtcatttctttctcaatatctgatttctaaagctgaagttcaagttctgaaatctttcttctaagagctttcatggagctgtcacaaaggattttgtttgatagacttaaattctgcaaaaagtcaaaaccaagaactctatctaacgatttcaaattcaaactacagattgcaaaggggaatgcagaatgtgtcacaatttcgatctgcaggcttggaaggcactccagacagtccatgttctaggaagtcaggtgatgctagtggtgaagaatcctgtcaatgcaggagacgcagtacatgcaagtttgatccctgggttagagagattcccctggagaaagaaatggcaacccactccagtattcttgcctgggaaatgccatggacagagaagcatggtgggctactcttctctttcaccctcatcaagaggctctagtttctactcactttctgccattagagtggtatcattttctacattcacctttatggcagaatgtgaagcagaactaaagagcctcttgatgaaagtgaaggaggagagtgaaaaagctagcttaaaactcaacattaaaaaaactaacatcatggcatctggtcccatcacttcatggcaaatagatagtgaaacaatggagacagtgagagactttattttcttgggctcccaaaatcactgcagatggagactgtagccatgaaattaaaagacacttgctccttggaagaaagttatgatcaacctagacaacattttaagaaacagagatattacttttctgacaaaggttcatctaaggtgaatctaatgaatctgaaggttcatctgtcaaagctatggtttttccagtagtcatgtatgaatgtgacacttggaccataaagaaagctgaccaccagagaactgatggttttgaactgcagtgttggagaagactcttcagagtcccttggattgcaacgagatcaaacctgtcaatcttaaaggaaatcagtcctgaatattcattggaaggactgctgctgaagccgcagctccaacactttagccacttgatgggaagtactgggtcattagaaaaaaccctgatgctgggaaaggttgaaggcaagaggagaaggggcaacagagggtgagatggttggaaggcattactgactccatggacatgagtttgagtaagctccgggagatggtgaaggacagggaagcctgga

SEQ ID NO: 34427 - DNA, 3875 bp, Bovine  19866880391789
  misc_feature (1)..(1): n is a, c, g, or t
ngaaatctgtatgcggacagatgcaatagttggaaccggacatggaacaacagactggttccaaattgagaaaggactacatcaaggctgtatactgtcaccctgcttattgagcttatatgcagagtacaccatgcaaaatgatggcctggatgaagcataagctggaatcaagattgccaggggaaatatcaataacctctgatatgcagatgacaccacccttatggtagaaggtgaagaggaactaaatagcctcttgatgaaagtgaaagaggagagtggaaaagctggcttaaaactcaacattcaaaaaacgaagatcatggcatctggtcccatcacttcatggcaaatatatggggaaacaatagaaacagtgagagactttattttggggggctccaaaatcactgcagatggtgactgcagccatgaaattaaagattcttgctccttggaagaaaagctatgaccaacctagacagcatagtaaaaaccagagacattacttggctgacaaaggtccgactagtcaaagctatggtttttccagtagtcatgtatggatgcgagagttggaccataaagaaggctaagcaccaaagaactgatgcttttgaactgtggtgttgcagaagactcttgagagtcccttggattgcaaagagatcaaaccagtccattctaaaggaaatcagtcctgaatattcattggaagaaatgatgctgaagctccaatactttggccacctgatgtgaagaactgactcatttgaaaagaccctgatgctgggaaggattgaaggcaggaggagaaggggatgaccgaggatgagatgtttgggtggcatctctgactcaatggacatgggtttgggtaaacttcaggagttggtgatggacagggagacctggcgtgttgtggttcatggagtcgcaaagagtcagtcacaactgagcaactgaaatgactgaagtgactacactgaacctcttccatcttggagggagcagagacttgtcctcactggagtagatacattctgggtgtagatctgcctttcctgacccacagtgcttcttctaggaactctaggggaagacagaggatgagatggttggatggcatcaccaactcaatggactatgagtaaactctgggagttctgatggacagtgaagcatggtgtcctgcagtccatggggtcgcaaagagtcggacacaactgagcgactgaactcaactgaactcccatatagtaaatatcaatagacagaaacaaaagttccttggaattctcaataatttttagaagtataaaaggatcctaaagccaacaactttcagaatcactgtttcaaaagattatgtctatcaaatagtcattaaagtatggttacttcccctacttctaataatcaaagacaccacaaactcacacacacacacacacacacacacacacacacacacacacacacacagtctgcacatcaaaacctctgagtggcctacattcatctgtgtaacaacactataatgaaataattataagctgaaatacaactgacatatccgcaagtaaagttttactctagggaaagtttagagttcaaacaagtattggacattggaaaaaacttaagagtccagaatttaatctctgagatttcctgagaagtatagagattccaaactgagaacttcagaagtgtcaaagcatatacagaaacatcttgagttaaagcttacaatttaaaattttcttgttcttatgtttataaataacttgtttcaaaacacaggtatcaacaataacatctgccttgcagctaagtctcttcagtcattgtccgactctatgcgagcccatagatggcagcccaccaggctcccccatccctgggattctccaggcaagaacagtggagtggattgccatttccttctccaatgcatgaaagtgaaaagtgaaactgaagtcgctcagtcgtgtccaactcttagcgaccacatggactgcagcctaccaggctcctccatccatgggattttccaggcaagagtactggagtggggtgccattgccgtctccgaacatttgccttatgtatgtccaattcttcaattaaatttgcaaagaaaatgttagaagtatgaagactaagcatttcaaatatttcagtgtcctctttccagagttaactgtgtactgcaaaatttacctgaactggatgtttggaaatctttcattctgactgttttattaggaacagaatctttcattctgactgctggctgaatggggtttggaaacaagttgattactaaataatgtacataggagacaatccacagttcagaattcaagataaaatcataaacgtttttaccttcatgttaggatatttcccaggagactctaagagggaaaagggacacagagttaattacatgtaaatatgaaagccagaggtacattcatgcagagttagtacggagcagaatccttgcgctcagccttggcatggaatacattgttttagtgtcttgtttttaggggatcttaggacactggtaagacagacacaggaatccactaaagatagtgaagaaaaaacaggaatacaggctcaccaaaacgtgcagttaagatttcaaaagtaacattacgttttcaacggctttataaaacattaaagtgcacacagaccaatgtgaacgtgctgactgatgaggagaaagtggatctgaatcagaggagcaagtcatgaacccaagaagataaacgtgaaagctgatggtaaaatgcaacagcacatcttgaatgcaacacagcagttatcatttccaccattatgcgataagtatttatcatgttcttcaatctgtccagtcctttaagaagtgcacagctgggatgacagttcaccagaatgtataattcatttctcatcaaagacagagtaatgaactgattagcctggatatacacttgtagaaaaatggctcataaaaatattcattatttttccatatccgtgtgggctactggaatgcctacttgtcttggctcctctagtctagccatcttaaagtttctcaatccactcatgcaggaaggtatataagacacatctaggaaataatgtataataaattctcaatattgaaatacaattatcaaaaaggaaataatatatttaattgccaaagaattattagaaattaaaaatcttgcatgtttcaaaatcagtgtagtatttattaaaagtatttctacatttagggaatgaatcttattaatctgtttggcttcaaaatttagtttggtttggtatatcatgttaatgcttcagaggatttctatgaaacaactttcaaagaatcagctatctttataaaaaaaagtcaatgcctccttttacaaattaatctgatttgaataacaaataccagtacaacatatatctttgatgcctaagagttactcagaggggctgcagtttcccccacttctagcaccccctcccagctccaggattctctggagcaataatgatcttatcttttttcagggtaaatacactgaagtcatctagaaggagctctctcaagtgtcctcatcaactccaaactcccctccctacggccttcctttcctccctttgtcctttcactagattctctcctctctaaatggtaatctctagatctgtggacttaaatcttcccccttgacatcctttctatggatcatccctacctgtggtcttctttacagactggggcctggtggaccgaagtcaacgaaaagaaagcaaaagagagagactaatattccctggggtaatggaaaaccaataaagcc

SEQ ID NO: 34428 - DNA, 2372 bp, Bovine  19866880413687
  misc_feature (1)..(1): n is a, c, g, or t
nattaaaatcagaggataatattagtttaatggaacattccagaaaattatcatttctcatctttccttttgtaaattgctgtagagttctgtatacatttatttcatggatttcagaataacgtgtgcagaaagggtcttatacaaaccagttgaagtttaggcattgccttctttccttttcattttaagtatattgtaaaagcatggatgtactcagatggtgtagaatacgtacatccaaactagagaattaaaaagattatctggatcctgccattggattttttttaaagctattgagatataattgacatatcatagaattcacctactcaacatgtgtatttcagtatctcttagtctagagatgtgtaaccggtgactacagtcaattttagagcattcccatcaccccctaaaagaaaccctgcatcccttagccaccacccatggcctcccatctccctcagccccaggtaacccccagtataatatctgtctctgtagacatgcatgtcctcagtattttatataaatggaatcatgctgtattctcctttgggattaactttgctcatttgatgtcatgttttcacagttcatccatgtgataacacgtatcagttcttccatttctgtgtgttgtcaacagtaagctaagccatgtatccatcatcacttgatggagctttgggttgtttccgctttgggtttattaataatgctattgtgaacattgatttccatgattctgtgtgcacatgcttttatttccctgtggttggatcttatcctcaaagttagctgactttttcaccttttcttggcccttgctcagactgtcctttctgtctttacagtttcttttcctcttgggtagtccttcattatttcagacctggcacccagtctctcctccttcatggagctttcgtgactgtccagctctttgagccttttcacatcagcacttgttacctagtctctgaggaagagtttagcccctagttttacattgtcgacatttcttccatgagggggaatcttggctaagtatacactggtgtaacagggaatatttattgatatgcacagcacttgtcttgcataaatggacagtaacaaaggattacaagaatgaggcattttttgttgttgctgttcagaaaaaaatgtgcggatcatctctgtaaactgttaggaaatgggatttctttaactttgcaaataattctctttggaatgcaattcaaattagcaaaaagtctttgtacttcagaaaaaggcttatgggattagaatccatatttataagatttattaattagagtcttattctcacagtcttcttttgggagggacttattaacttagccctagataactcaatacagtatccctcaaacttctttaaaatcctggaacattaagatgggaggaggagtaagagacattctattaagaggtgacttgtagtcattttatgaagaaagatagaaaaacattattgtagaacaataaaacagtataaaatcaagtgcaattgttgtgtgacaaagatgacagtgaagaacatactttgtgactcttggtggtttgaatttctttcttgattctctgagtaatctctggtcctacagtctacaatacaaataccatcatatttatttgatcctgggtttgagttaggctgtgctcagtccactgtagtcactagcaaacagtatctttttattcttgaagactgatgattttccagcagacctggaaactgcatcttcaaaatgtctgtacctggatgcaaaaaatcaagttttttgacaggtgttattatctatgaaactaatgcaaaagaaatgtaaaaaactagagaagaagaaaaagaagttggagcaagaagtagtgtacctcagaagtcatatagaaatgaatatgataggacacagttaagtagagcaatatcaacaggtgattgaagaaagagcaagacaggatctcgtagagaaatgaaaagaagtcaacctatttttgcaggtaaatttgttgatctgtcatatgcttgaattcactttcactgtacagtacattttggatctatacagcttacgtgtttcctctacctcccttagagcagttagttttgtagacttctgtagttttgtagatttcacagttgtcactaaatttatctttcagaatgattctcactagagaatccttttacttataagaccaattggtaaaaagcaagatcattaggaagaaaagaaaatattgtggtttaaaactggtaccatcctcttgaattattctcaagtcgtcttgttcaggtttaaaattgtaagttgaccctcttattctttgaatta

SEQ ID NO: 34429 - DNA, 1871 bp, Bovine  19866880438718
  misc_feature (1)..(1): n is a, c, g, or t
ngttaactgtgtacattagaaatggttttccctgtttacaggatgatctgacaccactgttacttgctatacatgaaagaagagggcaaatggtggaggttttagtgaagaaagaagcaaatatacatcgggttgataagatgaaaaggtaccgttgttcttttttttttaaaaacccttagtgctgttctaggatcatgaaaatatcaagattaaatgaataagaggattcatttgtgatcaacacatcatcacttaggtagaaagtcagttattctgactgggaatcaggaacaatatatagcaagaatgtatagcaggattcatattcctttataatattgactgatctcatatgcaacctgtttggttgatcttgtaatcgctgagggagttgaaattagttttattggtttaatgaaatatggagtctgctttttagtttacctcatgacagtattgagtttcttaattcttttaaaagaattctttaacctctactttatatgtatgtatttttaaaagatgcatagtaaacctaaaagacttgattttgtcttttggataactcttggctttaaattactttgtttaaagaatgctgatgttattaggtttcaaaagagtcatatataacatagcgactaaataacaacagccacaaaaaggtgattatgactcacggtcaccagatcctgtggactcatcaggttttatcctttctcattttagtacattttgatattttcatttttaatgcaggtagaaggaagaaagatagctttgattggataaaagctttaacaaagacaagtcagaggtggacaatacagatgaaaatgatgggctttagattcaaactaggttcaattcctaggtttcttaccaattagggttatttatcattagcaaataagtttcctaatatgaaaggcaaatagtaatgcatctttcaaaggtgcctgtgtgtaagaaagattttatatatagtatttcattttcagtgcctagcacatgcttgtccacatcatgaactgccaccatgactatttatattcccattattatcaatatttttgaatgaatcgtgcaagtagcctttcctagtcaacctctagctgactttgaagctgaatatatcagactaaggaggaaatggggaattcatcccttaaatattcacctgcctcagataagtgacctcagcatggtttcttgtccatcaaggactttattattatttttaaaaaacatttatttatttggctgcgtggggtcctagttgtgggaactcttagttgcagcctatgggatccatttccatgaccagggatggaacctgggccctctgcattgggagcctggagtcttaccccctggcccaccagggaagtccccatcagggacttatgaaataggaagtgctgctgcctggcatcccagtgggacaggaggcttcttttctgtcccttcattttagccttggaggtaatttacaaagatgaacacttgagcctgtaaatggtcagtccttcatgaaagggcaaggcgttcacttggtaaagcatatcaaattaactgtttaagtaagttaactcaacttcctaaggctgaagtcatctctctgttgttttagaacagccctcatgcttgctgtcaagtatgaatcagcaaatgttgtcagacttcttctgcagcaaggtgttgacatcttttctcaagatgtttttggatggactgcggaagaatatgctgttattagtgggtttgatatgtaagtgttcacattaaaataccagttctcactaaactgcagccaaaaataattttaactgttacttgctacgtgaccagtgagagttccagttttg

SEQ ID NO: 34430 - DNA, 2538 bp, Bovine  19866880453990
  misc_feature (1)..(1): n is a, c, g, or t
ngaaactccctgctctgtagatgtaccttacttacatttccaagatttctctgattcaaaggcttagtatcaaatgatttttaaatattcttggtatgtgtgatgttggctttagcatcatgtgttcagagtgtttttgataagagagaaagtaatctgtccctagtatagagggtggttctttgtttacctgaagaaaaagaatatgatttgcttttctgaagactgttttttcccttgattttttcttacatgtaacttggtgtttttttaaaaatttttaatcccatcttgattaaaatgtgtctgtctaaatggatctactgattatttgcttttaaaaagctgtcctctatttatttaggggaaaaaaatgaagccagtaactgaattatatgtaacaataaaatttaaacctgtggatctggaattattctaaaaaattagccctctatctggtatcagaaaatggtggctttcctcttagtatataaggaaataagatgcagagtaagaatgtaagcagttgtgattcgtgacaagcagttggaggtaactagctcctagggataaccaattgtatcctattccaaagtcttattttatagtttgaaaagcactttgcacactgttcttgtatatacaagtaaagatgtaattacatgacatagtgttactgctttgtttaacaagaatctcatttaagattgacagctatggtatttttttaatgataatacttttctgtttctttactgtaaaattaagttaaaaataaaaggttaatgagaattgttatggtttttatttcttgttactgttagaagtgcgttgattatatactaaggcttaaataagaataaatagtagggattcagagaaagtaattgttcctctttcaaaataaagccatgctattacacatcattaaaaagaaacggggggtggtggttaactcatttagttgaaagtgttgttgatcatgtgaaaatcttttcaatttttattccaactcagtcgcttcccacagcctctcagtgcagccttcatcagccatcttaaatgcatacgattggtcttaggtagaaaatggtgtttttaatacaaatgtataacttgtaacttctctgctgctgctgctaagtcacttcagtcgtgtccgactctgtgcaaccccatagacggcagcccaccaggctcccccgtccctgggattctccaggcaagaacactggagtgggttgccatttcctcctccagtgcatgaaagtgaaggcgctgagttgtgtccgactcttagcgaccccatggactacagcctaccaggctcctctgtccatgggactttcaggcaagaggactggagtggggtgccattgccttctccgtaacttctccaggtagtgataaaagtgatgacagctgtttgtaatccttaagatatcagtgttctgttgcctgtaataggaacctaactgcagcagcttgagttgttttcctcatctacaaggagttaggaagtccagggctagtgatgtgctcctgcagtgccctcagggacacaggttccgtctgttgttctgtcctgtcatcattagggcgtgggtcttctctttgtgtttgccaaatgactgctgtacatctcggtccaatgtctacagtaccagcaggcaaagatccttatctaataaagaaacttgtaacttgcctggaagtctcacaggacatcccttcaccatcttcttggctagaactgggtctcatatctttgtctgagaataaaattgttctagtttatagagatactaattctataagtttgcccatacacaggaaaggccatgtcttttggcctttaatactgtcctaaattctcttcattttcttttctacttcttagtccttgttttctctccttgttttcaccctgatcttgtctttctctccattaatcctccttttcaatggaaccatgtttttcaagctgaaaaatgataagtgttctttcctttttcaaaagaaacaaacaacttttaaacttatccataatacaggtgaggtgtagccactgtcatttttcctgcccagcacaaattccccccgctgataaaacatcactctcctcttcctccctgcaattctgctccaccccaagccacagtaatgggcatgtccctcagatctggcccccgtctatctccttctcctcttgaccacagtgacaatcccagggagggctgtatgaccatcagtgaagcaataagagttattctccggatctatttcacagagcttggagagaaaggcttttccagaatcttacatagtttgagtcataacagtatgtagccctttcagactggcttctttcactttgcaatctacatttcctccatgtaatatcatagcttcatagctcatttttgtttttatggctgtgtttcaataaaattttatttacgaaacaagtaaggggccctatttgtcccatgggctgtagtttactgccttcgatttaggtaattcatctctttttag

SEQ ID NO: 34431 - DNA, 1478 bp, Bovine  19866880511174
  misc_feature (1)..(1): n is a, c, g, or t
ncttatttagcctttgccattccttggcagtgtcgtgattttactgtttccttagtatctcctcagtcagtgctcagtggtgtctgattctttgtaaccccctggactgttgcccaccaggctcctctgtccatgggattctccaggcaagaataccagagtgggttgccatgccctcttccaggggatcttcccaacccagggatcaaacccaggtctcctgcattgcaggcagattctttaccatctgagccaccagggaagcccagtacctcttcaacttcagcctaaaccatagtaatttgttccccttctccaggatgtgatttccatgagaatctacagttatttaaaaatgaaaaccataaaacactcttcatctgcccccttcaggtaaagatgacatttcacaacaattgcaaaagtaactgctttctaaaatgcatgtgattaaaaatgtccccttcgtggtgtgattttattcctggaaatgactgtattgccaacagaaactcatcacattttaaaaacttggaaacagaattttcaaatctattttaaaacctctcaaaaagtttcagcaaattattaaagtcaattttttgaaaataaaaatgtaacactttacgacaaattgataagaactgacagatctcaaagaacacttataagcatgacttcagccaaaccatttatataatttgtggataggactgaaaacaggtagcaaatacagtcagaaattcacctcttctgcatgaacctagcttgtcttgaagtatctctgttaaagatggcattaaaaacaagtctctaattaacctgaacttgagtcccaatctttaaatcattattaaatctagatttttaaaaatatatataaagcaattcaaactatatagttttcactaaaaatagcctatttatcatatcaataattatttatccattaacagtgacattttgatgggaacaaaaagtatttttgtatcatcaagagataaaacaaaactatttcaaaatattgtttatatcatttttgccttttagaaaattttgtatgttttactatttacatgatatattagcataatgtccatatatatagtgtgtaaataattgactatatatcagatccacttgctcaaaatattttaatgatagggtgtataattaaaaagtgtaaggttcattaatctagatgaatttttctcaaaacctggtttgaaaagcatctgtgtcagtatcactctagaccctaagctcagaaaacctcacttgggcatgtatagttgagatctagaaactgcctttttaacaagcacccctacgaaaggtggttcatgggctatatatatatatatatatatataagggactgaaggaaataaaaaaagcctcctatggagaccacaagtgcctgtgtgtggcagccatgtgccataggcaatgaccatcatcagctgtctccttgctag

SEQ ID NO: 34432 - DNA, 729 bp, Bovine  19866880660493
  misc_feature (1)..(1): n is a, c, g, or t
ntgtttccatagaaattgggaatgggaaatcttaggtttccattgcttggggatccagacagcatttgaccaaggagatagagaagtttagagatgacctaatgactccttgagtatcttggtccatacaaaaacactagagtaaaccaaatcttgacaacctacctgaagtcctggtgtgtagttctgatctccttgcagcttggtagtggctttgaccctcattccaggctgcttcaggaagtgtcaggagtctttttcagataccactatagtttttactggtctcataggtcaccctggagaatactgtgaaggcagaagacaaaagataattttttggttgggctattgtaggaagcaaatgcttggtgatcaagaattgataccagtcacatacaccaaaaccatttggtgtggctaagctggatagccctgagaaatatttttttgttttcatttttgttcattgctctttaatcagtgaaaacactattctggaacatcacttcaacagggacccagcctcttttcagagttctttggtgcattccagcagcaatttctgctgaaggtctgaacacttggcttctgagtcactaatcccaaaaacttgttgtcaattcattcagtctacaaagaacaaaatggcattaaatggcctctgaagaataagtacgtaaattaatttgttttgctgtaaaataaggctgccatacattcagattt

SEQ ID NO: 34433 - DNA, 1346 bp, Bovine  19866880719675
  misc_feature (1)..(1): n is a, c, g, or t
nacggctgcccaccaggcttccccatccctgggattctccaggcaagaacaccagagtgggttgccattgccttctccaatgcatgaaagtgaaaagtgaaagtgaagtcgctcagtcgtgtccgactggtagcgaccccatggactgcagcctaccaggctcctctgccgtgggattttccaggcaagagtactggagtgggtgccatggccttctccgaggagaggcttgcacctacacaaagctcaagtacacccagtgcttcaatcactgggtttgcccaacctcttcatgcactaccagcagtgtgttcagaaagcaataaaggagaagaagattcctattgaaggactggagttcatgggccatggcaaagaaaagcctgaaagctcttcttgaccttgacagtcaccttgagagtggactcctcaaatcaagaaattgaggtctccggatcgtgtcaattaaaactgaagatagcattgatttgatgaattcaggagggaggagtttcctttcctccttgctatttttctctcattttaaaaagatgatgaaccatcactttgctttcagatttctggctttgacatctcagcaggaactccatgttctaaataatgggattatttgggattagggttgcaatacttggtctgggatcagtttttaaatatatcttgtaggaaaacatgcataagcttgtcaggatgactaaggttgcctgaccttgagtcattctttgaaggacattacatacactctaggggttatttgttcatggaagcaactggttaagatctcttttctctgaggaagctaattctccagaaagagtccccagcacaacagttccagtcaatgcttgggaacacagttttatttttatatagtcattttactatgattgctggtggactgggttagccaagaggaagatggctttcaacggttccctaccttaacaagtggtgtcagatttcctattaagacatgaaagcttcatgaatgctgctgctgctgccgctaagtcgcttcagtcgggtccgactgtgtgcgaccccatagatggcagcccaccaggctcccccgtccctgggattctccaggcaagaacaccggagtgggttgccatttccttctcctatgcatgaaagtgaaaagtgaaagtgaattcacttggtcatgtccaactcttagccaccccatggactgcagcctatcagactcctccatccatgggattctccaggcaagagtactggagtggggtgccattgccttctcccatgaatgttgcagtgaacaccatttcagaatgcaggtgtacttcaggaattaaaat

SEQ ID NO: 34434 - DNA, 1133 bp, Bovine  19866880919008
  misc_feature (1)..(1): n is a, c, g, or t
ncatggatggggtggggatggtttcaggatgagtcaaacacattagggttccagaccctgtgagaatctcatgccagcgctgatctaacaggagacagagctcaggtggtaattcgagtgatggggagcggctgcaaatacaaatgaagcttcacttgcttgcccaccacccacctcctgtgaggtgcccagttgggcaccgctggcttcactgcaccccctcctctggggtgaacccctatttttcctgcaatccttgagacctaggctgactccaagtccaacagctattgctccagccctcagatcaacctctcttcttgctaacttttgaagaaaagccatgacctgtgcattcacagaagaaaaacagaggcctgcctcatcctatgttggcttagaagcattgttcatgaagtctgcatgcatcttcctattttgcaaaaccatcacactcccaggcaaaccagccatcagtggttgtctttttaaaatttcaaattgttaagtattcttgttttcctgaaatgtcttgaaaaagttatttccacactgacactctgcttgccagcttttatttagaagcacatttttaatatattcgattctctgaaagagaaaaaggccaggagagtaaataaagcagaagctgaggttactacccatcagtcaatccctgagcccagattaagcccaagccaggaaaacacacgtttgaaggcagtggcaccagccagaccttctttcaaaagggacccttgttgcccttgagggtttagaactgaaaagaaaagcttttcaaagccatcagaaagtgaaaattaatctaagtgcatccatgtagcacaggagtgtcagaattcataattaggggtcataaatctttttgcaatggaacaaaaataaataagcacgcaagagcacagatcgaaaggcagcgggcgtccacacactcccagtgtcagctttaatttatttctctacttggaaaggggaaacattgaaacctggctgccagtctgaagggagcctcctcaaactcttcttctggcccagacaaaggtttgaatgttgtggggagacatgcaaagaataacacagggaagtgtttgactttttacattgaaaaagag

SEQ ID NO: 34435 - DNA, 3126 bp, Bovine  19866880962946
  misc_feature (1)..(1): n is a, c, g, or t
ntggggtcctttccatgagtcgttctttgcatcaggtggccaaagcattggaacttcagtcttgctcagctctaaacgataaaaacatgagaatttcatgagagagtcctgcatctgattaaataccatttatatttacctttgccatcatgaaatttctaggattttttttggtgacttaaaaactatttcatatataatgtatttatatagcctgactttacaggtttagattaatgtttgtattcttgtttccctcctccccctctccctccatgtgtggcagcttctcctggacatggttgggtcacctgatgaggaactccaggaagctgctgcaggttgtatatccaacattcgcaggttggctcttgctattgagaaggcgagatacagctgaacctgaatgggcatgacagctaccaaattttacatgaccctgtatgtgtcactcccagagccgtgaagcctaaattgggaaacacttcatagcagatcctttagaaacaaatgtctgactgaaaaccaggaagttagaaatgtagagaatgtggttcactccaaaattgtatgggtatttttgttctaatttagggatatgccatgtggtgacacataaacccaatatattggtgataattttttcaggaatttgagaatatatatacatgtatacagctgtatatatgtatacagatatatatatatatatatatatatatgtacatatatatatatatatttcagcgatgcttttgtatttgtggtgattttaataaaagatgtggtcttcccgttgtgtgtatttatagtcatccatgagtgtctttagaaatccctttctgttaaaccagtctaactgtcccgtcactatagttttgtttgatctcttgcaaccctcaggagagctctgagatgtgctgacttgacaaatggttatggaacagaattcagagttcagcagctgggttgagagagaacatcctgaggtcattccaagtttctcctaaagctgtcaaacatctgaaaagacaacgtataactgtcactgtcccagataacacaaatcacaaaaacataagcactgagtgagattttcacttttgcatttcccaggcataaacagtgaaatgttttatttccctcacaggatacaccaacattttattgaaagaattaatttatgccgatgtacgcacacctcacaacacaaggataatattactttcacgtaaacttgcttggagtttctgaacttgttttcagcatacaaagtactttttaaaaagtggctacaaaggattaatagcattttatcaagttatagaaacatgagaagccacttaaaagaatcacagatgtaaccttggtgtgctacaatgtttgggaactgaccgtccccccatctagaactagctaggaaaacagcttcttgtatatccactcagtaaaccgacagtctcactctttaaagagcaggcaaggttttattgaaaaatatgaagtactgtgtatgtttgtcataatttggagaagactgtaaacttaattgaattaaatgtaaataatttgtatgaaatgaaaaccccatacaggattaaaattatcctgatgattctgagaattttaagattttgtaaaacaccaattcatctttattgcttttcaaaggaggttataaaagaggataatagaaacaaggaaatggtatcaatgctaacaaagaattgaatttaaataatagtggaaatcctcaaatgcacgtcggactctttgtgaccccatggactatagccggccaggctcctctgtccatggggattctccaggcaggaatactggagtgggttgccatgccctactccgggggaccttcctgacccgggaatcgaacctagatctcctgcatagcaggcagattttttatcatcaaagccactagggaagctctttaaataatagtgtaaatcctaaaattctcaacagtaggtattattaaagacactggttaggtgtgtttcactaatattaaaaacacatctagaaatcatggattatgacagttatagaaaatgaataaatatattattgttacattattattaaaggaagctttctccatcattttaagattgttcatattcttggaattagagggtcttaagagcttgcctgaagaatcccacgaacagaggagcctggagggctacagtccatagggtggcaaagagtcaggcttgactgaagtgacttagcatgcatggatgagaggggaaggaagcaatagaaaacaaacaatcaaacatctgcagcagcacaaagagaactggatgtagttgagaaggataagttcctttaccatgtgcaagtgtgggactttcatttctatgattattaaagacataaaatgagagcaacagtaccattttaaaggaaactgaacttgtgggaacagatacagtaagctaacatgaaaatcattttgggtatttctaagagttgtgtccttttaattggtaagcaccctggatgtagtggtcttcccacaggtggctcagtggtaaagaatcagcctgcctaagcaggagacacaggagatgtgggtttgatccctgggtcaggaagatccccctggaggagaaaacggcaacccactccaatattcttgcctggaaaattctatggacagaggagcctgacgggctacagtccacggggtcataaagactcagacaggactgagcatgcatgtaccagggatgtagtacctttaaacaaaagagaaactgaatttaaaggtcagttttggctgtgtgtgtatgtgtgtgtataacagtataacagaaaactctgaccttattagaaaaatgtcagaggcagtgagtgaaagtatccagagataacagaacaaacaagcccaggatcacaccatttctttgctgctccaagccaaaggaccatttcttggcactctccatggaagaacaccttgggttgttttttttttttttttggcctaggtttctggataagatttttgtgcgttattttctgctttaaagctggtgacattcattctgagttttcagtggcaagttcttttttaggttttattcttccccagga

SEQ ID NO: 34436 - DNA, 779 bp, Bovine  19866881022829
  misc_feature (1)..(1): n is a, c, g, or t
ntgccctctttttatattcttttattaacaacacttctttcttagctgtaagtttctcttaattcatttctccactacactgtgaaaattttgaatacgaggattttgtcttcattttaatccccagtgtccatcattgtgaacaacatgtgcctaacatttactgaatgtacaagtggatggatatttgcaggaaagacaccttcacagtattgaaatctttatgtcaaagtacgcactaaacattttcaagtgttacctgagcaggcaaccatgagatcatatcatttccatcagtacatgtgaattcctgcactagcacaaataagacattttggaattcagtcaggcaataaacatgatcagtattcacagtggaggacttgtgtttagacaagcatgactaagagaagttagtggactgtcagctgtaccggtcaaaatgttttcaaaaatgagagaaaaagcagctttacaaaaatacagagatgattattttgttacaaaagccaatgagagtactgagttactattttaaaagatattacaaaattctttaacagcaataaagattttgaacagctatattaaatatataacaaaggtgtataataaaactataatattagttcattttatcttaaacagaagaaaatatacataaataataactactaactttgcaaattaaaccatggattcagaattgtagacattttaatgtgattattctcaagggataataacaggcacatgttctaataaagtaaacattaaaa

SEQ ID NO: 34437 - DNA, 1241 bp, Bovine  19866881025733
  misc_feature (1)..(1): n is a, c, g, or t
ncccctcagatgtcaatccccacatctaggttgtcatctgtgcttctgcctattggctataaattggagattctcagaatccctccttaggtttaatttggtagagcagctcatagaactcaggaaaccaggttaggtactatcggcttattatgaaaggatataccctagaacagccagaaggaagagggaggtaggcaagggatacaggaaggggtacaggccctccacgtcctctctgaaaatgctacgctcctcacacctctgtgtgttcactaactaaaaactcctccaaactccaacctgttgggactttaatgggagtgtactcacataggcataatcaattattaactcctttccagcccctctcccctctctggagaacagagagtagacgtggaagttccaagattctaaccacagcttgatctttctggtgaccagtccccctccaggagcccactcagagccacctcattagaacaaaagacactgtgggacttccttggcggtccaatggataggactccatgtatccacagctgtgggcccaggttcaattcctcattgggaagctaagatcccataaggtacaagctgtgtagtcaacgggacaaggaaagaaaagaacagaagacactgccatcacccaggacattccaagggactcagaagccctgtgtcaggacctggtgtcaaagaccaaacagtagaacaaaagatactcccagtgctcttatcccctgggaaattacaagggttttaagagctctgtgccaagaactggaggcacagaccatacatgtattttctattatttcaacctttctaataaaaaatacaataatgtttgaagagaccaaggtaaactttttaacttactcctttaacatgttcaaaggtaacatttttcatctgtacaggatctacagcagaatcaagccctgttgttgtccggaagcggactaaagggacaaaaaaaaatgcttacatatttgatagattcataaaattttaactaccttatttttcagatgcaagaaagtccagaaaaattaaatgtctaagatgacaatgcgaggagtaggaattaggtcttctggattttgagacaatgttcaaggaatgaatgattctcattaaaatgacatctttgcctttccagttaaaactaagaattttcctcttctccttatatctaataataaaaatgtaaaccaaggttctcaagctccatt

SEQ ID NO: 34438 - DNA, 1119 bp, Bovine  19866881094370
  misc_feature (1)..(1): n is a, c, g, or t
nagggacgcgctagccctaagcaaaagtcctttcattgtccatttgtactattccctacagtcagcaaacaatgtctacttggtgagtaaatgacatgtttttcttcattcaggaaccactaaacccagtgacttaagaattactgtctttgggttcagagtacctaggtttgaattccagctgttgaacttactagctttatgaccttggccaagttaccttaccagttctatttgttaaggttcttcagggaaaaagaacaatagggtgtctgtgtctgtgtgtataacgggggatttactttagggaattgtccttcatggttgtggcaatggcaagtccaaaatctctggggcaggctgacaggctgtagacccagagaaaatttgatgttgcagcacaagcgcaaaggcagtgaagaggcagaattccctcctctttggaggagaaagacaggatccctcaaacttttttctctccaggccttcagctgattggataaggctctcccacatgatggaggataatcagcttttacgcagagtctaatggttgagatgtttatctcatgtaaaaaataccttaacagcaacatttagattggtgtttgaccaaatatctgggtgtcatggcttagccaatttgatgcataaaatgaaccatcatgcctcagttttcccctctgcaaggtggggataacaatagtacctacctcaaaggttgttatgaagttccaataggttgatataaaccttgtagaacagtgtgtggcacatagtgctaaaaatatttcctaagtaaaggatgcataatagaaatactgtataaagtttgatgggtaataaggaaatgatattaggaagtggtggatttgggatctatgtacttagcaagttgcttgcttttcactgaacatgacagcttacactcttaattctaatgaggaatttgggtagggggcaggaagaggtgaggatggcaggtattttgacttccaagttctagaggttcatgaggaaataatcagatgttgtggaagaccattctgtgccccactcccagtcccacccactctccagcaaataaaaagaagaaaaattattccaaattaaaggaga

SEQ ID NO: 34439 - DNA, 1791 bp, Bovine  19866881203949
  misc_feature (1)..(1): n is a, c, g, or t
nctgtcatgctgaacttttaaagtgcaactcacttttggtctgtgacgctggaaaaaaaagcagctgaatcatcaacagataaatgttacaggttgttggataggtttttttcccttcctttttgggcaaaatcactcaggatgatttatctttactcattcaaaagctctcactacccttaaagagaggataaccacaaacatttcctctaaaagtgatgcagtaacagctgtctggcagttacttagcagttattccctcctggtgatgcaagggggatcatagaacagaggcccccggggccaaaggctggtccagtccctggcctgtggaggtgaagggcggggcaagtgagcaaagcttcttctgtatttacagccactccccatggtttggcattacctgagctctgcttccagtcagatcaggagtggcattagagtctcctaggaacgcaaaccctactgtgaattacacatgcgagggagctagatggttgttgttgttcagttcctcagtcatgtctgattctttgcaaccccatggactgcagcatgccaagcttccctgtccttcactgtctcctggagtttgcttaaactcatgtccattgagtcggtaatgctatccaaccagtgatgctatctgctccctcttctcttcctgtcctcaatccttcgccagcatcagagtctttttcaatgagttggctctttgaaaatcaggtggccaaagtattggagcttcagcttcagcatcagtccttccagtgaatagtcagcattgatttttttttagaatcgactgctttgatctctcgcagcccaagggactctcaagagtcttctccaacattgcagttcaaaagcatcaattctttggcactcagccttctttatggtccaactctcacatccatacataactactggaaaaaccatagctttgactagacggagctttgtcagcaaagtgattgcatgttccttatgagaatcatcctgaaaccatccccctcacacaccagtccgtggaaaaaattgttatccatgaaaccattccctggagccaaaaaggttggggaccactgttgctagggagtgtaactctaacttaaagtgcaaagatggggcttcctggtagctcaatgataaagaatcttcctgccaatgcaggaaacatggcaggagcttccacatgccttagggcaactgaacccccttcaccactcccaaggccatgtgccctagagcccgtgctttgccactagagaagccaccgcagcgaggagcgggagcacttctactggagagtagtcccccttgttgcaactggagtaaaccctatgcagcaatgaagacccagcccagccaataaataaatgaataaaattattcaagtgcaaggatgagctcaacagagctttaggtttcctattccgtgatttggatcattttttttaaatattacagattaaataataaggaaggagataagcctttttgaggtcttccctgtagctcaaatggtaaagagtttgcctgcaattcaggagacctgggtttgaaccctgggtcaggaagatcctctggagaaggaaatgtcaactcactccagtagtcttgcctagagaatcccatggacagaggagactggtggactacagtccatgggatggcaacaagtcagacatgactgagcaactaacgctacaccaagtgttgttgtttttttttttttggcgggggatatctttaggtctaaaatactaggaaaaagtacagaaaaga

SEQ ID NO: 34440 - DNA, 1698 bp, Bovine  19866881304911
  misc_feature (1)..(1): n is a, c, g, or t
ntatggtgaataataaacagtaggtaaaactctatagatagtcctattaaaattgtttagttgcaaagtcgtgtccaactgtttgtgaccacatggactgtaggctgccacactcctctgtccatgggatttctcaagcaagaatactggagtgcattgccaattccttcttcaggggatctttccaacctagggatcaaacctgagtgtcctgcattggcaggcagattctttacccacttgaccaaccaggaaagccccctatcaaaatgaggaactagaaaaagtaacccacattattatcattattattttttttctgaaatgctactcagtgcattaagcacatataaaaagtatcatagatagaaggtgggagaatttttatagcaataaaagaccaaaactaacaaaagggaacatattcagtccagtttatcaacaaggagaacctgatctaaaggacaaggatacaagcttgctttggcacgaggacagtgggagtacagatacagagtcaggttgttctcagaattatctcagaactagagaggaagaacaaccagactcagtctcctggaaatggggttggcggggatgaagcaggaagcaggtccagccagctggctagatagccagaagacactaacaccctagcattgacagtaggaaaagcctgagccctcaggcctttcaggtcaaagagagtcaggttggggcctagtcctgccacgttctctgtgtgtcaatgactctggtgtactagaactgtagatacacctaacataagcatgctcaagtgaaagcaaagggcaagaggttttgatgtggtgctgggctggcagcctactcctaaatggacgctcctttgacaatataactggactgagaagttttcttctcgtgagacgagtttggacaatgtcctccatgtgtatcaaaaatgtgaattacatattataaactcaatctatttatgaaagacattctgttgaagtttgagcttttgacaaaggtggtcctcctcttactcaatagtgctagccctgtgaatagagagccagagattccaaactccaaaggtcaagggatccagtttcaggtaagagggaataagtatattctaccgtttccctcccactgaatgaagttataaaacttggaatgtatatttggagcagctatttgaggactctgaaaagtaaatagttcccaggtgctgcagtggtaaagaatccacctgtcggtgcaggagatgcaagagacccaggttcgatccctgggttgggaagatcccgtggagtaggaaatggcaacctgctccagtatgcatgcctagagaatcccatggacagaggaggagcctggcgggctgcagttcgagggtcacagagccggacacgactgagcacgtgacacacacggcatatggcttggggaagacctcaggtcaaagggccatgaagtaaatatgtcagctcttgcaccactgaggtaaaggtgagttccttctctggacttcatttcttccccttctccctggataggaagcaacagcaacagaaatggatccagaattggaaaccgtaacttggtattggtcaatcaaccctacagcttgggtctgacttgctatctggaatacagccatctgcccccacccctacacccctattacccaggtctctttgaactatt

SEQ ID NO: 34441 - DNA, 1128 bp, Bovine  19866881355735
  misc_feature (1)..(1): n is a, c, g, or t
ntctgttctttgtctgggctttcttatctgtgacataatacggctgaactccatgcttcctgaagttaattcacagggtaacatttctaaatcttactgcctggcattttcaggacatggactctacccgtaccagatgtaggacacacacaatcctttgtcctgaagcaaacttgctcaaacactctttacatgcaaagctttgggggaattgaagtcaagacagaaaattttaccaagcttgccactccatctgaaagctgaggacaggtagaaattgattcattttttctgaactaaaagtaaagatttcaaagctatttatcagccctacttgtgcttttcagaaataaaagtaagatttccaaagcaatttaagccacttttccttcacaaacatctcgccacccatgctagtttatattctttttccatcaatataagcaatcaaagaatttaagagaaaagatagaatataaaatatttgcatggctaattatgatctgggacattcctccattataatttattcttaaagccaacatttatctcctctaagtaggtttattgctaagattgaagatcttcattgaggatgaaaacttccctgtagaccatcatctgctaacaagcgtatctgctaatgaagaacaaaatgaaaggtttcaaatcgaattatgggccacatgtgcaaatctgatgcgcaggctataaaaattctgtcttgacatctgtagaaagaaggccctctgctgcagccttcattctgtttaaacaaggttatcacgaaaagcacagacttacctgtgcggtagacaaagttgccttccgtttctgatgacgagggagataccaactcctcctcaaactcattggaactaaaagatcccgaatggtttctttgccttgtctttcccatcatggccgcatttgtgaccatgacgtgtctcaaagagtcgttaaggtaacgattcaacaagctgctcttgtatttggggggcgatacgtagtcctcactggctcgtgactctggccgtactccagcctttatgactgagctctcacttttaattacgggatggtgaactggattattatagcctccgtcattcatgtggtttcgtggga

SEQ ID NO: 34442 - DNA, 1339 bp, Bovine  19866881504937
  misc_feature (1)..(1): n is a, c, g, or t
ntctgttctcttttataagggaattctcttgcactgttggtgggaatgtaaattgatacagccactgtggagaccagtatggaaattcctttaaaaactagaaataaaactacccatatgacgcagtgatcccactactggccatataccctgagaaaaccataattcaaaaagacatgtgttaccccagtgatccttgcagcaccatttacaatatttgtccttttgtgtctggtttatttcattcagcacagtgtcttcaaggtttttccctgctgtagcgagtgtcagaatgcccttctattttatgggtcaataatatttcactgtatgccctgcgatgttttgcttgcccatctgtccatgggtggtcacttgtgctgctcccatcatgaggctgttgtgaataacattgccatatgcatgagtgtacaaacgtctggtcaagtccttgtttccaattatcttgtgtgtacacccaagagtggaatagctggattgaataaaattatttttttcaagcctaactagtcaaatctataatgatttaaaaaagttggttcggggtatccttaccagcagaatcagtggacatgagatgcactccacagagtctctagcaggcactctgtttattaagcatcccaacagtcacacagtcactgactcatagacaaagaatcccctcatgttacctcagtcagttcagtatatttttaattctgaatgagccaagttctcccagtgtgtgattcagtgggtgcaaattaggcatttaagaagacatagtcacacttttggaaaaatagtaaggtcttaccactgtgccactaatagtatcaaaatggcctaaaaatgatcataactctcataaattccattgggtgatgtttaggttgtgctaaaaggcaaatgtgagttttctgcaactcctgtgaacaattcagcacttttagagagaaaaagaggctggaggcctttgaaaagtgagtgctggagttgtgagaactatgcgcagggtgggagctgccatgggaatttgctcagtttgcatcatgggtgtgatccaggccccatgaagatggtgtgcctggttccctgacggcttgcagatgcctctgtctgtgtctgtactgccgtcccttccgcgacagagagatgttggccccaagcaaatctcgcttgtatgttgtgcacatgtggggaggatgtcacagttagacccctgttttgctttgaagggaatgtgttgcctttttcagcgtcaatggttgttcctaatcttcatttgcaaggtataaagcagaagggatcaccttaagatcatcttctgtttaag

SEQ ID NO: 34443 - DNA, 894 bp, Bovine  19866881746564
  misc_feature (1)..(1): n is a, c, g, or t
nactgaaattgaagaaagagggaaaaccctaggccattcaggtatgacctaaatcaaatccttagttctatcaacttttgctttatatcttttgtaactattaggtacaaccaaggtttaaattattatgtcttcttgataaattgactctttatggattttcctctgtctcttttaacatctcttgccttaaatcttatcatttgctattaatacaactatatcagctaccttttggttagtgtttatatggaatatcatttttctcttcctatttttctatcttcctgtgtcctcataaataaagtaagtctcttgtaaatggtcttctgtttaaaacgtgtctcttgtaaacagcatagtgtccatttctttttagaaaaccaaattgacaattggttttagaaagaaaatcgctggtaattcccagaagaccttaaacctggaattccaattcatctagttctgtttccacaactctcctatgtctttggtatgtaattttggaaattttcaggacttttctagataatatagtgagaacattgagtgactatgacctaccgtattctgccataaagtgcaagtctcttgagtccttgtcatttaatggcacatttaactactcacatagctattttatttgctttaacttcttgtatttcctttaatgctttgtggctatttttcattttactttttgatagatttatcttttcaactctaatactgtagacactatgtatacagatatcacatggcttcttgagatttcaaaacaaaaccactgacccttgctaccacattcaatgagaaatctaccatcctttccatgatctgggcaaatttatagggacttgtattttcatggcaaatttgcttcgattgtctgtg

SEQ ID NO: 34444 - DNA, 291 bp, Bovine  19866881790157
  misc_feature (1)..(1): n is a, c, g, or t
ngcgaagccaggctgtggcagcctagattcttaccaccacccccacactgccttcccaggcatctgacttaagtggtgcagacagaagcgcctgggcagcttgcttttattctctgtgtttatttgcctgatgttatgcctttgagctggatgagttttaaagcagaccatggctgttgccactgtttgttaaacatcgctacttggagtgagcagagagtacagacagcagtttgagttcttggtcatcttgaacaggatcaagcaggacaaacagaggggaaagcaatt

SEQ ID NO: 34445 - DNA, 734 bp, Bovine  19866882078375
  misc_feature (1)..(1): n is a, c, g, or t
ntcccttctagcataactcaaatgaactgtgtaatcaacctgatgcaaagaaagaggaaggaagaaatgatcattttagtgtccgccctgaagacagtgggtttgcagaagagtctctcatttgacttgtctaatagggatgataataaacttaactaaggaggatgaatataatgattttagcttccacttacattataaaaataatatattcttgttatattttaaattgatttcttctcatgggtatttaaaaatccacaaatatttttacagatcatctgctacaataaagagcgattctgcacatggttgcattaaggaaaacccatcttagtttcctttgacttcatcctaggatcacaaatgttggcactcataaccgaacaaaggatagacttccttaagcatgtttcatgataatagctttcattttattttggttggctagatgtatattgcctctccaagacctcaattatataacctgggatttccacattgtttttgacagaaaagtagaacaaaaataagttatgcagactaaatttgaaacacatgatatggaattgaaaggacttagtgatgaaaaagttgtctgagttagtggtaatcaaatcttgaaatagacttcttcttaaataagcaaacagttctaagtatttggctatgcatcactgtttgttcaagcttgaaaagattatattgctccatctctcagctatagtatattt

SEQ ID NO: 34446 - DNA, 1112 bp, Bovine  19866882121148
  misc_feature (1)..(1): n is a, c, g, or t
ntgcttttcaatatgctattaaaagtattttatttaggtggttagtattttggagattcaaagagctaacagaagttaaggggtattttccatttgatgctagtacagaaaaattgaaaaacagatttcccagactttaacatgcaggcaaattcacatgaggggtcttattaaaatcctttccaatacaaggtagtccaggctctatgctactaacaagctcctagatggtgctgatcctccaagaactacattttgaacatcaagattgtaaagaatgtacctacagcctaattagcctttctcttctcaacctagaaaaacaaatagcacccagtgagatgatatcattatcgagataggtggggacatgggtagggatgagaaaaaaaaaaacctttatgctattattggtatagcaaaatacttgaatttctaattaaaactattcataagctcagagaaggcaatggcaccccactccagtactcttgcctggaaaatcccatggatggaggagcctggtgggctgcagtccatggggtcactaagactcggacacgactgagtgacttcactttcacttttcactttcatgcattggagaaggaaatggcaacccactccagtgttcttgcctggagaatcccagggacaggagcctgatgggctgccgtctatgggatcgcacagaatcggacacgactgaagtgacttagcagcagcagcagcataattagtttaataagtccactgataaactcatgaacaaaacttgtaaaattaagaaagctatttctgtagcacagtgactagaatgtggctataaatctgaatgctatatataatggcagctgtaattgcttgatgttttattaatagtttgaatttttaatgcacactttgcagctagagttacacttattttacttccctttaatgaaatttatttttctctattttgtatcaggaaaataccaaataactttctacagagaaacttcatatacagaaatttggtattacaaataccataaaccaattaaaattttatattttatacccaaagttcacatttagatattttgagccatgtctcaatagccttattt

SEQ ID NO: 34447 - DNA, 818 bp, Bovine  19866882218915
  misc_feature (1)..(1): n is a, c, g, or t
nctacgtgtctaggctgtgatctattgcttgcataactagagataggtttttatttaaaaatagaatttggcaaatgaatagtccataacccgaaccaagtgcatctggaatgctttaataaaaataaatggccaggctatttcactttgaaaagcatcgcctgtacaggatgttagtccctctctgattttaaattttgtcactttttaaaagagcttgcattttcagaagacccacacacgctgggggaatttcacaggcacatgaccttatttttactgggcaacataaatttatgagaaaaagaaaaaaaatttttaaagaacagatctcaattaccccacctcattcaactgtaatttttattgtttttatctttcttgtcttgtccatacacacttgtcatattcagggcatcctcaattaaaaattttccacttaacaatagatgattatcaatatttcccacattgtttcatagtcagtagcagtaccacaaataaaaattttgactttatgctgtcttcatctggtttgaggttaggaaaacatttacatttttaaaaattgagatacttcccatgtttttatatgttccagaaacatatacaaagcataggaattaattatttctttaaagtttgaaaaagaaatccaatggctttatcaagcatttgggaactgagtttactaaaaaccataatttttcctgcattagcagtcatttaaaagttttcttactatgaaataacaatttgtgtggataatagcaattcacttcatccatacatttgcatacacctatactgtcaagcgg

SEQ ID NO: 34448 - DNA, 1270 bp, Bovine  19866880130197
  misc_feature (1)..(1): n is a, c, g, or t
naatggtatggacctaccagaagcagtagatattaagaagaggtggcaagaatacacataagaactgtacaaaaaagatcttcatgacccagataatcatgatggtgtgatcactcacctagagccagacatcctggaatgtgaagataagtgggccttagaaagcatcactacgaacaaagctggtggaggtgatggaattccagttgagctattccaaatcctgaaagatgatgctgtgaaagtgctgcactccatatgccagcaaatttggaaaactcagtagtggccacaggactggaaaaggtcagttatcattccaatcccaaagaaaggcaatgccaaagaatgctcaaactactgcacagttgcactcatctcacatgctagtaaagtaatgctcaaaattctccaagccaggcttcagcaatatgtgaaccatgaacttcctgatgttcaagctggttttagaaaaggcagaggaaccagagatcaaattgccaacatccactggatcatggaaaaagcaagagagttccagaaaaacacctatttctgctttattgactatgccaaagcctttcactgtgtggatcacaataaactgtggaaaattcttcaagatatttattagaaatatttattaagaacattgttgtcattacattatctcacttaatccctgaaataatcctactagggaaatataattatagctacttattttagagatgttttatgtaccttacaacctcactttctcaactcctccaacatttcactgagtttgggacaaattagaatttatattcccattttactgttggaaaaaaaaaacaataatttagacaaaatcacagagtatgttgttgagaatagcaaacattcattctttagaatgaatatatggaatgacacagtgtacattaggtggaacacaacagtcagtggtaatatttttgaaagtcattgtcaaatagagacaaatgccagattgcgataaaagtgattttaaggcgagaaagggaagagcaaatgaaaaggtaaagggatttttcctgaagtttatcacgaaagtgagaagaattttgagcagaaacttggcaggaagtagcattcaaagattttctttctcagcacaactattatgagccttcccctcacactgtttaagcccacacatttccctcttggtagatcactcactttcgatgaaggaactctttaagttcctgcaactccccctcgcccatcatctcaggacaagcag

SEQ ID NO: 34449 - DNA, 841 bp, Bovine  19866880245231
  misc_feature (1)..(1): n is a, c, g, or t
ntggaatttactctgcgtttaaatgttcttttgatgaatttgtgggggagaaagtgttctccctgtcctactcctccgccatcttagctcctcctcccctgcaagtggtttctttaccagctgagttaccagggaagttacccaatctgttttttactccttaccaattaagaatagtttttacattttatttatttattattggccacaccatgctgctgagtgtgttctactgaacctttgtcccctgacatggaagggtggagttgtaaccactggaccaccagggaagtcctggtttttacattttttaagttgtttaaaattaaaaaaagaatatgtgacagaaactacatgtggcccacaaaacctgaaatgtttactatctgaccagttacagaaaaagtttgccaacccctgctctaaagcacagggcccagggtagaggttcttcttgtccagatccagaacagtagcctccactctttctttcccacatcacttccaagtgtctgagagtgagcacaaacccagagtcgtagctgtggtattttagctccatctgctggtccagggcttttcaccagtgctgtaaacatgggaaagtttttgcaagtttcaacttcctttcactgatcaatgggttggtttaattcactgagctagcctattggatggagaaggcaatggcaccccactccagtactcttgcctggaaaatcccatggacagaggagcctggtaggctgtagtccatggggtcgccaagagtcggacacgactgagcaacttcactttcacttttcactttcatgcatggagaaggaaatagcaacccact

SEQ ID NO: 34450 - DNA, 1694 bp, Bovine  19866880371024
  misc_feature (1)..(1): n is a, c, g, or t
ncctgcacaacttcctgagtgtcctgtttcagtgcatgcatatcctatcagtggccggggggctggcagcccagcctgaggccaaccgaccacgagatcagcggctgctgcccttaatgcagtcatttcttctaccaaacgcccaaagatcatcatgttgtcacgtgatggggctgggcagactgtggttattttgatctgggagggtgggagttgtaattcttagttctgctgctgaatagttgacatgggtgggtggggagactgtcctcgcagtagggggataggagccctcaagtagggcggggcctctcccagcaagcacagcgaaaccgaccggcctccagagcaccctctgcgcatgctccatgcccccgccccaggatttcactgggctttgttggggttaggtagggggtgaaaacacttctagggctggaacatcgtttctgtgttagtgcctgggtcactgtcttcacagggacctcagggtccctcaacttgtcagaggacagggcagctttaagaatatgtggagagatttaggagagagaaaggacataaataatttccaagcctaccttatgtacccttttgttgtggaaagctggggacatcctcgctcacttgtgctctctggcaggaactccccaggaggagaagggggtctggtttaaatggggctgcctggtgagtcactgataagctgggcgttgtggaggcccacccatcattgccttttggtctctgggaagaccatcttctggtggaggtaggaagggagtatctccttttgtgctggggtgagtgtgaattacccacgttggccctttttctccccctgctgccactcttcatcctgagggctttcagacaaaacttgcagggggcccagcccagaggtggtcagggcttgaccccgtgggccctccagggaagctcgctgcctgactgaggccctgccagcatagtgctcttctggactgaagctgtatgaggtggttgggaaagactgacactgtgacctcatatgtggatcctcctaggtggctcctagtctgcagaaagcttgcttctcagcctgaacctttgccagggagaggctcaccctgaggaggggaaaggcgagcagccagtccttccatgcagctggtagagcagctggccatgtgcccacagatccactgggctggcttttcgctgaatgttgctaaagcttagactgagtgtgaagccctcaagataaactctttactgctggcatttgggagaaagcatcaggtctggatgtatgtcctctgtgggctagccaggcaggttgtcaggtgtccatgagtctgtctgaacgaagtcaggccagacccagggtcaagggagagactggtcataaagctgtgagaagcccacagcacattcaagggtgttgctgcagtgtctagagtgtttggaatggcttttaatcgttttgcaggcaggctttttcttttaaaacatgtttattgaattgtgttattgcagagtttgtgatagaatatatattttaattggcattttttccccagctttgttggaatataattgacaatgagacattgtgtatatatatgtatataaggtgtaaaacttgaggatttggtgtatgtatgcattgtgtcatgaccaccgcagtcaagttgattaaaaggcaggcttat

SEQ ID NO: 34451 - DNA, 1961 bp, Bovine  19866880392949
  misc_feature (1)..(1): n is a, c, g, or t
nactgaacactggggcctttgagggctaagcttgcccgtgttagtagtggaacaagtacaagcggaaccatgagcttcatccattcatctctatttggtcgctaataactatggtgacatggctgcaaagcaaggaatgtgaaggtattcagaggtttgctggctgcaagggccaaaaaagaattcctttatacccatacaaaaaaacacacatcaagctaacgtcatcgagctctctccacagagagatgaggaatcagttaagtccatgccctgtgaccctatgaccaaagctactctttgcttaagtaagggctttttctggtggggggcggaaatgccaaggccacactagcccatgaagtgtgcttcactcattcaacacatctttacatctttaatgtttactctgtgccaagccctgggagtaccaagtatgaaataaaaccccagtgttcggataaatgccagcactggtggggttggtaggaggccctggggagccccgtgaggtcagaggttggacctggggaggtgggcgtgctgtgaggctaccccccaccccaaacccctccctgccttccaggctgctgctctgcttcatgtgctgcaccacgctgctgtccatgtggctctccaacacatctaccactgccatggtcatgcccatcgtggaggccgtgctgcaggagctggtcagtgccgaggaggagcagctcgtggctggcaactccagcgccgaagaggccgagcccatcagtacagtttgctggagttcatctcccccttgctcctccacccctcctccagtgacaccgcccagctcggcacccactccctccaccccccctcacctgcttccctcccctcgtcttctgatgtccccctcacctgccctttatcccctaacctccagccctgctcatccagaggctccctgtgactcccattcccagctgttccttcttgccccgcttccagcaccctctgctgctccctgccccctgatgctccaggattagcccaggaccccaggcttttgtctgtgtccctgagtctcaccacatcctcagaggggagggaaggggagttgccaggcaccaggcccagtgggagcctgcatgctcctgggtccccctagtccagccccagcccggagtccctgcccttcagggtcaagtccggactccatgtctcactttctgctttcctttgctgctgtagatctcgatgtaaacaacagccaacctcccctggaactcatcttcgtcaatgaagagtgagtatgactgccctcctcccagacagagccccgccaggtccatcccagaggtcaggaaagagcctggggaacagccctttcagctgggtgggccacactcacagcttagcacaccaccagccccgcccgccctgatttcctctctgcccaagatcctgagggcaactcccttcaaaacggtactgcagggctcagagaagagggggagagactatgctgaacctgatgggacatacagactgtacatacatctcccaagtagaatttcatctaaattgatgtccctcttgggagaatgatattttttaaatctatcaatgaagaaagtcttgcatattagatatcgatggagactcttagagaaccacaaagtattttataggtattagatatggtcttgctaggtttggtcttgttacatacggcaaggaaaaattaagtggcatgtaggggataacaggacagttggtgagagcaccacgtgatgatgaaaacaagctcttttagaaaaggagaaatctggtctcactcatgtgaggcagattcatgaacagctgatttcttctggacatctgatatcaatatatggtcttcaaggaagactgtgatgaatagggcattttaaaagttggatttgtactagagctccgttgtgcaatttgctcttttcataaaaaaa

SEQ ID NO: 34452 - DNA, 4483 bp, Bovine  19866880441628
  misc_feature (1)..(1): n is a, c, g, or t
ncttgggctccaaaatcactgcagatggtggctgcagccatgaaattaaaagatgcttgctccttggaagaaaatctatgaccaacctagacagcatattaaaaagcagagacagaacttcaccaacaaaggtctgtctagtcaaagctatggtttttccagtagtcacgtatggatgtgagatttggactaaagaaagctgagcgctgaagaattgatgcttttgaactgtggtgttggagaagactcttgagagtcccttggacggcaaggagatccaaccagtcaatcttaaaagaaatcagtcctgaatcttcactggaaggactgatactgaagctgaaactccaatattttggccagctgatgggaagaaccgactcattggaaaagaccccaatgttgggaaagattgaaggcaggaggagaaggcgatgacagtggatgagatgtgtggatggcatcacctactcaatggacatcacagactcgatggacatgagtttgagtaaactcttggagttggtgatggacagggaggcctggcgtgctgcagtccatggggtcacaaagattcggacacaactgagcaactggactgaactgaactgtagtccacggggtcacaatgggtaggatacaactgagcaactgaacaactcgatttgcagcctgctcatgtacctttcttcccccctccttccttctactccaaacagccttaatttagaaattatacatcaaaaaaatttttgtcccatttattgagtataattttctgttctgcatgatatttgcttcctttagcaggaaaaatagttgctgccttttacttatgtagcccattcctgttatatttctgtgtgggtcagtggtcatcacatggaaaaacattcctttcacttgcactaagggtttggaaactttgggaaaatacccaagcgttcatggtgtcaattgctccagggctgggtgctggctgtgctgttgctcacacgtctttagctcccactgtgggcccaaggtcatgcagatacagaggtggataggtctgagggtgcgatcagaaaatgcagcgaggggaaatgaatagcgggctctgtattctccaaagctgacttcacttgttctgggaaacaccacacctctgcactgaagcagacaggaaagcaacatcgtaataatattcttttctaagccttcttagaaagcaccatcttgaagagttcgtgctgaacttatggggctttcctgtggaaaatgggagcccagaagagattttaagtaggaactaatttaattgggttctagaaagatccttgggcagccaggtggcagctagatgagagatgggcaagatcctgggaagagatagttagggatgctgccatgttcaggtgagagatgattgatcaagctgtggtcctgcttggagaaaagaggacaggagggccacaggcacacagagaagacagaatccactgtgaggggtgcaggtcagagacaataaggatgccctgggtgaatctacaggacaaggtttacaatgaggagaggtaagacgggggcatgggctgaacatcacagaggccatgctgagtgagaggcacccttgggacacacaggcacaggtgaccgcagccaagaaggtcagaacagtagcagaataatggctcctcagagatgtccacatcctgatcccaaactcacatggcaaaggggacttaaggattttgagatggagagagtatcctgaattacccaggtggcccaatctaattacacatacccacataagcagatagtctttcccaggtgtagtcaaagggagacatgacaagggaagaaaggtcagagagatgcaatgttgctggctttaagatgggggaaagaggccatagccaaggatgtggggagcctctagatgatggaaaaagcaaggcgatggattctcccctggagcctccaggcaggaacgtagccccgctaataactttactgtagtcctgtgagacctgtgttggagttctgacctccagataggtaagataatacatttgggttattgaaagccattatgtttgtggtaatttgttgcagcgacaataagagactaagacatggatgacagatccaggtacttagcctgcatacccaccacccacccctgccacacacacatacccgtggaccactgtcttcagccttaccctggtgatgcccagtgcgcccacattctcgctgtaggaggtggtgccattccctgtcccccaggcccctgccagcaggcagcccaggccctcgatgccgatgcctcggttgatggcatgctttggagggggtggtgccccaaccaggcgggcacaggcatgataatcgcctattgactccaccattgaggagattaccgctgcgatgatcccaaagaccccagccgggctgacggtggggaggccccactgtcctgaaaatgcaatgcagagggaatattaacccagaagacaacaggttactggaccccaaataatttctttccgagaggattctccggaaggctttaaaagatgggcaacacgtcttccagccccacaactgtcctgagactttgtcttgaacccctgcctcacccgtgcctccctgggggtgggtcccatgccctgaccttgaagtcacagtgcgcacaaagaaccagcaacccggccttttcccaggaaggccctgaagcattctgaagtccagatacttactcagggaggccgtagctccctagcccccgacgccacccctgcccatcaccactgaaacgtgcttattcacacaacctgagccaagaactgcagggaaaggagaccagaagaggcctaagggatggccttgacctccaacccagaaatgttctcattcagtcccgagcctcccttgtgtgggacccaccgagtccaggaggagccccagatgctggctagaggtcggggttcctctgtgcttttccccatcacaggctgttgtcagatcccttggacaagattctccccccaccccctggctctattcaccacccgctctggtgccctgagccccatggacagacctaggaagcgtgtgtcccaggcaacaagggcccagtctgctcattacctgggtaagggaagcgaaaccacggagcctggctcaggacgctgcctttggtgtcagtgcgggccaggtacccataggctgtgggtgctgaagggagggcgtcagtgactgtgagcacaaagcagagcagccacgagatgcagagccccagcagtacctgcggaagggaggtgcccttcacacctggtcccactccctgcccctgtccacacctcccagcaaggttgggcaaaagagagaattcaggaaagctcttcaaaatgaggaagtgttggattaggaaccctcccagtgacaacagaaatctgtgtgtcaggggataagtaacacagtaaaggaacacagacagtaaaccaaagggagaccttatgccaggtaaaggccgaaatgtccaggaaagtagacaaggcctgggtcagaaggactgcaagctgactccctttctactgttttctggtcacataacttgcttcaaactccttgagcctgagtttgctcatctgtacaatggaatttcagccattgctctgcagagcctgaagcaggatttcttaaagtggggtcctcagatgtattggtttataatctctggtggtagaactccagacatctgtatttttagcaatgttcccaagtgaatcttatgcacactgaacttctgaaccactggcctacagggttgtggaaggatcaatgagatcattacatggaagtatcatttttataatgcagaatgtaggtcataggtgaaccaaacctgaaaacacctttatggggttggcaactgcgcctgcttgacagattggaacaaattcaacagagaaggctctgaaaaaggaggcaccatctgaatcatccaggaaccaacgagaaagaacctaagcatcttggcccttcgttttgcacccatagtggtgattctggctacctcccccagggccatgctctgaggacatcccgggaaacatgaggaagctgtcccacactgctgaccactgtggcaacctggggcaagctctctgctcccgcaggagagaagcattgagggaggagctgtagggcattaagccaatgctcccaccacccatgggcagggtggggaggagcagttaggggaggccgaggaggaaaggccactgcaggtagagagcatttgacttgaggcccatcagggtgagcaagaggctgcccctcactctccaagtgagtcagctaagaatggcagtgggtggggagtgcttcttacagggaagatctgaaacaggtagaacttagaggtgtgagacttcttctctcgtccataaacgggcacgggcactgcgatgtttttcaggtactgagaaaa

SEQ ID NO: 34453 - DNA, 902 bp, Bovine  19866880545840
  misc_feature (1)..(1): n is a, c, g, or t
nttttttaaaacgcaatttgctgtttacccagtctatctacttgtggtgacatgtatttgagacaatctgcttcacattcttcaaagattgttaaaaaaactttttggtatcaaattgaagtacagattaaaggtaagaaggccaatcaacctgaaaaaaccagaacgtaaaatctcaaaagatctacttaattcatcccacaaagatctgcttaatggaggtagctggaaatataccaactccagctttggacttctgaatgtaacccaaatcacgcagatttctagcaacctcatcctcatcattggtcagtggtgtgactctccctcttaggtcctccctagaacagttggtcacgaaagacatctctgtgggtttcctgcatcggtgtttccgatctctttcctctttcccatcgtagcacgcacacgtgctgctacttggatggcaccctgcctgctggtcctgccaggtctccccaagaccaccaccatctcagcacgacacagcctatgtgctcctttgctgcacgagaggcttctcagttgggaaggtgtggcccacacaatgcaacagcacaaagaagcatcttctactgaaagccactggaagaggaactcttgaagatgggctggtcatcacacatggcaacgcctgacaataagattaattttttttctagtttcttcttttaacccgtcttccctattgttgaagatgtaaaaacccatggatacacccgatgactgttaccacaaaatatttcaaattcacatgcaacaaaatggaaaaacaaaaacaagaacaacccaagggtcatcatcaagttttctgttttatttaagattttagttttaattctgaagaaagaggtacatttcctttttttttttagttttag

SEQ ID NO: 34454 - DNA, 1882 bp, Bovine  19866880691157
  misc_feature (1)..(1): n is a, c, g, or t
nttgctattctttggaactctgtattcaaatgggtgtatctttccttttctcctttgcctttccccgtcttttcctttctcagctacttgtaaggcctcctcggacaaccattttgcctttttgcatttctttttcttggggatggtcttgatcactgcctcctgtacaatgtcatgaacctgtgtccatagttcttcactctgtctatgagatctaatccctcgaatctatttgtcacttccagtgtataatcgtaaggatttgatttaggtcatatctcaatggtctagtggttttcctactttcttcaatttaaaatttggcaataaggagttcatgatctgagccacagtcagctcctggtcttgtttttgctgagtgtatagagcttctccacctttggctgcaaagaatataatcaatctgatttcagtgttgaccatctggtgaagtccatgagtagagttttcccttgcattgttggaagaaagtgtttgctatgaccagtatgctctctcggcaaaactctgttacccttgacctgcttcattttgatgttaattaaatggctcttaatgttagtgttaaagtaatagctagctatggtgtaaaaaaagtttttcctaaattttccgtatgcaaacataagttttactaatttagattgaaggacagtccgaattagcagagtacttctttgtatacacattgtatcaaacacatcagattgcttttgatattactaacttataaattatagaagatgatatggaagacggattggccactaaagcaaattcttaataagtctggcttattttctaggttgctgttctctggttttagtaaactaatttttttaaaaaggacatgacttggttaaataagcaggagtgctctaagtgtagaaatgttcctaaaactctaaagtgcagtaagactcctaaaactcacttaaggcaggcaactgtaattttaaacgttttttttttttaagtgtgtatatttgtgcatatgtttaaaatctcagaagtataaatgccaaattgactagaagagttaactaagtgatatggatgggcaaagggcagtggggttcaattaaaagggagttttgctctatttgtacagcttgaattttcctaaaacttcattacttgtgtgactatagttaaattttttaagaacaatgcttttaagaaaaatatactcaaagaaagtcatattagtacaacacaatgatcactagttggagcagggttacatgctatatttaaagtgtctaaaaaaaagagtaaacaagaaataaactcacattttaaaaaacttatagactagatatttaggtcaaattcttactcctccataaaatacatttccatttctaggactgagtatttttagcagtgttcactttatatttcaccatctgcgaattttccagggaactgaagtgcatcactttaaagcagcaaatcctatgttcctactatgtgtcagatatagtgttaggcactgaagatggtgagttggtgatcataatgaagttactgctgttgttgttggggggcggggagaaaaattaaggactaatgaatttattatacactcaatgacctttactctatttagacaggcaaatttcaggttcttccagatttaaaaataagtcagctatgttctaaacatagctgtgcaaactactgtgcaattctgtctactccatgctgttgcaactttccccatcatcactatgagccaaccttttttcattaacagtctatgatgtaaagaggtaaaatttacagaaaacttgaatgtcttgaggaaaatatagggtagaatgataaggatagtcaagagcaaagagaaaatataaat

SEQ ID NO: 34455 - DNA, 2028 bp, Bovine  19866880719782
  misc_feature (1)..(1): n is a, c, g, or t
ntgcagtcatcaaattcttattttcagcactgtgaagtcaaaatgaattcactttgggatctttaacacatctgaagaagataagtgctttgatattttgataggaaatagagagctgagatttcaaaatatttttgtatggtttattgcagcttcctaattttatgggttttttgttgggagggggagatagtttgaaatactttctgctgggttcagtagttgaattcttcaattaatagattatttctaaaggagggtttttgaatgtgaattacttaaggtaaacttgttataaaatttgtttatataaagttctgtagacaaaccttttatgagggataagactataaccacatggcaaagtgcagaaaaattgttttgtaatgcccttcaacttcagtctgaatggagcactagtgataacttgcagtttattactttgtaaaagaaagagagcattgcttaaggatgagcatcttgcattaggggaggtttatttttaagatgatgttttatatatatatattaagttaatgaaaaaataccttctcagtttaagcactatgattttagaaatcttccctttctctccttcactactcctgtcttaaggttaagccacactgttgatgaaaacatttttttttctttttggtgcctgcaaatagcacttgattgaatctgtttcaactcagtgttactatttttatataccattcaagtgaagtagaaagttttaatttgtaaaaacttaaacatttgctgaaaattcagttagttttttgtcattagatatactactgtcttctgactttttgtgaaggaagttacattcatctcagctggttctaaagaaaaacagtagggaaataggttatagagatttttggtgctctagaaatagtataactagaaatgtactacatacttttctcaaaggatttcttaatctaagtgaaacttgtaaatggttttcatcccactggagtagcatgtattggataaaatttgttaacacattttgagattaaaaaaaatctgtgtttaactcagatattaggaaaaatgtgcaaatggcccattctttgtggtaatacccatgatattttaaaaagtaatgttttttctcaaaagtcaagagtatacaaatgataaagatgggcattatttactcagtgatgtgatgaaaaaagataagtgggacctttaatcctatatttagtggttttatgaaaatgtttttgatatttatgtggtcttctttattagaaaagattgtgtggtaaatgtcaactttttcaggtgtaataatattaattcaataggttttgtctcatttctttttcatagcatgattcttgtatttttttaatgagaaagtagtttatagaagagaaaatttcaacactcttttggccccttagattagctttcctatctagcagtttttcttttactggaagagggaaattacatgctactaaaaagaagatcattacctttacttgctaggaaaatgaaactttaaagatagggcaagtacaaggcaatttaaatatgtttatttttcttctaagaagtttatttgtgagtatggtttcattctttctaaactctgtttatataagaaagttgtcttgttttaagctttaattgtattgggtgatggacagatgatgtattgctattaggataaagcttgctgtttatttgttgtgtagttgctcaatcgtgtcagactttgcaacccatggactgcagcacaccaggcttccctgtccttcaccatctcctggagtttccttaaactcatgtccattgagtcagtgacgccatccagccatctcatcctctgtcccgcccctctcctcctgccctcaatctttcccagcatcagggtatatgagatatctgttcacagtcactgggtttttagttatggtatctaaaacctaccctcttgaatatttagagaaattgtggagaaggggaaatcaaaataatcagattagtgtgtatatatgc

SEQ ID NO: 34456 - DNA, 1476 bp, Bovine  19866880738037
  misc_feature (1)..(1): n is a, c, g, or t
ncagcaacaaagacccagcacagtcaaatctaaataaataaatattaagaaaaaaaaccatgttattatctcagcccatgagcaaggtcaagggcaaaacaccagcagtctgcacctccttccttcctgttctccactcccccatcctgagaggacaactcctcagcacttttctgcctgccacatctactgcctggaggtagatacacacatatcctcctgatctaatctgcaacagttaactttatttagtttagttagcacttagcgaagcaacagttatgaggcagatcaggccctatgctggtgttatatttaaaagcaacaatgtgtttcagcaataggaaaaaaaattacgcaaaatataatcacccctctacaggggaaaaagacacacaataccctctcttgttttgggccaagggcatgactaagccagtcaatgttaacaaatattgaggtatttggaaatgattactgggcaaccataaagtcttttaacagaaatagttggaaactcaaggactttggggcagaataaactggacaagagagaaactggcatcttctggctccttttgatagcaatgagataaagtcaaccaacgttacagcaaatgaactcagttaattcccaccccaggctttcctggtgactcagacagtaaggaatctgcctgcaatgcaggagactcgggttggatccttaggtcaggaagatcccctggagaagggaatggctacccactccagtattcttgcctggagaattccagtccatgggatggcaaagagtcagacacaactgagcaactaactggggcttcccaagtggcacttagtggtaaagaagctgcctgccaatacaagagacacaagagacatgggttccatccctgggtcaggaagatgccctggaggagggcatggcaacccactccagtattcttgcctggagaaccccatggacagaggagtctggcgagctgcagtcatgagaccacaaagagttggacacaactgagtatataatccccaccccactcccatagagactgaagatttctaatctagagctttttaaaaaggagctgccacctaatcacctttccagatgatctgcctgggttctctttttctaatctaattcccacaaattatgatgctcacactcctaccccctctccttttttttttttttttttttttacactcttagcaaagggatatagataccaatagccactcagtttgagaccaacatactcacaaatcatttgtacacaagtcctaagcaaagagaataaattcaaccaaagtctacaggtggccttttagttcttctacttgttatattttatgttaacaccaaacaactttaaatgattgacatagattccctgggaccctgaggtcacatgaacagttaagaaaggaaattttaaaggctattaggagcctaactgtggctgacat

SEQ ID NO: 34457 - DNA, 974 bp, Bovine  19866880808281
  misc_feature (1)..(1): n is a, c, g, or t
nactacttgggtttgcatcctgactcaccaatcactgatcctgggaccggtggtgcctgcggtctctttcactgctattatcatcatcatctgggtctttggctttcaatggctgttttttaaggctgctcaaatacctctctcccaacctgcctaccactctgaaccctgagacaagagcatgcttctatggagaaatgcgtgggcaatcttgacatccacgaggcgctcctttcagagcacagaaacttcccagggcttcacgacaacggctgcgtgtattaacccaggctgcacacacctggatgtgcaagctcctggcagagcctgtagttcccctgcctctggtcaggcccagagacacagaaaactcagactagaacagtgggagcccaggaggttcctagcaatttggaggcatcaccaggaggaagggagaacgctggggacagagcgaggaggggcacggcacacactcacagttctgagtcccccaggcggtccatgttggagacataaggaggcaatttgtgctggaccaaggcctcttcctcctctggctgttgctcctctttcttcagtcggtggatttcggcttgcagtgcaaacagctacatagaggtgggggtgagtgagatggggatgtcagctagccttccctccctggggaagatcagacacatcacgtccaaaaaccaaccgcattgactcaaaggccactcgccctcagccttggggagcccgtctcactctccgcaggcaggaaagataggtgaggctggtgtgacttgatgacaaggaggtgagaaaactaaagaccattagataatatggaacctacttctttttgctttttatcatttgacttgcttcccttttaccatttgacttgcttcttcccgaattcactgagaaaactagctccacccactcctgctttcctattgggcatctacagaaccagacgtttggaa

SEQ ID NO: 34458 - DNA, 1301 bp, Bovine  19866880808739
  misc_feature (1)..(1): n is a, c, g, or t
nctgagtgccagagaattgatgcttttgaactgtggtgttggagaagactcttgagagtctcttgggctgcaaggagatccagccagcccatcctaaaggaaatcagtcctgagtatttttggaaggactgatgctgaagctgaaacgccaatactttggccacctaatgggaagaactgagtcatttgaaaagatcctgatgctgggaaagattgaaggtgggaggtgaaggggatgacagaggatgagatggttggatggcatcactgactcaatgaacatgagtttgattaagctccaggagttggtgatggacagggaggcctgccgtgttgcagtccagggggtcacagagtcagacacgattgagcgactgaactgaactgtacacggcctaatcttattagcagccccatgcttcaactgtttctataaaacttctcatgaaatccctctgggtggagacacacagttttcgagggcaggagccactgtgttcccctttgcctggcaaagcaataagctattcttttctatttcatccaaaactctgtctccaagatttgatttgacactgtatatagaagtgtcaaatcaaatggcatcaaaatgcacttgattcctcttgaaatgctcaaacgtgtttttctctttttcccagcagaggggtgatggtgtgctcagctcccatgaaggtgaccaaggcagcaagaaggatggccagctcaagagttccagcagcagccacctggcttatggtatcctggatatcccaccatggtatctctgcatcttcttggggatccaggtaatgggacacagaagcattgggtgcaaggaggctctgtctcaaaaggcacatcgacacacacgggtcaaattagtcaagatctaacttcagttgctcatgttcttggcttccatgctgttgacctttaggggactcaaggttctcttttctcttttttttctattttctcccaaggagtttgaggatgggggcagggttttaggggaagattgttccctgtgctaagctactaggtcacatcaaggacaccacctgggccattgtgagtttttgtttgtttgtttgtttcaagttatcaattataatttgtttggaaacaactgatatgtttgataaccagtgcttggggaatattggaaaacacgcattgtcaaatacttgttggaatgttatctggtgcaacttttctattaactggtaaaacacatgttatttaacccaggccctaatgcttaagaatttctctgtagagaattccccaggggtcca

SEQ ID NO: 34459 - DNA, 3120 bp, Bovine  19866880893795
  misc_feature (1)..(1): n is a, c, g, or t
nactgggcttttgtttagagagcttattgggcagcttcctgataatgcctttctgaggacattttagcagaatcagtaaactggaagaatggcttagagacctttttttcagacagtgatgccactgttactgtgatgataaaatgaagtgattctgcttctcttggaaaacacggatctttcatacatggagatgagttttgtccctgttgagttgtactggtgtgtgagacagattaggatcatattatggactgacttgtcccttgaagtgtgatcggggcaagcagcttatttttctgaaactgttgcattctctgtacctacctcagagggcttccgtgagaaacagctgaaataatgtgtgatgtgtagcacagcgctttgaaaatcagccaataaatagtagatactcgtccaaacatgttgctttgggtctgaatactttttttttccaccccctgcactcacttttggagcaaaagtctatgaactgtgcaaaatttgttgttattctttggtcactcgctttgttgatgaaaatctgtagtatccacattgaccaaagcacctggcttgcaaggtttgctcttggatgactgaattgttagcagagtgaactgcagccttgaaggagagagatttaccatccttcagaatattcaaaatgccacaaacttagaaaactgttttcaaagacagattctttttatcacctacggagcattgttatttgtggatgtgttctcctagactggctgctctgggggtgagggtcacttagatgttgtaatattaggtttctataatcatacgttgtaattgaaactcatttggacttagagcttctatcagaagtgacacttaacctcgatgagggggatcatttcttccagtgggagccatccaggaaatgcccttcaccatgtaaactgctcccacagtgaacacaggccgacttcctggtcaccttcagagcccctctcctaattttaggtccttgcggagtgaaaaggagctctgagttctcaggcagggttatcttcactgagatagtgttggaggaacccagagccaccacggattttaggggatgtggtgaaggtaataagggcactgactggtgcactccctgggtgttttgtcgagagctttgcctcacaaagcaggggagggatgggaagaaccactgagggacatgccttttaaaaagtgaaaatcactgttgtcatttaaggagactttctgctactcctgactttaaaaggagggttacataaaacactactaaagttactcgtgtgaaaagtaagacttcagggttgatgttgggaacctaaaaaatacattgaactagaaaccttatccttaaactgtaacctccaaacaaaatacccaaagaaagagaaaaagccaaaagaaccttacttggcactgtattttatgaattgaagttaccagttgatgtctttagacctctcttctgataattaagcagtttttggtttaaagggacagttttgttttcttctttctaactcatttactcaattttcatttctgtgactctagagaaaagttaggatgtgtgggttttccagttgtccatacttggccatggagcatgtgtgacatgcatagtgttttcatttccactgagtggttcactccctagatactgtgctggtgtttgcttttctgctaagctctcccacattttaaatactttctctgttactcctcctgacggaacactgtatactgtactgaagcaaaggagacttttcttcagctccccagcctgaactttgcacatagcatttcccagccttactcagatgagtgagttcttttttcccccactgtctgttaacgccttgcctcgtggaaaggagcaggacagtgaaggggaaatacttggagatgttgcctggtcttaatagggagtctgtgaaacttggattttcacatgttctatttatacctttcctaaatctggatgccacatagtcaagcactgaagacctagcagatggcatgggagagaaacaggccaacagtgaagttttgtggaaagtgcctggggtgtggtgggacattgcaaaacccgagtcctgcgcccgcgtgtgaaaagtgccactcttacatgcacagctgtaccaggctgggctgagcggaaggcaccctgtaaatagagtagacggtgtgctcagatctgttcagtgagggcggccccaggacagctgcctgagctcttgggtgctctcagctccctgtcttaatggtggttcagttttctcgctcgcctgagagtgatcctagtgttgagatgcacttttcaaacaggtggctaaacatgaagccacctactttatttgggttcagctaaataagagatctactctgacagtggaggaaaaaactagccattttttacttactaaaatggcacacgagtctttgtttcatgtgaattctaacataaaaggttgtatactgtgtacttcatgggtgacttaaaggaatttccgagacaactttaagcaaaatttgatgtataatcaagaataacaggcaactctacttgggtttttgtttctcagtttcatcagctataaaatgagctggtatcaggtgatcatttacagcttttccacccatatagagttgtgatatgagaagagaagaatcagatttaatgtatttgcaaaagacagcactaccaagcagagctgttaggtcctgtccagcagcagagcgattctagaagacaaggagttgtgagtcacagctgatgcttgttagtcacatctggaatgagcaggctgctttggactgaatctatggtctggggacagaacagtgctgttcggtctgctgaccagaccaaaataaacaccctttctgaactgactgctcgagagtgttagccgcctgatggacgtggcagcagcttcgtggagctgctctgctctctgtttcagaacgagtcagggtctcaaatagctcaataggggccaatcattctaagtcaactgaattcttttttttttttaatttatttttggctgcactgggtcttcgttgctgcgtgcgcgctttctctctagttgctatgtg

SEQ ID NO: 34460 - DNA, 1393 bp, Bovine  19866880963219
  misc_feature (1)..(1): n is a, c, g, or t
nacaggcaatccaaggacagagctgaagtctctcttttcacttcctccttctctgaaatgggcataatgatgggatgcatgcatgtgtgcttgctaagtcatttcagtcgtgtctgactctgcaaccccatggactgtagaccaccaggctcttcagttcatgggattctccaggcaggaatactggaatgggttgccatgccctcctccaggggatctccctgatccagagatcgaacctgaatctcttatgtctcttgcattgacagcgggttttttttaacccactatctgggaagccccataatgatgggataccaaggcatagaaggttgagaacatgtgttttgccagttgtttcagaaggctcagaatcaaccccatgcctccctcctatgtgagtcttgcagaagtgctcctgatggctacttcccttcttaaatcagtgttggagtcacatgtccaggaagtcttccctgaagaagcaggctgggttagggtgccctccctctctgcgttctgctatcagagtatatcaccagtgcatttattaccagtttccttgtcagtctcctcctaggctccttgggagcctggcatgtagcaagtacatttcctggcatgtatacagcacatacttcagcaagtttgttgatctgaacttgagctttgagtcgaagaaaagatcaataaccatttcaaaagttttgttgttgttttacatttgttgttaatacccggtgattccgccctttaggcagagctattcctccaaattttaggcatctttgggagtttctatgccttattcagatctctgggtcatgacttagtgttccggggaattcagaggggaagaaaaatcatttgcttctgcaaaccctcatgtccgccgttctgataaaggatcccagctgtgacaaggagattatttacttgaaactaatgaccaaagctaattactgcagttgatttgggcagggacagagtgttccggagcaggctgttggcaaatgtccccaagtctccaattcggcaactgagccaacgagcccactcgatgtgccagtgctttttggtccttgaatctcctgttcaatagcaaatagactttagggttgtggtttggggctcagttgcctgagaggagccaagattgagtttctgtggcttgttctcattctgtctggttccagtttttgtaaaagatacaataaaataattaaagtctgacctttgtgagggtgtgggattggaggtctacccctcacttccacaacttcctccttcacaactcctccacaggacagctcccctcctccagaacaggaaacagacttcttggggctcacaaatgccaggttcccaggctcaggcgatttgtttccttctc

SEQ ID NO: 34461 - DNA, 1227 bp, Bovine  19866881003783
  misc_feature (1)..(1): n is a, c, g, or t
ncaactaaacaatgaacaacagcaatatgtatatggatgactgattcattttgctgtacagtagaaaccaacacaacactgtaaagcaactccactccaataaaaattaatacatatgtaaaaaaagaaaactacaccaaaactctgagcttgtctcccaagtactccttcatctgcttctcagctactactggagaactaagtcaggatgggatccagcaaccacctctggacccagaaccattacccctttgtctccagcctaactcggatggacccatcagatctctctctctctctctcactttgagaatccggttgcccacccctgcaactggctgtgattagagcctcatggtgccaaacacagtggatctccctaattctgcagtcaagtgctctgccttgagctatacccctttctccctaattctgaatttcaggaggaaggcacaaatatatacaacagattgtattaatgtttaccaaacattccattcttccatcctatgggagaattacacattcttgccctgctgaactcaggaatttccccatgacttgttttagccactgaaatatgggaggaattgaaatgtgggacgtgtgtccctttggagcagaaactgtaagaaccagagtgtggtttgcctgaaccttttttcctctgctatgatggccaaggagtgcttcatatagaagctgctccactagtcaggatccccagacatcaagaagtcaagccatggccaactcaggatatataggtcacatgaatgagaaataaatttgtattattgttgttgggagtcactggaagtttggggttatttgttaaagcagcataaccttgcaaattctaactaatatccagttcttctctccctgagtacccagggatccttgtgcaaatgagaccaccttctccccagagcatttcacaccaaaagagacttctccaagaattcattttgcatctcctctccaagtctcctgcctgctttacatctgtttagtaaatgaggagtctcaacatgtgccttgaggtacccttcagcttcaacttctacagaaagtgtttggtggtaaaatttgctaaaaatgggggaaaaataatctctcataaggcagagccactgcttctgttttccccagagtggcttatacacagtggacaccaatgaatgcttgtcatctgggataattctgagaagaattcacagcatt

SEQ ID NO: 34462 - DNA, 2298 bp, Bovine  19866881139320
  misc_feature (1)..(1): n is a, c, g, or t
ntggcttccctgaagattcttttcctgctgtttcctggaccaaggggagaagcctaccaataggactgtaatcaggcctggacagcttgtggtgctttgacctcacttcctgctggaatgaggcctcacagtcaccttgggaaccctggtagcaatcctctgcctttcctagggaaagattaaaaaaaaaaaaaattttttttttccccctgataggttgttttctgttccaccagcagggtgaggagttaacaaaattatttgccaagtacattttggccacttttcacagaaattgtttacatagcgaagcccaacaaagagatagcaatctctttctccagccagtttccgcaaaatcaaactttatacagctgggaagagtcaccacggaaaatcgctttgagatttttggcaagtctggctgggctgggttgggggagggaggtggcagttgagttgctgacctctgatctgccttcaggcccccagggctctgggctggagccacaggcctcagaaagaatggagatgttctttgggatcatgagaacatgaatgtcacctcactcccaaggcagaaagctacatgttcttgcttcttaacgaaaaaaaaaagtgttatttatttggctgtgtgggtcttactagcagcacgcaggatgtagttccctgaccagggatcgatcccggccccctgctttgagaatgtggagtcttaaccactggtcgcctctttttaaccaagtatctgagggtgctgtgcctttaggctgtaagaccacagcttttcaaagtagcaaggacattttagtcctaaactctctctttctgagaaaacacaactgttttttatgtgtgtgtgtgtgttcaaaaaaaccaagctgcttcttgttttaaaatctccccagatgctcttctgacttcagggggtcatccctccttctacatccttcccatcagcactgtgaaaacaacttctccccttgtgcagctcagagactctgtcactcaccccaaggctcaggcatggggcctgtttccatgttggcccagactctctctgtccacctcttaaaccagactgactgttgtaacccacccacggccacctcaccccaggagacagtgcaaatcactagagttgacaactcactgatgtatctcagccctgggtcacaacagaagaattgtctctgctgaagaagccccagagaagatcctccccagggcaatggcacaatcctaggaccagccttttctgaatcacaggaaaaagtggatttccaagaacttccactgaattatgctcccctctgagaggctgcaagggagagggtcctaaacaccccaacagggacacccacacacagtctcatacccctcctcacctggggctagatgtgcctggagcttcacttttgtccaggaaacttgccacatcgaaggcttcttcaaaaaggatctgaaagaaaccacaaaacttcacgtgtcagaaatcgccacactctgatgtttgctctgggctgccgagggatagaaaggctccctaccttttgtccccaaaggggtgcatgttaaagctgagtcccaaacccagggtctctgcttggtgacctttacaggggatgaatattaagttcttgaccacccagaaaaaactgccaacctcagagagtggctgagagatggggaagcactggggaccatggtcttctctttctaaagagggtgggagcttaggagggagaggtaacagccagaggtgagcctctgtttacacaggaaagggctcatctacaccgcccaagggacagactgagcccagcatccacaatctagcagtttcattctaggggaacagaggttcaggggctcgggggttaggttgcagagagcccactcccagggtggatatgccacagtcaacccgctccctcccacgtccctgccccaacctcactccaccttgggagtcccttgcagtcacaccagtcacttggggtgcttgttaaaaacagattctgagccatcccctcaaagactcagattcagtgggtctagagtattagccaagcacctgcctttcaactaaactccacttaagtagtctggagggtcaacaataactagagaccaaagggccgagatttgggaaaaaaaaaaaaatctgtgataaaggatgcaatccttagagcaggaactaggcatcctggataggtcctcccacacactgggctcgtctgtgtattggaaggactggatgaggcgacagtagttttccatgcctgggtcctg

SEQ ID NO: 34463 - DNA, 1656 bp, Bovine  19866881202284
  misc_feature (1)..(1): n is a, c, g, or t
ntagcaagatttttttttcccccagtgagaagatggttgttctttgaatcagagagcccagaggtgcaagggactgtgagaaggaggagctttcaaggaggttccagcccacatgaggtaatctgatccattctccttcctggcttttccagcccaaactgtcaaaagctctccatgagtgcaatcctggagataaacctgtgggtggtgtacatttttggagtagggaagattcccagggatttatatcatttactccaggcaagtgcagggctgagccttgaacagggctggtcttaactagaagagggaaaagaagtgactgccaggggcaaggattatttattcaccacattcacataacaacccagctgtgggaaatggacatttcatttatttgttgtggtggcaactctgtagactcccaaatgtttatgagtatgaatcatttttatttcatctctgtggacttagtctctagcaagataaggaggcatcttgccgaatctagaagtgctgtttaagtgatggaataaatttaaattttttgagggtcaagttatttttacttttgaccccagacaagctctctcttccaaagaaacaatctgaaaggtttatataaggtattcaaggttctttggatcttatgcaaacctgagtcagtcttactcaggtgagtctgtaggtatagtagagctttgagaattaaattttctataaactagcaagaaatgagagaaaacagtacttgatatgcacttgggactctcacagtccagaaacttagaagtcagtgttgttttatgggcaatatttcaagctccatataaacaattgtgttcttttcctacttctttcttgttagagatttctttcaagacttgaaattgaaatttatacattatttaccagaattaagctttctaaagtgctcatggggctttcctgatggctcagtggtaaagaatctgcctgccaatgcaggagacctgggttcaatccctaggtcaggaagatcccctagagaaggaaatggcaatccactccagtattcttgtctgggaaatcccatggacagaagaacctggaaggctacagtccatggattcgcaaagaatgggacatgacttagtgactgagcatgcacgcatgaagtgcttatgactcaaataaaccagacaatacgtcacgtaaaatcacataaaatcaaacatatggatgtcgttacagttaaaattcccacttgacatttctgctatccccaatcctataaatagtaccaacaatactgaaaaattaaatatattttgcaagtagcagaaattcttcctaataaatttttatggtgatttactaatggaaattgagaatacataagggtaaagcaacagatgcatgaaatcaatattcctcataatgaaagctcttagcaagccaggaatagaaaggaacttctacctacctaataaaaacctgtatattcctctactaaaaagcctatacttaattgataaaagaccaaatgctttctccttaagataaggaaccaggctgatgtctgtctgctctcaccatttctgtttaataacctactagaggtcctagtggagaaggcaatggcacctcactccagtactctgccggaaaatccca

SEQ ID NO: 34464 - DNA, 1758 bp, Bovine  19866881258851
  misc_feature (1)..(1): n is a, c, g, or t
nggaagtgcctcagtgtcttctcttgcctgtccctggtcccctctgtctttctactgctcccctttgggagtccaaactcctccagtctctcctttgctgtgtctggacagacagacgagaccccgaagctggtgcctctcagtcatcagtcttgcttccgtctgtgaaccttcctgacttgccctgggcccatcactactgtatcttgggcttgtttcacatgccagttccctctcacccaccccggcatcacctggaatcttccagcctgtgaccccgtgttaccttcagcaaagggccctgcagggttcctgtgccagctgtttttttcctcttctagaggaattgattctttgtgatcctctgagctgtaacctcatcaggctgaaataacttgacactcccatttgtctgacacagaagtcatttgtctcccaaaactcagggtcagggtggttgtgaattcctccccctggcctcctcttggagggttgtgaccacttcatcaaatgctcttgccttgcctctgagaggttccacgaccagcagggaaggagagatatcccgggtagagagtgagaaagctataggccaggtggggctggaaatcaatccaggactgttcttgctgagagctccttgccaccttcagggaatccagactcacccaatctggctcaaaaggcaagacagagttctgcagcggtctgctaacccagaggggtcaggactggccagcaaggatcctggctcttgggtaactggcttcatcatagcagcactgccattgtcatcaggtatgaccacactaccgcaacgctgtccacagagcagcaagtgaggcataaggaaaactggggccaagtccaaccctgcccctcagtagccctttgggcctcagtggcttgactccattatggggataatcatagctatttcagggggcaggtcagccaataaaatgagttcatcatcatgaaaatggaattctccaggcaagagtactagagtgggttaccattcccttctccaggggatcttcctgacccatggattgaacctgggtctcctgagttgcaggcagattctttactgtccaagccaccatggaagccccaaaagtgtgttctgttagtcattcagttgtgtctgactctttgtgaccccatggactgtagcccaccaggctcctctgcccatgggattctccaggcaagaatattggagtcagtagccaattcccttctccaggggatcttcctgacccaaggatcgaacctaggtctctggcattgcaggtggattcttaattgtctgagcaaccagggaactaaacagacctttctcggcaaagtaatgtctcttctttttaatactctgtctaggtttgtcatagctttttacatcaaggagtaagtgtcttttaacttcatggctgcagtcaccatctgcagtgattttggagcccaagaaaacagaccctctataggctgagtgatggggcaggggaagcatggtgacccagaacagcatggaggcggggtggtgctgtcccaagatggacaagagagtactcaacagaaaaaggattgcaccaacatctcttccagactcacccttgagcatacggaagaggacaaggggatcccaggccatcctgcttaaagaggaggcacagtacatagtggtcccatgaagcaaaagatgagcacattccaggggacacatgagagcatataaacatgcagagcatgtgg

SEQ ID NO: 34465 - DNA, 564 bp, Bovine  19866881305748
  misc_feature (1)..(1): n is a, c, g, or t
nctgttctcatacttagaaacccactgttgagatggttgtttagatcattgttcctgaagacggggaaacttgccaagggggcttgtgatataataattactggtttagacaaaactatagtgtttatctctgctatccctgacttctcttcctatcccttttctagtttttaggtactaatatcaaccctgtgtgaccagcgcttcaattgctattatagaaagtaaaacatctgacagtcattcattctgaatattatcttagaccagagggagaaactcagttaaagcaatgatgactgcatagaaataaatgtctagctgcagatgttaggcatccactgggatagtttaaggacactgaactctcagaagccttcaaaatgcatcacaggggctctcctgtgcagtcctagacgctatgtcacagatactatgtagactgtacggacacgactagaaactgtcatcaaaaagtcgcttttacctgttactttaattcaaaatcaaaatctgttaagatggaggaaagggaatgaggtaatctggtagaagaaatctggt

SEQ ID NO: 34466 - DNA, 986 bp, Bovine  19866881316246
  misc_feature (1)..(1): n is a, c, g, or t
ntatcaggtgttttgtttatactctgttttgcaacttaggccttcctgctaagaaaaaaaaatgtttaacttatcatcaaaggtggataaacttattgatgttttaggtaataaaagaggcactcatttcaacacgaaagacttggagtcaatgggatatcacttttgtgactctctcttggactactgtgatccagaccgaaccaaggtaagtaaagtccgtttgctcatacatcagactccagacgcccagataacatcacctgcctttgggcctgcagcagtttgttccttctaacatcctgactgttcattcagtgttttgttgtacttgatgttccaggtgtctataaatattcagttactttaattaggaaataagttatttataattaacttacctatcattttcccctagtactatcaatgcctgaaagaattagacgaaatggagaaacatataaacttggaaaaagtcattgatgattcagatacttctctgaaagaaattacattggatctagagactaggtaggtcaagatagtgaaagtaatgtaatttgctgtgttattctacatgctctctagtggttaggattcgactctcaccaccacgaccagttttccattcctggttagggaaggcctgttataacaattcaaggatgtaattgtcagtctgtactgaaaatcctggctagagatggaggaaaattttccccatgcacgttacttcagccagaacttatcaagacttcatttattcaaatgatattgagtacccactatgtactatatgtgaaagacatctcaaattgtttttaatgctgtcattacccacagagaatcgacacatttatagagacaccatataaataatctaagttagtgaatgataagtgcaaaatttaatgccaagggaatgttactggaagaaggaaggtactaattttagtgcagttcctataggaaaatcagaacaaatg

SEQ ID NO: 34467 - DNA, 1336 bp, Bovine  19866881319442
  misc_feature (1)..(1): n is a, c, g, or t
nattcatctgtgagcttccgagcaaatataagtggtattttgattatatgcaggttatatgtgggttagggattccttccaaattgagaattgattattgactcagtgttactgatgttcagcttaattgatgacattttatttatagtttgagtggaaatttcctctctggctaataccagattgacttaatatttttggatttggtaagttctttcttttaacatttctagaatggtaggtatcagaatacattatcttcttttgaaaaccattaggtatataagcaaaagaaaaatcggtttttttctagaacgaaatccctcattttttttcataggaaaaaatggggctgggaaaagaaatgacaaagctgtgcacataaatgcatttggtaacactcactgtcattattgtttacattaagaaacagaaagctagaagccaagggtggcttatgatgtctgttttggtgaaagcaaaattaaaatgtcctgagtaatggcataaagtgaagaaggagcttttgctataatcagactactgtaaagtaaagaattaccagaaaaccagacaggattacatagattagatacatacatctcaaatttaaacatgaataatacattgtattcataagatatatataaaaatgttaaaagtcatagtagcaatctcatgcagcaatatacctcttacttgcaaaagtaataatacctcaaatgtaaatataaatacatacagctggcctttaaatcacttttggagattactgcattaattgttgatttttacagattttatctgtagtacttgaggaatcttatatttgacattactttcacttgattgtgataaatggtctgtttcatcaaatgtaaaccaaggttaggaaaagatacttataaagctttgtttttcctttcagccagttaagccacaatttggggaaactgaattaatccctactcttttgagatttagaagcaattcatgtagcaaaccttgggttgagttataacctgagctttttttttttttttttttacaagtattacttttagtttatattagtaggaaaatatttaatacaattgatcttcaactctaagcaaaaaatacatttcatttttctttgtaatacactggtggagaagctttctactatgaacaatctgaatgggtttagaaacctttggcagtcatgctttgctgaattgtaagctgtgtattctaggagaggacagtctggcagaagaaggtaaatgattttaatatatcttttcttttgtaaagctattttgcttcaataaaaaatgttctcaagtagttttct

SEQ ID NO: 34468 - DNA, 1124 bp, Bovine  19866881325697
  misc_feature (1)..(1): n is a, c, g, or t
ntacgctgcactaaaagaacatgcaaaggcagtctaaagaatgacctgcgcctatgtttagggaggcgctaaggtcctcttgaccccaccaagctcagcaactaggaccaaagagaaatgttcaacttcatgtttttaaaaccttcctctctctgcttttcaaagctatgtaaacaaaagaggccctttctgcaaaaagacaggtatcatcttgtgggccaaaatcaggtgctggcttttattagcctccacctgcatctccaagtttagttaaatcatctcaattggccatctcacagaatgccttctatagacttttgcccacagggttgggctacatgtaaattatagcttcatggtcctctccagaaacacctgtggtttccttctgtgttaacataaccactgaagctggtctccaaagatgtaaagatcttctggtccctgactgagatgggtagcttcataattttgggtgtccagcactctccggcaaagctaagtcagattcgaagactttgcctgacctgtactatctgcattccacgactcatgccatgggataggtatgagcaaggtctgatagttaagagactaaggagaggttctaagagttgtggatattaaatcaacaggaagaaaaaaaatatactcctggtctacttatgataaatgactcatctcatatttctttattatggattttttttctctttttctataaatgttggaaagcataatctttcatcttttccactgaccctctcttgtgatttcactcagggtcattaatttacaaaaacattctatatattgataacttccaaagttataactccatatccaaaccaacttgaataaattcacctgtctattcactatctccatttagatctctaataggaatctcaaacctaacatgtttaaaaccaagttcctgatattctcaaaaaacctattcctattacagtcttccccgtctcagttaacagccattctctacttctagttgttcagttcaaaatcttgctgtcatcctcaactcttctacctgtattgttataaaacatatttatatatatagttttgtaactacgtaattaacacttaaatagatctcacct

SEQ ID NO: 34469 - DNA, 1821 bp, Bovine  19866881365283
  misc_feature (1)..(1): n is a, c, g, or t
nttgaatgctctgacttcactggtaaactttccattcctggaatatggccaaattcattcccacattgggatcttaacacaggccattttttaaatgggtagcagcgttaattgctcagtcgtgtacttttcggaccccatggactatagcctgccaggttcctccatccaggcaagaatactggaatgggttgccatttcattcttctctcttctttaaatgggtgattccttccaatcctttaaatttcagattaagtcatctctttagagaggctgtccaatttaaagtaaatcctctcatgatgtatctatttctctgttctttttccttcttaatactttgacaacaaataagtagagttttacttgctttttaacttattttctgtctttctttttaaactctaagatctttgagggagcttagtgctttgctcacttcgacataactcaatatttagcactcaaataccaaatcattaaaactagaaaagataaataagaacaataaaattccaagcaaatggatttttgggagaaaaaagcctccatgtaaaatggcattaatattcactgatacaaaagcaatctggccataacaagggtcataaagctgaccatttcctttgaccctgtagatctatatttgagactataagaatataacttgaatttttaaaaaaatatccatatattaattattagttaaggttaaaaaatatgggaaataacccataatgttttctgttttcattctccttctccagcctagataaacccaactgtatgttgtttctttggcagaacccaagcagataagcattattagagataaaccactaagttaggcaaaatacattcggcaggacttttaagatcacccaactcagatgggcaatcatttccctgaaatactgttgtgttatggatgaagctgttcttctccctacagatgttatttcaatattcaccattctcctgggatcaaaggagccactgtctacaaagccaaataaatcagaaaacctgagagttactcatgggactgcctcctggtccattatatcactaagtcctattgtttccacctcaggaagcagatcttgaactcatcacgtctatgctatcttcactgccaccactatcagaaccacgatacggataactgaaatgttctcttaattagttgctccatttcattctatagcttttatcctatccattgtccacacagcagattgatctgttttttaaatgtataagactaattcatacacataatagatccatatagcaatttataaagacaaagttgtatactccctctacccctttccaactgaaactccccaaagtaaccagctgcccattcttttctctgtgctctgcataaatatagattctttcttatttctaaaaaatgggtaacattatacacaatatatcatgttataatttatttattttttacataataacatgtcatggacattccttcaggttgatatacagttctttccctttctattttttatatagctgtatattattccagagaatagaagtacagaaattaaattggcaacttcctcagtgacaaacattccatagcatggccttttaaaaatgtaagtgagatcatgcctctttccttcaaaactttccttttcctgtggagtaagatccacattacctacaatggcctgcaaggctctggtatgataaggcccttgcttcttttaaattcaccttatacccccacctcgccttgctcaccataatccatgctgctgctgctgctggtaagtcacttcagtt

SEQ ID NO: 34470 - DNA, 2760 bp, Bovine  19866881402617
  misc_feature (1)..(1): n is a, c, g, or t
nagagtgaaagttgctagtcgtgtccactctttgtgaccccatggactacaaagtccatgggaattctccaggccagaatactggagtgggtagcctttccctttattcccttgaccaggggatcttcccaacccagggattgaacccaggtgtcctgcattgcaggcggtttctttacaatctgagccaccaggggatccctgagagtatccactctaaattgtccccagacctttcaggtattttcatggggcaattgggccaccaagaagccatttgaaaagggtatgaaaccaaaaattaatatttaaagtggaactttgctttttctttggaactccctattccagacttgtcaccctggggagacaggtggggtgggtccctggcactattgcactgagtgtaggcacatcatcagcgtgtgattttctctaaagaaatcagaatcttcaaactgaacacagtgaagtgtgttctagggattcttcaaagcattgccactcataagggcaactctttaaagatagtggaaataaaggaaaggacacaggtttcctcaataaggatcaaagctttttgattgcaatcctgttaaactctccggtgctaattactgcctggatgtattcagccgcgaagccccctcaagtttgccagcttgagcgtgaggtactccattttaatatttcaaaacctcttaaataaccacaaaagcaactgtttatctcaatcttcccttcaaacacctgcttactgatacttgattgtgtgttttgaggcttgtgattgagtctaacacctggctgatgaggctgacgttgggtcatgttttgaaacgcaatcttactatttcgtgcgccattccagactgcagtgcatacctccaaactcttgttgtttttaaaagataactgttagcgagtaatagcttgttttcactgaagaggtaatgaactttaaaacgcttacagtctgatgcggctttgttctttaaaacagtgggtttcaaagtgtggtgctggtgatgggggtgggtgaagtggacaggggacctaccttgaattcctacaagacttactgaatcagaatctctgttgtggggccctggattgacattttgaactcattccctatgttgagaaatgctgctttaagagaaggaagctttcaattgcgtcctcagtaggagctttctgggcagaaacttctggttctttacctgtgaaatgtctctgaactagagccaagaggtttctggttgttcccttggagagcgccaagcgtgcatgggagccctcgccttgctgcttgatgggcagtggccctgtgctcaagggtctgagagaggaggagatgtgcccttgggcctgtgatgggcacctgcttctccgtttcatttacaaatgagataactgaggccaaggaaagtaagagggctgactgaaggtcactcagggcagagatgaggctagagcctgggatcacaatccctgccccttgttcccaggccatggagtgaggcctctgtaagaggctgggccccgccaggacccctccccatcctttcccccagctcagtgcccaggaggctgacctgcttagcccaccgctggagcatcctactgtctgtcttctggctgggtttgggagacagaaaggagcctgtggatgaatgtgtggtgggctggcctgagagcaccagtcagtctggagaagggaagagcctgtccagccctcccagtttgcccaaactgaagggtttcccaggacttgggactttcagtgctaaaagctggacagttccaggcaaaccagagtggaggaacacctttaaaatttaactagagaaatgcttgagtaggctcagggctgtggttaataatcatggaggtgtaatttttgttaccatttaaaaaatagccacatacttaatttttttattaaaaaatgagagtctgacctccccttgatcatcagggatggggcacagttctcgaggtgctagccgactgtgttctgcctttgcctgggaaagtagtaaagtcattctttcctcctcctccataaaaaagagagagtctgtaatggaaaattaaaacattttaaaggggtatgttgctaagttagtctttcccactcttgacctctgtcagttttcttttcagaggcagttgtggccagtttctttgtgtatactttcaaaggtattttatgcacatttaagggcataaatgtatcatgtgaaacatccaaatggtagcatattgtgttctttaccttgcttttcttacttaacagatttgagattgttcttcaataggtaacagctgccacactcttttaggggttgtatagtattccttcatctggatttattgtcttttataaatgtatcaagccacctattaataggctttcagtttgcttctaattaagtgccattattaatacaaataatgctgcaatgaatatcctcaaatgtctgggtcaaagggaatgtgcatttaaaacaatgaagtgttggttgctcagtcacgtctgactctttgtgaccccatggactgtggtcctccatgctcctcccctcacagaattctccaggcaagaatactggagtaggtagccatttacttctccaggggatcttcctgacccagggatcaaacttgcatcttctgtgtctcctgcattataggcagattctttacccactgagccatcagggaagccaaggctgaaccaatttacactgctcc

SEQ ID NO: 34471 - DNA, 1288 bp, Bovine  19866881404891
  misc_feature (1)..(1): n is a, c, g, or t
ncatattaaagatatacatagaaatgtgacatcccagagatattgtagagcaggggcttcccagatggaggtggaaaaagccccacctcagggcatatccagatgggggaagtgactttatcccaggggaatccctggtcagtaaaattctgtaactctcagacttccctggtggcccagttaagattctgaactcccaatgcagggggtccaggttcaacctttggtcagggaactagatcccacatgcctcaaccaggagttcacatgctgcaattaagacctggcatggccaaataaataatttgttttttaagtctatgactcttatagtggcagaagaatgcctacaagcccctttttgaaggaagaataaactcttagtgaagcttccgcatgagtcagcactggtatgagaagacgggccacaagcttttcttctgattggaagagtctatcagctcaatgcatgggctgtaatttcaccaaaacacttgctcaaagaggcattctgttgaggtgtggcattttatagcgctttacagtttgcaaagagcttccagtgcatcctctcatttgattctcacaacccagtttccagagaggagatggaggctcagtgagattacatgacttgtcccaggtccccttgtaaatgggagaatgaaactctcctctcctggtcgagggcagttgctggcaggtgcattcctgtgtgtacagggacagcgtgtcatctctctggagcagagcagcagagcaggaggaggctggcacagagggaacagcagtaggaaggaggattcctggggggaaatgaatcccttggccttctgactccatccacccccaacacagcctcctgctccccaacttgccccctaggtttgcttcctaacacttccagtcaactgactctagcctttgggattgtccaggtctctccaaacatggctggggaatctgtcttccccatgtttatatccctagaagttgctaacaaagcaatatgcacatgaaaaccaaaacatctcagaaaagtggccttttaatctgggtgctgagaccgaggctttgaggaaaatgacaagacagttcactgaataaagacagatatgtgcccagaccctacctactggcttcaggtgtgctaaagatgtgggaaaaaatcacagctttcagaaatagagtcttcaacttatttcccaagttgttgttgttgcggttttttttttgcttctatgagatggtgaccgccaccgccaagtcacctcagtcgtgtccgact

SEQ ID NO: 34472 - DNA, 676 bp, Bovine  19866881450639
  misc_feature (1)..(1): n is a, c, g, or t
nctcttgggaggtccctttttatcattctgagacagttagcccgctcaggaatataacctgcagttacaaaatagaatgcatttcactgacttgatgaaaattaatctcttgcttagttcttacgagtaccacgtcctcaccaagaactctaaaatttcttttacacagccttcttgctatatatttggtatttatagaatatttgccaatttactgtaaaactatgaaataaccttttctaaaaactcagtctttttcttcatggtatcccttaaactatctttccaagtgtaactttgcagatttgtttttcaaagaactttctgccaggatgtttttattctatagagctaaaaattatttgggaaacaaataatagtctaagtctgtgagcattgttgtttcaaaatatacctagaaaaatatttgaaactgttcaggattagatttttgttcgtgtttttgtttattcaaattttacttaagagagggcatttaaagaaaattctttgtttctgaattcactgttttaacagtgacttgattgaaatttgagtcatttgtgaaacaagtcacttgtagtcattatcaattataattgggagaactgatctcatttcatgtatagttctttgacctagaagtagtcatcttactttcagtcaattggatcat

SEQ ID NO: 34473 - DNA, 678 bp, Bovine  19866881461825
  misc_feature (1)..(1): n is a, c, g, or t
ngctggtttaaaatgacctcctcctaggtctctctggctccagtaaattacgcacaggttgccgaggcatgacttctaggcttctactttcttatggtgctgcttgtgttaaaccatctaatgtctatttcctattttactgtaaaagttgaggccatgatattttcttaatctcatttacttatctggctccccctttcctttcttgagtcctctccaccttttcacctctcttcagtcagagaacaaaatggccctctttctatcagaggtcaatgctcccacctgtgtcctagatcctcccctctaaccctccccttccttctctaggctcttgctccatcacttagctcacttctcctatattcaagcttcctgtcttttctgaatttttacccatagcacataaacataatgtgttcaagtctttcccatcattaaaaacatgctcaagcaaaactttcctgtgacctctttagctgctgttctttctccttctggtctctttcaaacttcttgaaagacttatttctttaatgatctcctctccagttcgatcttcattacactgcaatttgacttctacccacacattctattgaatgttaggagccttcgagtacctaattgacaaatccagtgggtactttccattcatcatcttccttgacctctctg

SEQ ID NO: 34474 - DNA, 1074 bp, Bovine  19866881894949
  misc_feature (1)..(1): n is a, c, g, or t
ncttccctgggttgatggacgaggggaccaggattgccgtgagcacagtcgcttaccaaacagccggatgacgccgtcagctgcccccgtgaccagcaggttcccattgtgattgaaggctgtgcagttgatggcaatgggctccggatccagggagaactggagctaaaaaaggataaaccacatttaaaatgtgagacaataggaaaccaattccaaggcaggttctgtctgaaagggggaaggagaccaagattgaggaaagacacggcagagcataaaaaggatcagtagcgtcccactgttaaaccctgacaagacaggtactcattttacagttttctctttattccaaacacctgtgattttaatattctcttctatgtattcaatattcaatgaaaacattggaaaacacaagtaaacataaaattaaaaatcctgagaaaggccctcagcagaaaatgtgcttagtcactcagtcatgtctgactctttgcgacccgttggactgcagccctccaggctcctctgtgcatggggattctccaggcaaggatactggagtgagttgccatgccctcctccaggggatcttcccgacccaggaatcgaaccagggtctcctgcactgcaggcggaaataataagattaaaaaggacctgatcagactgggtgggataaggtagaacggagacgccagaggacagatgtacagatgtctgctggatggaatggggcaggagggcacatgtcattacccatctgtccaagcccaaagaacacacaacactaagactgaaccttgatgtcaactgtgcacccggggtgattacaatgtgtccgtgtaggtgcatcgattgtaacgagtgtgctgctccggtgagggaaactgatagcaggggaggctgggcacgtgtggggacagcgtgcatggggaaatctttgaaatttcctctccattttactgtgagcctaaaactactcatagcaccccttctatggccacaccaccctgaacgcgcccgatctcatcgatctcagaagctaagcagggtcacaactgcttagta

SEQ ID NO: 34475 - DNA, 1793 bp, Bovine  19866880120993
  misc_feature (1)..(1): n is a, c, g, or t
nataaagcagaaatagatatttttctggaactctcttcctttttcaatgatccagcggatgttggcaatttgatctctggttcctctgccttttcaaaaaccagcttgaacatcaggaagttcatggttcacatattgctgaagcctggcttggagaattttgagcattactttactagtgtgtgaggtgagtgcaattgtgcggtagtttgagcattcgttggcattgcctttctttgggattggaatgaaaactgaccttttccagtcctgtggccactgctgagttttccaaatttgctggcatattgagtgcagcactttcatagcatcatctttcaggatttgaaatagctcaactgggattccatcacctccactagctttgtttgtagtgatgctttctaaggctcacttgacttcacattccaggatgtctggctctaggtgagtgatcacaccatcgtggttatctgggtcatgaagatcttttttgtacagttcagagaactgccctagtacaatctaaataaactcttatgcatcatgagaggcattgctgtgatgagggatgcaggtctttcaagttctttcaattgaattttatgcatggtttcttttttagtccagctttatttctcgtggcttgaggtcattaggtcatgtgcttatatctgagcaggactgccatggtcagattaacattagtttgggcatgagttaaatgtttgacttagaggatttaggactaaatataaattgggagtctaagaagtgcttggatttggattgattggattggatttggaatacttgtagctcatcctcttatcctgacacagggactaggatggatggaatagatggtgaacttctagagagcattttcttcgtgggaagaaggttaaattgtcacctctgggagtggtacagatcctgataccaggcatgaggtctgaaggagggtgaccatggggcagttgtccctgggaaggcatgacaattaagaagagaaggggttaatatactgactgatgtttcagtttataagcactggcccttctctttgttctgttttatcatacacattcatcacgttcaacctggcaacccaaccaaatagctatttaagttgtaaaaatgaatcatagcacaatttcatgaactgtgtgatataactgaatctaatcccattgtacaatggggcctttgccagcccagtgtacctggttctagacgtctttggaataagtaaataaataaacaggctgcatgcacagtaacagtaaggtggctgggccttttgggttgcgggtccagaagaagaagcatctggccgtatcacattggaccgtggtgacttcccaagctagctcacccatcagaagcgtacaaatcatgttggctgtcttctgtcctctgaacacagccagccaattccctggtttattaagtaaatggccgaagaagtcctggggtaggaatagaagcctcacaaatgggagctgcaaaggagggctccaccccagttcagtttcacaggattccagggttcactgactttgaactaactgaaagatgagtagacacaaagtctctaccctaaggacccctgttaatgatggtgcctgctgatgcatcaagcattgtaggtgttttttttttgtctatttgactgtgtaagatagatcttgagctgtgagtaataccatcgggagaggtgaaataacttaaggtcatccagctaataaatgttagggcagagaactgaactatctgagtggtagaaaagg

SEQ ID NO: 34476 - DNA, 984 bp, Bovine  19866880418609
  misc_feature (1)..(1): n is a, c, g, or t
ncacacacacatttgatgataccaagctgctaagccagtcatgttatctttaattctgaagagctccttatgccaattaataggtctcccccttttctgtccatatattttcaaccatttggctggacattcagtgttcttcatagataattggattctatagatgcagtttatcctcctaggcacattctattttcaccaagggtgtgttagttgctcagttgtgtctgactctttgcgaccccgtgggctgtagcttgtcaggctcctctgctcacagaattctctagggaagaatactggagtgggttgccatgcccttctccagggggtcttcctgacgtagggattgaacctgtgtctctgatgtcttctgtattggcgggcaggttatttacaactagtgacatcttttgggacccccacttactggtgaataaaactcctttgcagacactcacatacctgatgtgtaaactagtggagattctctagtgctgtttgcataatgttatgcattccagccccacctttagtgcttggtgattgtgaggattaaagatgacttctcttacatcataggctgcctgttagagtctgacaccattctatgtcttttgcagcgaaatgctgcttctatccatagattatcggggaattccagccaggttccaacttccctgtgataatgcagtactttgtttccctagcaggttaggaactgatatccccattatgtagcatatcatgaaatgaatgctattgttaagtataaggacagaacatattagtggtatcttttattacacagttcattataaaagaacagctattgctagagtagtccccatttgataggtagcttgacattgttcttgtgctgttagctctgattaaggctgggataatgcactgttcctgcctgttacgtccatcaggaaacaaggcagacccgaggtaaaatagatgagcatatgttggcaa

SEQ ID NO: 34477 - DNA, 1206 bp, Bovine  19866880437875
  misc_feature (1)..(1): n is a, c, g, or t
ntttgtgtggaattacacttccttcgcatgcatccaacttttgcagggaggtgttagaatttgttttctgaaatcggttggacagaaacatcttgttgttgttgtgccggatttcttcaacttcacctgtatcatccaattctacttctccttccttccttctcttcccgtttactttccaggcctttgagaggatagattgtggcctacatatatttagaggttttcctctacctctgtgtagagtctaagccgctgatcttaaaccctcagcctcttttaccaccagggaaaaaaatagggagccctgtcttttgtaacctcattttcccagtctactaaatgaggagagtaatgccttcttgccagggttggtccaagtaaaagcattttgtgaattctgaaaaccactctaccgtaattatgaatgttgttttatgatcaattgaacaatgagttctccttgtagagttttcacttaggggtagtctttatacacttaagttcttggggccattggcatcaagcttccccgttagtgccagagctgttgggcctttgaagttatatgtattgttgctatgcgtgtatatggtgtccacatgtatctatttatctgtttattcattttcagagcagattagatatgtttaaaaaaaaacaatagaaaacaataaaagtctaatgcagatctagggacaatatactgctttattttgctactaatgaactatgaagaataaaataactttacagttcccccattctttgtacaaattatgcattattaagaccttgactaccttcaggcaggagtgaggaactctatattaagtcactttagagcagaaaatacctgctggtgtctcatacatgtgcaacttggtatatttactgtttgaccattgttggtggtcggcatctgcattgatctggtgtggcaagtttaagtgtgtttgtgtgtgcttttgttaaagacttgtatctgtactattagaggaacctgtctgtgttttaaatgctcatgttgccagggctttgtgatgatgcccacatattcaatagctctgggtactgtgttcaacagaattcatcaacagcactgctggagatggagcttgaagtcgagaagcattactttagctaacattgggtccatgttctttctagagggttttttcttggttctttaagccttaccatcat

SEQ ID NO: 34478 - DNA, 1930 bp, Bovine  19866880447411
  misc_feature (1)..(1): n is a, c, g, or t
nactgtagcagagcttgattgaaggggtggggtgggggcaggcaggagagacctgcgtgcaacccactgtcttcccttggcaggaagtaagaaaggctcggactaaagcgccagacagtgaaacagatgaggctgagctggaggaatttttctgggttgcactgagccctttataaggcagcattcgctttcctgccttcccaatactgacagcaacttgtgtttattctctctgtctcctttcttcccattttccctgcctctccccttttccattcatcactttccctctttctttgtctctctcagtctccttttcattcttggcttttgttcccttgctcatttttcttccctgtcttcactgccctggtgttctctttactccatctctgcttctacacgttctgtagtccaccccatcccctttcctttatgatcccttccacctccccccaaaaccttttctatggaatatataaataaatatatgtatctatattttttgtctgtgtctctgttggttgtgtcagcatattttagactgctgggctttgcatgttttgcagctggttttgaagcagttgtcagacagtgatggatgactatcatcatttaaagtgtaaaagaaaaagccttggcacagacaggcgtgatggactgccgtctgccagcccggataggcacggccaccattttcttctcctccctctctgctcacactgcccttgccagaatctacaaaagtcatcgtgagctgtgcagcaccaggctcttgccttctataatatcactttggtagttgtcagatcatatgaaacgtcaaaattcatgtggcctctgtgaagagatatatttagtacagctgctgcatacctacacgctccccctgacactgacatattagttatgctgtcttttgcaatctgatatctttaaatttgccaccttgttaagttttgattaatgtgattccatttcactaaagtaattggcttggcctgttgtaaaaaataatcagccccctctccggaacaaatgctagcacatgctaatgagggagtgagttcgttacattgatggcgtggactgacagttattaatgattgttatgataaacagacgagtgcgaattgggatgagttgggcaaaagtgacagtttaaaaataacgtatattggaaagtactaacgaagtaatatactgttaggaaaacaatcatgcaagttgtcaaggaaagaagtgtaattatacagccgcatgggctgcctaggaggacagggaccggcctgataatggacacattttttgttggcaagagggaaatatgttatggcagaaagaggtgcagattgataaattaattggtccttctcgcagctccgagagcaaacttggctggcagtcaccatgcagatgagggagatggaggttgcccagcgcttcttctctccagagtctccctggtccttgttgccaggcttttctgaagcctctcttgtgtcctctcctcacttttcttcatgagctgcaacaagttatagaaagtgcatcctgaggtgcaatggacccaatacaacttcgagcaggaattcttgcagctgtgtccagtatttttttttttttttaatttaaagacccccccaaacgtaaacatcctcttgttgctaaagtcttgggctgtgatggaggtaattatgggtggtttccagctccatgaagaccaggaggggctcacacaggctgggaatcattctgaagggcaaggccaactctgtgcttccaaggccagtgagttgctttaggttgtttgcatcgtgagccaaggcagcagtggggtgtgtgtgtgtgtctgtgtatagcgggtaagacttgtctgaagaaccaggctgagatgactgtgggcagtgggaggggtgagggaggcatg

SEQ ID NO: 34479 - DNA, 907 bp, Bovine  19866880473990
  misc_feature (1)..(1): n is a, c, g, or t
ntcagcgccaagcctatttgttttacctggccagtcggtaatgagctcgctctgtggatggatttgtattttattattataattacgccaccattataaacatacctcgagcaacctcagcataaaaggcagggaatgctattaaaacatacatataaacacacagggaaacaagacaggattgtaaaagggctgcaacagaaactaattgggtttgcttttttcgttaatcccagcctattaatatggtaagcagtgtggtctaaggagcctcatgctgggaacctgaagatgaccgctgcataccagagttagcctctaattgactgtgtgaccagaagaaaatgctttacctctctgtgtgtgcctcactgttcttaggggttaacaaagataatggagataactgtgagcactttagacatgtgaaaatattgataatttgggggaaaaaactatcaaacaaacagcatcatcattctctagctatagagaagacagacccaaaaagcagacagcggataaccctcatgtatgcatatatttaatgcaatgaccacattaagtatcagcaatttacttcctattttctcctttgatatgtgaagtaggctagacaaatattatcatcaccatttgaaagagaggctcattctgggattaaaagtgagattcagaacattgaagatgaggctcttctgacctcactatgctgcctcccagcactctccctttgggtaaaggctggagaatgtatgaggagataaaaaaaaaaaagaaactttggctagtgggacctcaatgacacagtgaccatctctcccagccctgtcctgatcagactgatggctcagctgaatgtcttaagtctgggaaagggaaacagacaccacttcacacaggcaaa

SEQ ID NO: 34480 - DNA, 1311 bp, Bovine  19866880536233
  misc_feature (1)..(1): n is a, c, g, or t
nattgttcttttctttctgatttctccctgacatttttggctggttctgggccaattattagaattccttgggaggtggttagttcctccataaaatgggtatcatcataaaatttttacttcagaaaatgaggactctattctgtggcctggggtgaagtccatgtgttatagtcctgttaaattaaagactcagtcttgcctgagaatgccaggactggatccttattatcctgtgcttctcaatagtgcagacttttctgcagaatagtgcaccccgataatgaaggcctggcggagtggtagggctgaagagggggatcagctcttagggcattagtgctgtatggaccctctcttaatgctagaacagagctctagagccaagagaaagctgattcttgcataattcctaacaggtcgataattagaaggaaaatcttcaactttgaaaagttttaaggaaatggaaatactcctttttagacatttgcttgggcttaactatttaataatttttgataggtcacgatactgcatttcaaggttagagcaactaaaatacttagagaatgggttctgattaattttctacttaacttaggggggaactatagattcttcttgattcaacttagggaaatctgatttccatgacttgggttctcactactgagtcattgttcttgggaagatgactgggtgcactgatccccaaataatccctggcattccatgacgcacacttaaaagatgcatgctgaaaaaattcattaccttgactcttttgtattcccattaattgaggctttgctcattggaggtggttgtgaagaggaagaggacataatgaatcacagagtctggccccttgttagcaaatggttgtaaattatggatgttattatatgaatgcgtttttatttttaagcaaagattgctataaaatatgatggtacctgtctaggctgaccttgaaagaaaatactaacagaactttgtgaaaccaaaatgtgcatggaaaaggagcatccgttcctcaccgtgagtaggtttcaaatctcttatttggaagatttaaatgtaagtttgaagaagtaggaccgaggtcacatcttcccctgtcggacattctttctgatgaataagtattaaaactgctttgaatttggtttccccctcagataaggatttattttttccatacggtcttttctttgcacctgaaggagcattgagggtgaaaaatagaggcctgtttcctgttcctaactggagccctcagaaggttgtcaaaccagaacaacaact

SEQ ID NO: 34481 - DNA, 847 bp, Bovine  19866880574070
  misc_feature (1)..(1): n is a, c, g, or t
nggacttccttgatggtcccgtggttaagaatcccctgccaatgcaggggacatgggtttgattccttctccagggagattccacatgctacagggcaattaagtccacatgccgcgactactgaagcccgtgcaccctggagcccatgcctggcaacaaggggggccacggcaatgagaagctggtgtgctgcaacaaagagcagcccccactcaacgcaactagagaaagcccgggtacagcaacagagatccagcacagtcaaaaataaaaataaattcattttttaactataaaaaagagctttaataatcaagtaaaaaccctcccacccagtcaaacaagaagggtaggtcaagtccttagaaatagctactaagattatcatcctatttctttttctagtcatgtctgattctttgctaccccgtggactgtagcccaccaggctcctcggtccacggaattctccaggcaagaatactggagtgggtcaccatttccttctccaggggatcttcccaacccagggatcgaacccaggtctcctgcattataggcagacgctttaccatctgagctaccagggaagcccaagatcaagttaaaaaaccaaaaagatggtttatctcttagattctaacaggaagggctgaattcaaactgacccttaggaaaagccatcacgtcctctgggagcagcaggtatgaggcctaatggcctgtcataatgaagggccagtccctgatgcggaaactaacaccaccatgtgacacagagggattcataccaccccttctcaaaaatggtgggcaaagtttgatggttcttaaaatcataaatca

SEQ ID NO: 34482 - DNA, 1822 bp, Bovine  19866880578630
  misc_feature (1)..(1): n is a, c, g, or t
nttaaattcaagaccctccatgagagtagaaccccttaccccctcaccccacacacaagtatctagcaaagtggtaagcacagagaaggcacgtggtgaacatttatggactggaatgcttaaaaatatttaggggtaactttaaacttgggcacttatttatgagcgttgagtgacaatggcaagccaaagctaaatgacccctatgcaaacccagatgatgagtaagatgaagaacatcctgagtggaggaagccagggtgttgcagaaacaagcagtaaaaagttccccagccttgcaaatacgttcagacttttactgctttataccagccccatgagcataactactgcctaatagcccctgaaagattttctggaaggtgaggatctcccagagagggaaaggtagcgagtgtgtgttggcaagagcagaacaattttacaaaggtttgaaaagacatgctcgttaaatttacctcactgagcaggccccaccagcaatgaagtgctctaaactcaggcaggactgggctttcttgagaaaatggagctgggctggagggctagaagaaaaccagaataaatgcttactggcccccagtagggatgttcagcttaatacaggtcaagggtagtatctgagaagactgaaaaatgggggtggcgggcagagtggagaaggaggaggtaagggatggacaattattgactcccatgagtggggacggggctgggggcaatggcttgtatttcttcaaacattcctctgtctgcagacaggctgtttcctagtccaatcttgtcagggtaggagagaaagccaggatcactaaggaaattggcagctgtttgagttacatacatatgaacgcctgcaggcaagtcttacctgcagaccagagggacttgccctgcaggactgtcctcccttggctatccccagaaagcacatcaacacggtggatgacgggacagagagctggtctctgaggacccagggtgggggtgaagctaagagaaaggaaaacgccaccacctctgtggggtaagagtcttggggcagtaaagaggccccagcctccgccctcacctcggcaaggccatttttcaggcgtgcatgcgtggggcgagcagacttgttcttggctagagaaagaggctttctcctcccagttgctccaggggactgtagaaaatacagtgcaagattgcattaccaatttctgttggcctaacacaatgaaaacccatatctaatttgctgtccactatcccccaggtccccttcagcatttactgctttccaaatatcttcctcccattgaatatctgtgtttcagattatttgtccccagatgtattaggatgcatttactgcagctgagtctcatctagtgatttcctgtccatatgcctgacagctccaggtcccctttatgtcatgtctctgtcattggtgggccttgtaatacctctcccatttagggcaatacacagatttaattagcatatactttataacctttcctaagttattaacaaggaggcagaacataattgacacaataatcctggtggcgccccgcggcctctgaatcacattacatgtctctccccaatgccacaatgaagtggtccattcagcacaccagaagagctttaccaatttcctttaatcatgaaacaggcaaaaggatccttggtccagcattatgaaaattgcactgaaccaggacttaggaggagcagattccagttccagctcagctaacggctatgagctatatgaccttgaataagcctcttcaatgctcattta

SEQ ID NO: 34483 - DNA, 1319 bp, Bovine  19866880629862
  misc_feature (1)..(1): n is a, c, g, or t
ntttattaatttaggagtctgtaaccaaaaccattgtgctttatcttatggtttctttaccttaccatgttgaagctgtgtttggccacagaatctgagaccttagccacacacagactgcacaatttaacaacaaaacacaggctcacaaagttgccttagctgtgattctgaaaactgggagattctgaaccatctcaataaccaatcattagaaattgtaccaagaatgggcttctttgaattagcatgtccaagcgtgattatgtttgtgcatctgggatgtcttttgttctttctctgtgactatacttgcctgtaaacctggaacactagtgaatatggatgctcatttgccaaatgattttgatataaagcattctaagttctgcatgacctgaaagatcaagctgtacaacagcagataacgagtctcggcttctctttccagttggttgtaatagaaaggatgaccagaaaacatcaatagggactcagtagggaccgatatggtctaagcaactagcctgagtaaactatctgcccaaccacaacccttaagaattcatgttgtttattccaaaggatagtcattattttctcttgcctatattagatacagtactttttgtgaattttttggtagtgacaagaagttacatgtgggtgtctagaatggattataattgtgaagagtgttaaggatagtatcaagatccttggcacaatatactgaaaatggtatatgtgaaagttacttgaccaaaatctttatcaagaatcagcattaattctatggaattatccggacatagactccttttcaaatgactcaagatgcttgcagatactttacttctagcccattctgaaataatcacaggtgctttcaacacatggctttccagacagtatcatttctgacagtgggtctgaattgaaggaagttgtggacgggaaccttatcttagctgtcaccatcccgcctcatcaccttcaaacaaagtgatcaggctcaaaggatagtcaggctactggaatgtcttaggagaattctagaggagatgggtcaatgagattcaccaggctcttcatccctcaacttctcactccatgttcgaccatggaaatcagttctgatgcatcactagtagggaatttgctcaagacttgctttgaatacctacagtcgtacttgaatgaggactttgagagcaagaacatattccaaaaacaatgatggctggggttgtaatatgcatgaaaacaaaataagacaatctttgttaagagaagtggagccagcccgtggctgtttc

SEQ ID NO: 34484 - DNA, 773 bp, Bovine  19866880701044
  misc_feature (1)..(1): n is a, c, g, or t
nataaagcctaaggcttagcaaaggtaatgagacactttacaagttctttgggaagggaaaagatggataccgagatgaattcaccagtataaaagcaaacacttagatgagcaatgctctccacaccccccccaaaaaaaagctatgtggattaggtctggagcaattaacaaaccaaagcatttccagtgtgaactctttcaacctaatcaagaaatttaaaaagagaaactgaggactacaaagttggcctatagctcttaggaagatgaatacaaaagaaacagagttcacctgggtctttggcccaagaacttgacaccaggtttagaataagtttcttgcccaagagagtgctatgtggatttatgaacaaacatctgaacaatgacactagaacacccactcattcttgtcaactctcctagactaaggtctatttcctgtagaagagaaaggaagcatgagaacaaacaccagggcaatgttatagcttgagtgtagcactccagctgaaggatggctgccatgtcttataacagagaacgtgaacgtgaactgtctaagactgatggacacgaaactaaatattacactgctacaacaaagcagacagtaaatagatttaaaggtcccaagttacttctcagaaatgaatgtcaggaatagatggttgaccattttcacaccccagctggaatcatatatatgaaaaataaggtaacatggggaacctctaatgtctgcagaaatcatagatgatcctgcgaca

SEQ ID NO: 34485 - DNA, 2287 bp, Bovine  19866880720505
  misc_feature (1)..(1): n is a, c, g, or t
nctggatcttaagggctctgagtcctagagaaggaagttcttcactttttgggcctgcacaagtgacgcagatggttcgcacacgtaggactaaggctacagaaggatccgttcaaaggaggacacaatgcaaattcaagaacatcagtgcttcccaatagtgacaaacggcttaattatctacactgggggccgcgtgttacaatgttcaccaaagtattcacggcaatgaaaatctggcatttccatcgatcagagctttctctaggacaatacagagaggtgacattttgatcatgccttcaactcaattgttggaacaagcacatggtgatcagtgaaaagtaacaagtacacaaccttgtcttccaatcaagagttttcaacagaggattcatgatgagggtaccacagacatctgaaattacatgcaaatttatgtccatgagacatcaaggacaagcaaaaggacacatgtacacttgccccctgaccagcacaaacactaggggtgcagaccctcctctcagttgaaaaaccctgtgtaacttctagcgggccactcatttatgcagttcttccatatccgtgattccctagccacatgttcaacccaacgtcagatcatgcagtactgtagtatttactactgaagaaaatccacctagaagtgggcccttgtggttcaatcccaagtcactcaagggtcaaccgtactgtgtgttttcttaagaacgtcagtctctcaaacagccttgttgaataaaacatctctatctcagatccactcaaagaatatcactctctctaaatatgaatcctgaatcttttggaaaaagctaaaaggagatctgagcttgttctagcttggcaaacatccttacatctggagcaatggttctaaagctttactggtatgcatggaacttatttggagagcttttcaaaacatagactcagcttcttcacgaaagagtctcattaaagtcccaagtaactgagatgtaagcagtctatggactactcctcaacaaactctggtctaatggtttcaccccatgcgtcaggtgccacagacaactctgagtagacctctcttaaaagagaacctcataaaagcagaggccccactgccttctgctggggctctagccggctctgttgtcatctccctggtgtgctgcacaccctgttcccccagatcacctggcctcagagctgcgtaggcctcagcctctcgcctgttcctgctctgctaacgtgacccgtgttacccaggccatctgtaacacacgtgacatgctcaccagtctgaagctgttctggggaagctggctcttgttccaagggccacagtggctctcatcttgggcactgtggattctccccaggacacagccataacctgtgaacacaagctcactccagttatttattgccaatcagatctgttcctactgggtcacctgttcacctagaagagagccaaagagatggaataatcatataacataattacagtctaaaaatggcgaggtatgagggaatagttatggggacaaggtgtcccacttgctgactaacacacaaagcctatggccctgaattgccaagtctcctattcacctctcaactaaactagcaaaacagacttacagagataatcaggccccagaagaaagtgtgtgtgaatactggaaacaaaaatatatatatagagattctagaagctctgtcaataatcactggctggattcccacttcaccatttaactataaatccatactcactaaggattgtaccacagatcataaatacctgtttatatcatgtcaccacattcagaatcgcccccagaaaatcattacctggcaaagaaagtttgcagtttggaacatggtagtaatgaaatactcttctgcatttcctactcacggttgaaagagcagaaagaaacctctaaatatatatatactttagcatacaatcataaatatctactgcccttcccaaagacacaatgcatgtactaatttataccaggctgctaactttttgtttcatgctatattgatggacttgacaggttttcgaagagtttataactgcagcaggtgttgatcttatttaaagagaatattaaatcaaatcccttgtcatcggcataaaatctcctttagcatcaacaaaaggcggcagtttttattgattccctgatacaaaagatgtatgaagtggacggatgctgctctgccaaaaaaaaaaaaaaaaagtcacaattaaagc

SEQ ID NO: 34486 - DNA, 1007 bp, Bovine  19866880765511
  misc_feature (1)..(1): n is a, c, g, or t
natagacaagactttggacttcttgggtccacagccaaggagaaaagatgtacataattgaaaactgctgtgtaagaaaaagcactattgaggccacccaatcagcccaggaatgtttgtgaccagaggagctatctgtaaatatccaattggtaacttcagtattctctccctacttgttgtagaggataatggtttagagaggtaaggaaggatttggagctttctcccagccaaagggaccaactaggacgtctcctgtcgctaagacacagcattagagagcatgccagccacagcggccacttcagtgttcaatataagggtatgagtttctgaaacctgtggacagcttcatgctctacagaatccattcacattcaccatttcctttgctcttcgctgcaaagcaagcatcataatgcccattcccttgataagaaggctgaggttctatacattttgagcaccattcctaaagggacacaagtcactaagcaaggactcccaacttcaatcttcagtagtcacaatgagtaaccagccacttcttcagaccagcaagccagccccacaagttcaatttcacgtggcgtctgtgaaaagcttttggttcactccaggaagtagctgtgtttccacagcagataaagggactcttagtgatccaggctagtccataaagactgctccaggctgtggcatttttctagttcctttcattcaaggatcctagtcatcatcattattattgttgttgttattaataatgataatgaaataaactatgcaaatgtggggaatggctttagccctgaaacgcagacagtaatgtggtaatttatccaataatggaatcacaaagtgattttatttgcttttatggctcctttctttcagaggagctgggcatcaataatggcgatagtaatgaaatcaactatgcaaatgtggaaatcgtttttaccctaatgtaccaatttagccagcaaagggaattcaacaca

SEQ ID NO: 34487 - DNA, 624 bp, Bovine  19866880766504
  misc_feature (1)..(1): n is a, c, g, or t
nttctgtgtatgagcttgaattgaaagggcttgaatcgtagagataaagggaaattttttgtaaactgctctttgctgttcaagtgcccatgtactaagtgtctctccctctctcttaaataccgtagtttgctagatttttctcttcagtgttaacataattataaaaccacacctaaaaaacctaagcctaaatattcaactctagttcttattttgtaataaagattccgtgatgaaataatgtgttaggctgttgatccctgaagtgtttcggtaaaggtttaccttgacatagtttgaatgctttagtaagaaaagtggtcaagggaggtggggtgatggaccctgaagggcctttgtcttggagaaaacctggggtgtgcttggacctcagcctcccagcccctcgtctgtcaaaccgccttgctctggcagcgggactggacccaggtgagcggggaggagcctgggaggcagagcccctgcaatctgggatattgtttaaataccgtaaaaaaaccctcgctcatttactcctcctgagcaccggagagaaaaacggtgtggtaatcctggcatagcaggcggtgttactttcatatcagtataaaatgaaattgt

SEQ ID NO: 34488 - DNA, 2616 bp, Bovine  19866880803343
  misc_feature (1)..(1): n is a, c, g, or t
nagagaataggaagttgctagcccagtagccttacattcacttagctgtgaagttcagagactgaaaagtgagtactgtaaaatgggcggaggactgggttttgagtccgacagatgtggtgtgagtttcagtcttctcgttaacaactttgtgagcttgggcagctcacataaccactgcatctgtggtctcatgtgtacattaaagatgataaaagcttcgctcttgttggcatgttgcaaagattgagctaatggatacaaagcacgtgtgaagtacataatgtgttccaccaataccagccattattaccattacaattctcattcttatagtaattcataggcattggaatgaaataatgatagcactatttggaaggaatactttggcactaatggatacaaacattagtgctgctaggaggagctgctaggattctagttctggttccatcacctgttagctgtatgatttggggtaattcactttacctgtttctcagtttctccatctgaaaatagtgtccactaccttgtgggtttatgataatgattatgtaagataatatgtgtaacacacttagaatagtgcctagtgcactcagctgtttattaatagtttttttcttttcattgtggcttcttcctcttcactgtctgttgcctctgaaacccttagaccttcttgttttccctggcatgtgctagggaccggtggccccaaagtgtcctcctggctgaatcctatttgagtgttgagaatgtgcccccagtcatagattcttcactgaacagagtgaccatgacttctttgatattaaatgagggtgatgactgcacacaaaggactgagcccatggttttaggagtcaggctggctgcaggtttctgaactctctgaacatttatccagccctcttgtcccttattggtactgcactgaggcatgaaccctgctacccaggaagaaacctgctgactctgggggcatgcagtgtgtgcaagcctgcacacacacgtgtgtgtgtttgtgagtgtgagtgagagagagagagaatatttgtagcctaaaggtacatttgtagcctaaaggtatggtgcattgctttgtttcatttttgggggggttgtaaagttgaatgaaaggcacttagtccaaaactttaaaaaattgctaccgggcaaagtaattttgtgtcaggcttctgttcagggcagatttacactggttataaatctctgaaattaaggtcttactgtagaaaagctgaaatgtattcaacattagcagacacccaggcttgctctgaaccaggggctgttctccccccatgtataataagaatatctagctatgtgtttgggataataatgagtttaaatatgcctcttaggatgggtaatggcggtccgatgagtagcaggattctctaccaacaattctttccctagaaccaaaggttaagttgaagagtttgatttaatgacaaatttaattaggcctttaacattatagggttctttccttttgttttctaatcaagatcatggtctagggtcaacacccttgtagaagtgggggaactcatgcttctgtacactgttttgatgtctggagagggttggagtaagactagaggtgattacaaatctgagttgacaaagagctggaaaatgcttcctggtcttaaagtacttttgcctcaccttcaccaaaccttagatttataatatccttgatctgttaggtacttgaagagtcatctggtcagttctttcactttacagctcagcttgggaaactgagactaagggattgaggaatttatcagtagttgcctaggtcattcggagcaggataatggatcatttaaggtcagcctgtctcctccttctggtcaaaatgatctgtctgccaagactcacactcagggaaaagcaaagcctctttttggcttatgggatgtatggcccagtttgctagagcacttctttcctgctacttttcaaggcagatgtgccctatttggtatttactggtacctcatccatagggtaccaataaaatctcttggttgcaaacaaaagaaattgcctcttgctctcttaatctccactcctttcccagacagacagacaaataagaaaataccaaaaaaaaaagaaaaaaaaaggacatcccattacatacaaggctctcagagtggactgtaggctggagggcctcgtgaagagaagaaacatcacagcatgttcagtgttgcaaaaaataccgtggtggtcagaatctgagcccccagcacttggcaccactccgacacagtgagtggtcatccccctgtgtctttgtctcatatgttttcatgattcggatcatagcaggtaggagatgtccaagaactgagctgaggggcttgttgatgctttgactgccaagaaggcagggaggggggagatataaactcattggcttctattgagacgtggagtggccactgcccactctaaggcctcacacaataggaaattacacaaaaacaaggggaaaaaatgaatgtcaggttttggatagtctgaagctcttagtgtccaagataaaggcttcatttgtcc

SEQ ID NO: 34489 - DNA, 950 bp, Bovine  19866880835426
  misc_feature (1)..(1): n is a, c, g, or t
nccaagaagtccaaagtcttgtctattaactctgaggtcctattgcgaaaggaaggtccattggtggccgtctctggttcactggagaattttccctctggttttgtttttattattttattttatttctgctgcaccaggggctccaaaaaaatgaatgtgtcagtaaaggatttgacagtatgttacgacagtcatcaatccaccaagccctgtagccataaataagcttcatacgctgccacactaaagaggacagtttttcttctccaggacattgaaaatgtcacagcgagggaattgtttgtccccgtctccacggcaacgccaccagcacttatcattaactttcacaccaagattttaatcagcgctctttgcggcctgagaccaagtcaacatcagcccaaattttcaaagccgttattctaattatgacgagaaagctatagattgatgagctgagttttctgcaaggactggtggcagttaattctcatgacctgcgtggctcggggagtctctcttagagatggagtcttgaaagttcgattattagtgacagcttgtaagtgagaggagccttatctctccagagagtgttgataacttgagacaaggtttaactaggaagtagtgagacagaggaaggaggggagagcgggggagaaaaggaaaaagaaagtgcacactctatctgcagcctgcacccagcgtaatgagaaaatacggacaggcacaatttcacaagttgtaaattctggtagccttcagttgtaaattctggtagaggctgttttactcggctatctgataatgtgtgaaaatatttgtccctttgcttcataggcacgggcaagcactgtgttccagaaaatgcattcaaattcccagctctccctgccttgcattgcttttcagtttccttggtcggagacctcggaaacaaa

SEQ ID NO: 34490 - DNA, 3239 bp, Bovine  19866880869062
  misc_feature (1)..(1): n is a, c, g, or t
naccatggtgacaacagacagcatgttgtcatttcgccccactttggatcacagccctgaaatcaaaggagagagagagaagcgctagcttttaagctagttaaaaaattttagatgacaaagagctactgttttcagagcagtcttctttcaacaccaaagaaacatccacgaaacaggctgccagctcccctgaaactaggggtgcccagactcccacccagttggtcagcctggatttccaggtggctgatgcctaaagatgtctgagagatactaggaaggctcgttccaaatagttcagtatgagactcagctcaggactccggtatgtcccttaggagatgtcttctttcatttatttacacattcacccacccagcaaatacttagagactaccacccgccaagaactgagcctggtgctaagaatgggtgatgcacaaaacagacaaggtccctactctcaacgaacttacattctagctcagtgggtcccagacttgaggaggtgacagaatcccccagaggccttgttgaaacccaagtcacagggtccctccctagagtttctgattcactgcatctggaatgaagtttcaaatttacattctagtaagttcccaggtgaggctgatatgctgctaggcctgctgagaatcactgtccaagtacaaaaacaccacaaggattaacagttttggaattatgaagttgataaggtggccaagtgtatccttcccagttcagctagtggtctgtcctgcccccaatgtctacggtccccagtgcccagacagaagccatatccaccagaccttctttcttgccccttggtggtttggaaccagctctaaaccagctctgccaatgcttagtcagtgagctttctgcctgcccgtcccattctggtcttggggagatctatttccctttgttctaggtcatgtcagggtgtcaaaagctgcagcttcaatcctgagtataatacaagtttgccataaaaatacaagagaggattcccgaagccacagaatgaaggcttttacaatatcaattcaacccttgtaaatttaatccagggttatttgttgcaccaaaatctctttactgtgatgtattacttagttaccagggttatcacagccgtatcctaaagttgcatagtacataaaacatttcagttaacaatgcgggaaggttaactcccccagataacctgcaatcaccagggctagtccagatgacatgcctctgtcagcttccacgagctattgatggttcaatcagtttgttttgaaggtaaagtacaacaaaagggcagtaaacttattcagactgtcaacaggggctatcgggaatggggcttgcaggtaagtaattctgggtgttttaaagctattatcaaacagcaatggttgaaggaagagacagctactaataacacagaaggcagccatcataaaccactttatggcagaaacccccgtccataaatcctgcggcacccggagacagcttcagatttataaaactgcttgttaagccagggcactgcttaatgaaaagagatccgtctaagttctcaggctcacatccccagccccagagggcaatgccaattttcctgaccttcccaaggtggttgggagaaagcctcagggccgggaggggtgtggcgcgaagtcagaggccctcctggctgtgacatggagggtgaggttacccagaggagaccagggaccctgggaaggtgttcaaagaaccacctgtctctgcatacagattcttaaaaagtgagacccacacacagcttttcaggttctctctcttttcatagaggaagtgccatttcctgaaagaaatcctctaaagagatgcttacaactggtagagggacaaaaacaacagcagaaagcctttttggtttgtttggtttttgctcccaagtcagttttctctaccaaaagctctggcacttttcatccagacttcaaagggaagggaggatgctgtctcctgcccacatctgctcccccgggggatctggctgctccccaggccctctgcacaactacaggcacatcaagacggatctcctacatctgctcctggggctggctgccatgtttcttcttctgagactctacccaagaaacaccgcatttccagatcccaagggaactgcatgtggagtcacggggacttttcccacctcccccctttacagcattctatgcttcttcctattgcttcttggtgccttcttgctctcatgcatgggaaatggggagacaagctgggggtcacccccccccactgggggcccctgaaggcagcaacaggtgatccatgaactgttctcatcctttcacaaagcttaacaggaaagcgtgaacacgccagcagaacaccaagcttctttgctctggatggcatcaaccccatttggtaacactgcttacctcatgctgatcaaaaactctgatcagcaactaaacgtctctgactaattttgaaaagttagcagtggcttaaatgaagcttactgaagagaccaaagctttcaagtatatgtgttggagggaaaaacaagaggggagtcttcccagcaaaaagcgtgtggactcacagggtagaggaaagagcccagactctgggctgagctttctgtgtgaccctggcacagtctctgccgccttcctgagcttcagtttctccatctgtgccatgaagggagtgggctaatcctaccccgcctcttaagcttcagtttgctcgcttgatttctatgtgcctccaagttaatccacaataaatacatccatattctcctctttcgtattgctccaatttgcttgtctcactacccactcacaccttcaggtaagggaggacggtgaggaaaagtcaataaagaccacagagtaatgaacaaagaccgcgagtgaagagatgacaacgctctccctctaatgagccgaggtgagctcacctacagcattaatgaacgcctgacaaccagccaaggccagctgatttccctcacagttcaccggcagcacgtttgaagtctcggtgcaaataatacacccacaggatagaccaaggccctctacagaggggaaccagcaattactctgtgggtttctgtcactttgatctctaggtcgtgacctttgctttcctgtgatcttcaaagcccagattgcagattagctggagaatgctcactgggt

SEQ ID NO: 34491 - DNA, 2398 bp, Bovine  19866880935243
  misc_feature (1)..(1): n is a, c, g, or t
nggcccaacttggtattccgcttgagcaaaaagaacatacaagggccacacattaagtagctgtgagaccgaggtatcagcattcatttgtcgtgggattctctgtttctacattttttataatgggggcaccaaatgagcacatcacctcaaatgttgatgacagcatgagcattttgtttccacaaaatttgctcagtgcctccctgtctgcatggctttagtttgccatttctcggtaagttggctctgattttttgagtacctgtggcttgctaaaccttgtgctgaactctgcataggagagaagctaagatgtggttctaatcctcagggagcttacattttcattccagggagaggacagagatctgaaataggactagttcgaagcatggtgagtagctagcagaatgaacactgtggaccattggaaactacaacattctggagtggagtttgttttgtttagcaaggaacagctggagggtaaggggtaaatggtctgtaaatgtaaataaatcaggagttcttattgtgtttgctggtggggatctcagaattgcctcttgtttgtcctcattctgggcatttaatgagctgatgttaggtgtgaaacacgtaaggaccttgaaggcagctcttttcctctctgggcttcattcagaggcatctgaaggtcatgatggaaattgtggatgtctgagtcccctttctttcttcacacaggtctcaactgagccatcagggcctgggtcactgccttagccagtttagggtcgtctagtacgcccggtctttctgctccctaagcctgggaggacccagggctctcccctttctggttgctctgccattctttcactcgtccttgtcttcatggccaaagctgactcaccggcaacgtggacatgctccattccatgggaggaagggaggcagcatgaatatggccagcttcctcttacaggacgtgccgtcacctttgcctgccccacctgactgatgggcggtcggcatagtctgagtcgcacagcagcactgagcttgaagggtctctgggagatgtagtctccagctggactgctgtgtatcctggtgaattcagggggcatggggaaaagagaggaagtgctggggacagttagctttttttggcttccctttcactcagcagtgagctctttgtagccagcatttacacttttaacctctatgaccccaatgtttatactagaacttagtacataataggtgcttaaaaaatgtttgctaaaggaaagggcacatcagtgagtgagtgaagaaagggatcagggacagcacccacagtccgggggccttctttcttttgtgcccccaggccatgttctttgtatttgagcacttttagctgacccatgagtgggctgtgctgagttcagtctgtgagaggccgcgtggcttacacccgccacgcagtctttgaacccaggactggggagatagaagaatatttcattaatccttgcaccattttggcttcttatcgaatggcccagacctcttctttgttacggacaacaatgaagggtgcctttaagaaatctccagtgagtcccgaggcattgcagattaggtcagtagcaccgctgctaggttgaacatgatggatgagcaggagaatgagtttctgctgcacggtattgtgaaatcttttcattgtcaccaacgggcctatgaggagctgatgaatgagggagcaagtgtcaggaacgcccttccttgccccagtacagttttaatatctccctgagctacaggatgagtattgataaaagtaaagtttaaaaatagccacggagtgatgggtagccatgatttaaggagaacagcagtggggttagagagggttcattttcctgaaagcacatgagaggaaagagagcaagaaggagagagaggaggaggaggaagagagaagtggcagagccggcatgcgaggggaaagagcaggaggcttttataagaagctaatgtgatgaggatgacgagggctttgatggatgagttagatccatctggtcgcagtatatgtaataaatagctgtgctcgggtttgacctctcccacttaccagacacatctttctcttttgggatatccaggagggagcttccattagaggaaagaacccgtcatgagccggagccagggatgtttatggccttgtgcagagggcaaaaaggagatgggatccgagttacaggtttataaactgaaaactggagcctgcgcgccttgcctaagatggtgctggcgccggaaatgcattttcagcgctgctgatgagaggagagcacgggaaggaaaagggcagggggtgggcagcagtccacagggccgtgtgagggacagc

SEQ ID NO: 34492 - DNA, 1357 bp, Bovine  19866880976721
  misc_feature (1)..(1): n is a, c, g, or t
naatgaatagcacatataccaacagaaaatatagtacaattgttctgctgtgacccaaaaggaacaatataaaaagaagaaaatgagattttattatcctttccacactttccactctcacacttagcatcttaacattcttcaagttcttctcaggaatataaagctcaaatcacagaccagtatctgttatgttgtgctgtctttgcctgggaattttacaaattaaaaactataaaggctaagaagttacaactatatgcacttggatcctgccctgggaggggaaaaatgtacctgagtagtaatgagagtagggaaatacacagattaaaaaaattggaaagatgtataagaaaatgtgtaactgcagttaacttagaggagtctgattatgggtgatattatcttctttgtgctttggtgtattttccaagcattaacaatgcccatctttccactgaagaacatttacagagggccagggactaaccaagcactgcataggatgctggaaaaacagcaatcaagacagacaaggtccctgccctcttgatggaaacaacctaatagggaagacagaatcaaacaagcattgacaacacaatgattcgtgctttttttgtttgtttgtttgtttaatgaggatttactactacttagattctacacatatttcctgggtcttgagcgagtttgaaaccttccaacttagagtgtttctatcttcctaaaatggaaagcaaacccatcacatgtgcctgaggcttgaggaatcactacattttctacttttccatggtgaaggtgcaagacttcttggacccaagacctaagcacctaggtaaaccatgtttgtggttagctgagctgaggccctgaactcttctcctgactctcgtgctaactaagctttagcaagtatttccccaagacaactatacctgaggctctccacgttttcagtttcactgacttctacactgactgcctgtaaccagccagactcaacaaccccacctgcggcccaaactttctccacctgtgactgcacatgctcactcagacatgtccaaccctttgcgaccccatcaggcttcctctgtccatgggattttccaggcatgaatactgggagtgggttgccattttcctcctccagggaatcttcgtgacacagagattgaaccgcatctcctgtgtgctcctgcattggcaggcagattctttaccactgggctacttgggaagccctaaactctccatcagtcccaaatatcaagcaaaaattgccctcaattattctctttaatggagaaggcaatggcaacccactccaggattcttgcctggagaa

SEQ ID NO: 34493 - DNA, 1662 bp, Bovine  19866880981637
  misc_feature (1)..(1): n is a, c, g, or t
ntgaaaagtgaaagtgaagtcgctcagtcgtgtccaaccctcagcgaccccatggacagcagccttccaggctcctccatccatgggattttccgggcaagagtactagagtggggtgccatcgccctctccaagcagtggtcctagagatgtgaaattggttatgttggcggtatcttggaaaaggatctcaaggatcctttgtaggagaaaaactgtcaaagaatcaaagtgaaggccatgggcatgttgtaggaacaccaagtggtctagcttcaccatttatcaacaatcgcttgtgggtagagagcagtgatattcttagataggctagggcttttacttgaaaggaccttgactgtctacctttgggctggataatggccccagtggaagtcataatcctatgttcagtgggtggctgggctaggagctaaatcaccgttaaagggaacatctcatgtcccccaaatccatatgctttattctcccctggagaactacctgcacccatggattttcttcagttttgaggcatggttagagaggaattatgaagggccctctgctggcctcattttcctgttttaaatgcataataactcgaaggggaagctgtgttagtctgtctcacctgatggagccttaaattctcccaatgctgcctccactgtgctgcattggagtgtgccgagtgccttactgcctcaaagaaagaaagcatcctgattttgggggtgtgggagttgggggacagtgataaacaggtctttgcctgtattgtcttctccccatgataatgaacccatcaccagcacaggaatttaatgcactgatttttccaagagccatccaggtcccattgcaatgctgcctgaaaatataaatacacttcctgtggacagatttgcattttttggtgaaagaaattcatatatatggcaaagatgcctctgtaattatagaaagtttatttctgtccccagatgtcagcaatcaaattccacataaatatattttgtgtaaatctgtcggcagctggtctccattcaggtttctggagatattagcctgtctttgagtttatgacaaagttaaaaattattcattaaactgacctgcagtatattcagtaactggaaaattgccttgcagttctatttggtttgtagatgtgatcacaagtaaatttttaacttaattaattggccgtttctgttgacaagaaatttatgtggtaataatttgctcgaaatagatgccgactgtaggaaatgagatatccatcataggcttgtgttccaccagctgcacagtggctattatgaaagtatttcagcctgcaccgaccccagtgtttgtgcagtcaagattatatatacccacgatccatagcctgccagagaggcgctggtggaggtctatgataacaaagactttgtgatttatggcttgctgtgaaagcagagcttgatgagattaaacaatttcatagcacaagtgtttctcaagacctgatttgtagttgcaagctgatggtaaatcacatttatatatctgcaagcgtgctcagcagaggactgcaattacagtttaagacagctactttttatttaatttttatcctgggtttgtctcttttatatccccttcgtctgcaaa

SEQ ID NO: 34494 - DNA, 2019 bp, Bovine  19866880986990
  misc_feature (1)..(1): n is a, c, g, or t
naaaacccgcagctttgactgtacagacctttgttggcaaagtgatggctctgcttttgaatatgctgtctaggtttgtcgtagctgttcttccaagaagtaagcatcttttaatttcatggctgcagtcagtgcccacagtggttttggaggccaagaaaacaaaatctgtcattgcttccactttttccccttctatctgccatgagtgatgggactggttgacatgatcttaatttttataaatgttcagtttcaagccagatttttcactttcctctttcaccttcatcaagtggctcttcacacatccaatataatgggattcaactccgtggaacttaggctggtgtagtttttggcttacatcagtttatgttcacaagctcacacttactgtgataattttcgatgtttacttttttatccttggtacctttcatcaacttctacacctttagaagcatatgcccagtgctttaattttctcttcctaagagaaggatgattccttattagcatcttaaactatgtgtctaatagatcttcctgggatagccttaggaaccactcaccattgataatactatttttagaggaaatgaaactctgagtccccagaaacaacttttaaatgtatgccttccaaaagttagctggtacatggaggtgatggtacctggtgaggggcgggggttgttgcctcctgcatgtggaaatcttgttctagggctgatgccctgggaagtatttggcatgtgtatctgccaggtttatcaaggactccgtacaaatggaattgtctgagatagaactcaagggccatacctatagcagtgggactcaggtggagggctaatgtcagccttggccctgtggcccgtttgccctttgatatttgaggattctatggatctctggttacttgtgtttccaattctctgttcagacatacatccttcctgagccatttagtgggtagtgtggtctgtggaaaaagcatggactgggtatgggaagaatgaagcctgctctggccaagaactaacttggggctgtggtccagcgttttctcctgtgttagccttgttcttcttttctggaaaaggaagaggtgaaatgctcatgggtttccagacttttcctttgtccaccttacaggtgaggggaagctgggatgtagaatgtgaacccttcacctcagccccagcccttctaccctgatctacttaaatattagactttggcagaagatgcgtctggggagaaagtgttgctattcaaacagctttaaaaactacctctgcattcacccatctaattggggtttttccttcttgggtcccaatatgcctcacagtactttttagcatgtccattttatgtggccagcttatggggttttattctattgattgagctgtcgtcctcctctctcagtcacccctggggaccaaaagtcagggcaaaaccagagaacttgttaagggaaagctttggagatgagcaaagagagagcttggaagggagatggcatagaagaccatatctttcatgcttgtgtcagctcatcccctttagtcctaatcacagctctggacaagcggacaagcaaaggaaccatggagttgaaacttacatagtatctaaaccagtaataatgccttagatttgttcagtgttttaacatcttgaaagcagtttgtttgccattgttacattggctattttgaataatcccaaatgtaggaaaggcagaagttattgtcctgggttgagcgttgagggcatgaataatgcctgttatgcagacataagggcccaaaccaggacccggtctccctattcttgctcctctcatgttgccattcctctttcccacagtcagggcttctcaatgacccaagtgtcagtactgggaccatgcggatgctagtggggagagaagaaatttacagtggtctgttttcttcttcctgtggatcttttcttctcttgctctccccatccaagaagcat

SEQ ID NO: 34495 - DNA, 1790 bp, Bovine  19866881034125
  misc_feature (1)..(1): n is a, c, g, or t
nagtgaacttgcaccccctgcagtggaagcccagagtcttagccatggaccactagagaaatcccacccgtacttgtttagtctgcatgtagtttattaaacacctctcacgaaccttgtttggttctccatcaaaaacaggacagaagtccacttcactcttatccaaaacttctgtcttagatgaccaaatgagattttacagtaaaagtagagtgggtatttagtaaaagtataccaagaattagaagtagaatttagaaatacgagactgatcagtattgttgggactgatgggatccgtcccatcattgtgtgttctttattactgcagccggattaacagtcatgtttatgataggtggttgctgacaaaaaggataaatatttcaaagaggacagatacctccatcagtaaacatttgctcctatcctgggtcttggttgttaattttggttatgtgactgacttgagcttgtggaataaagtgaagcaggctaacaaatcatcagaaagagcccaaagagaataaaaagagaaatagaggagggtaaattttcatttggcattcatttccccaaagatgtagtcatacagcaaacattacaagattgacagttgggtaatagatgcataacatgtccaaacagttaagctattcttcaattaacacccagccctgtaatgccatctggtctattggggtttaagaagaatgtaggaaatttggctcaagtctagaggaactgtagagataacaataatttatgaattgatctatctgaagagctttgtggggttggccttatttacctaaataagagcagctagaagaatattcttctgatgtatgtgaaagtgaaagttattcagtcctgtctgactctttgtgaccctgtgggcggtagcccacccagatcctctgtccatggaattctccaagcaaggatactggagtgggttactgtttccttctccaggacatattcccgccccagggatagaacccaggtcttctgcattgcaggcagattctttaccatttgagccaccagtgtatagggttggttttacctgagaaggtaactggtgcctttgcattttaaccaggaagtgaaaaaaaggaaaaggttgacatttaggtgtgtttaaattaagttagatctgcaagagaatttcgctaacttctcaggttttgtagtggtgacccagaattgtttccaagttgtggagtacatctccgaaagagatttaatttttaactttttaagtggaagagaaactagttctcttacaggaggtcatgtattattctccctggaggcagggagtctgaacctttctgggaatctgtttctgcatgttgaaggagaacgtaggctctcacacagcattttcagatcactggatgaggtaatgaaggtgatgataccctctggtctggttccatctccttgctatcctgggaaggccatgatctactcagtctgaatgggtagcacatgggttctatcacagagagctgtaaagagtgtttgagaacttgactttcccagggaaatggaaggtccactttcccaattaatttgtaagctggatatggtagagatcatttgagggttcttaaggggttcctttctctgtgtattttaatgttggggggttaatgtaaaggcctcttaaattaagctgaagctcagaattcctctgcacatctcaaatatacatgtacaatatctttcttctctatttaaaataagattcaaaattaacaaggaaagggcaaatt

SEQ ID NO: 34496 - DNA, 1762 bp, Bovine  19866881037016
  misc_feature (1)..(1): n is a, c, g, or t
naatttgagcttgcagcaaagggaagtaacctgtggcttataaataatggcaacagctttatggaaacacctaaaaatcaccagaggctcataataagaaagttctccatctccaggtgcaaaaacatgctggtgattacttgttgagcaagaccttgtcagcttttttattacaatacattacttgggtaatagttttaaaattatttatagaaagaaatggagctatgtagagaattccatcatttaatatgttgtctgtgaatctcattagcctttttagcctagggttaggaagaaaaatagagagttggctgtattttgaagatggagctctatatacactttttgtctgggggcttgttgaccttctgttaagttgcttctttgtgaatctttctgtgttacagctctggtttccatggtatttacataaacctagcaatagtttgctatttagaagtggtggcaggagctatgatctcctcatccaaggactcggagcaggataggatgccggctctgcaggccatacgtagaaaatgtctcttccaggtaacttatgagcatataaggattgtgggggagcagcggggacgccagcgccacaaggcgtgtgggtggcctctcccctgtctcccagtgacagaggcaggcccagtgttctgtgttttggaaacccatcctgagtgttctcccatacagcagcacagcagagtctggatgtcagcagcactggggttctggcttcattgttgccctggccatgttctgtagttcttggcagaatcccatcctgggagtgggttactgtggagaatacagctctgtcctttccatggtctgtgctacatgctgaccccacagctggctgcctgagcaggccttgaactcagcttcagctgacacatcccaaatcctcctactaaatggagggctagcttcctgtatccaaggatgttagtgaagtcagatcaaggttgaaattggaatccagggagggaatcatatatcaattatcattgtccagtgtaacatgtctactagccccaggccaggtactaagagaaagccctgctgtggaggcaactggacctgagatcaaatacgggccctggaatgctgtgtttagtcctttgtagttcacaacaaggcataaaactggggggaaatctactttaaaaggattcattagaagcaaacacagtagaaggcagaaagaggtaacttggagcacagtgactgtgggtaaagaagcctctgtaagcctcagtgactttgcctgtagactgggaataatggtatgcacctcctaggtttctgaaagggtttactgagttaatggaactaaagtgctcagagctgtgcctggcacctgggtagctagtggtgggtaaatgtggaggctcactagggcccagtgagtggaagagccagggtctgaacccagggaatctggttgcagaactgctgccttacttctgtgatatgatgctgcccagggcctggtagacccagatgtcttgaactggagttgtgaacaatggctcaaatcatgccagacagagaagagggacctttgatctgggggggtgacagcatagtgtaggggagcatgactgtaggcgccttccttgggagcagcctcattcttgtctttgcacacccatttaatttacagacattgacagacacctgtatattttcagtgcaggcactgggcataaagggaacagacatggataagacagttcctccctca

SEQ ID NO: 34497 - DNA, 1456 bp, Bovine  19866881085196
  misc_feature (1)..(1): n is a, c, g, or t
natctcctgctgtaatttgttacttctttgtttttattggtgtgtatatatatatatatatatgaatgaattggtgtgtgtatatatatatatatatatatatatatatataaatgaagtatggttgattgttagttaatctttctatgcatagaaaataacacaagtatctgctcactctcctatctgtaaaagacttcaatagttcctcttctctaatcccatcttcacctgaattttccaactttaagaaaaaccttatggaggaaatttagagtttaaactcctgtgctttgtttttttattagtacagtatgtacttttaatttatgtggacaacttaaagaggagatgatactctattttagcctcttaccacctgcctacatgcccagacacagacaaacctcaactgtgcttaaatagtgccagtggcgagagaaccaattgactttcacgtctatggggttgcacagagtcggatatgactgaagcgacttagcagcagcagcagcagtcccatgtgataacagtcccacaatcactctcctttgacaagctaaaggttttcttgctgcctttacccttgagtgatttcttaggccaatgaggccaaagaacagctctcaggaagagaatggggtgggtgaagaccaagtagagggagagtcacgtcagagactacggactgaagaaagaaagaagatttgctgtctttgactcgaggctgggctgggcttcttgctaagttgctaaaaaggaaggaccccttgaaaaaggcttaaggaatggggtgagtaggctccataaaagttgtagacatttttactgtaacttcaactgcttggcaggttgcagcacagatggggaaatggggcagagagccttctactgtccatggctttccctggatatccatagggtacccatagctaggtgaaggggagacatgcacaattgtttatgccatggcaaaggaatcagcatttgacctgtgtgtcctggcggttgctggactgtgctaactgatggggaagaggatgggctgaggttgcagggatcactcctctgtattggctgcaaaagtcccatccacttttctgcagtcctatcttgggtcgatgccctacttactgttccaattattggactttgtccctaacttcctgccactgatactgttccttgaattgaggtggttttctcatggctggactcttcactcactgatctcaagacctcctggaaggttcatgccatagtggtcaaagaccgtgttgacattgggtctgacaggcggtcagtgctaacttacccttgcttaacagtctctccttacccctaaagggtgagcatgtattttatatatttcacctctcaatgagattttaacgtttatctttagagtcatttacacatattaatctttatacccgcaaatattctttccatatta

SEQ ID NO: 34498 - DNA, 1006 bp, Bovine  19866881101846
  misc_feature (1)..(1): n is a, c, g, or t
ncttgaagtaaaatccttattttgaaaatacctttgaaatcctaaagaaatagcaaaccacagtattgtggtattccaaagtaatatctcttgtttataaccatataaatttagcccctggcactacagggcttatataatagaatagagttattttaacagcgccctgttaaagaagaagcaaaatgttcagctcattttctccggtgggagggacacatggcctcatgcgagagagcgaacatgcctaagtcattaccgcgggaaagccatccgtcaaagccgggtcgctctggcatggccaacaccactggcgagatcacagaggcagcctctgcttgcaattaccagggaaggaccttggctctaggcagcctgctatcaattactaccctggcctcgccgcttggacttgtcaatttcccagtgtcttctgttttgtagcagtaagaaaaagggctcctcctgactgattcttggaagtttctcatgtgttgtgtcactcctcggtgtcattaacaattcaattaaaatttcacagcacacaggcaggcagcgccggacagggggcgggaaggagccctggcttcggagatttccgaagggcctgcaacagggccacgtcggatcaggcgaatccaatcttgaaatgtctttgacttcacaagtcaggcttgcatgtgtctcccatctgatgcgatgctggctgtcatgttggcaagatgacatgtttgatgttctcaccccgctgggggtgcagggatgggaaggaatttcaggctggctggaaacaaaaatctcacatattacttcactgaaagttttggctctgtaatggataattataaatattcataatcagctctattaatctacagtgagttctagaaagttctttttctccatttttttttccactggggcctcctattctcttgctttccagagtagagctgtctctaagaatttagagacagtataaatcacaattaaattcttcaggaag

SEQ ID NO: 34499 - DNA, 721 bp, Bovine  19866881119072
  misc_feature (1)..(1): n is a, c, g, or t
ntgatgccctgcctttgatatatgacacatcacccacagcagcttttcatcaagtgaattaacctggaaaaatgcaaacccacctgccagttgcttccaaactttgcacaattcctttgtgtacttcctctctagcgtgcatcaggcaggaaagcagcaagggcaagctcaagaaatatggaaaattaagagaatctaaaccgggggctctgggaaatagttcactggctggagtcggctgcttttgcataagcactttcagaagaggtttaagtgaaaagcgccagcttaagccacactttagaatgctttgcacctgagctggaaattgccatttttccccagtcattttccccctgtgtggctggaataatgaccagagccttggcagtcgctgatgacatggttacagaaactatttggtgatttctaatcaataatcaagatgggctgaggaggagcctagagcaggaaggagtaagcagactgaagaaagagaggaagaaaatgagaggttaaaccaggcaggagcgaaactgaagaagaggagggaaagcaaggctgaaatgaatctggattcttctgccagcccctcgcacaacaactctatgaagccagattcattaacatttggtttcagaaggctccaaattactatgaaagagtaaaggtagagagcaactttgatacctcacagtaattctcagtctacatgttcaag

SEQ ID NO: 34500 - DNA, 1345 bp, Bovine  19866881162290
  misc_feature (1)..(1): n is a, c, g, or t
nttaaaactcccttggagaagatgagtttgttttcttatgcccattctattattgaaaatcctctcaaagtaggagtctgtattcagcttaattgactggtcctcaggttagttaaggatagtgtgttgacttccgagttcagagtcattagttatcagcatttggaccatctctctcactcctgtgctgtcagtccatgtggctaattaattatggcatcttttcctgttgagccaaagctgtgcctctgaatccttctcattacagcctgccatgaccaggggggtagagttggttcctcagataaaaacctatttactcaccctggcttattgtttgaagaccttggaagatgaagacagtgtaatctaggagaaataggtgcccacctgaaagaccttccagtctagagaaatggtccaaggagcatgagcaaccatggtggtggggggcagtcactgtgggcaggaattagtttggattttcatcaagatgtttcaaattatgggcctgttttaactgtgctgtctcatattgtgggtacagagaatgctgtggaagataggttgaagtgatttaagatgtttgacttttcaacaaatacgtgtttgaaagtccatagtattttgcataatcacttcgtgtgggctctgatatgaggctgtttgtaatttacagcatgcgtgacattagtcttcaaacttaatagtttcaaagccatccaagatttgggaatttcatttaatgccatggataactctgctctgagcatctttttttttttttttaatatcatagagggcatttattcatttacacagaatgtttctttagttctgatcatttctacaaatgtgcacacagaaataagtcaaatatgtgtctcaaactgaatcctccagaaatttaggttcatatttgactctataattatatctctaaaactcccatcaactcctcaggtcaacatatccttctgcagtcctgcaccatggctgagtcacctttgcttttctcatcacactaagctgatatctgaaaccaggtgtgtgttttcccatcataatgtgcttatgtcctagatttcagttttcaagtgtccagaataaagcttttgatagaagcaaccaactaggcagggtattacaatattatgtattgggactcaggtgctctgagcatctttgaagaccaggcttagagtgggtagagatgggaataattttgtatttggtggcacagagacagaaacagtttttatatgggtatatacatattagaaacatagcgtatgtgtaatttctgtgtattttaggaggaatttattactctacatgtgcccta

SEQ ID NO: 34501 - DNA, 650 bp, Bovine  19866881224067
  misc_feature (1)..(1): n is a, c, g, or t
ntaactaaatcacctggcagccaatttctgagagttaaaccacaaacccggaaaatggtggagtgtgttgaaataatgtaaaggaaacccataaattcaaactttatgttctgtaaagaacaaatatgaaaaaggcatcaaaataatgaaagattgtttatgtattctggcatgaaatgggaacgtgttatgagagagagcagtggtggagacagatcgacggagctgacagtgtggtattcatcctgcgccgcgcagcagacgtcccgctagtggcaggagacagcgcaataaatcaagggctctcgaagctgtacctacagcttattacatccaagatgacaaataaataataatccctgtcagagcggccctttgctcaaggattgagcctgaaacctttggctcatcactcctcatcttaagtgaaaacactagaactagggaattggaggccacgctttgctaagctcatgaaacacaaagcgagcgggacctgggaactaagactgaacaagaaaggtcaagaaagagggaaggataaacatttaaataatcctgaccaagagggggcaaagcgtctgaatgaatgtggtaggttaacacatcctaatcatcggggcaaggaaaaaaaaaatccagaaaatgat

SEQ ID NO: 34502 - DNA, 1455 bp, Bovine  19866881288956
  misc_feature (1)..(1): n is a, c, g, or t
ntctattctgtctcccaaggttgaatcctgttttagggacattttaaggctgtggctctcccctggtcacacacagaattaatcaggcaaacataataacagtttgtaggtaaaagtagcttctacaattctgctgactcgtcttagacattcctttggatttcccagtatccatgtggttgagtatacatccacaactaagtgatgtcccaggcctattttatgttcactgagcctatagttctggccaaaatgagaccacagactgacctacaggaaaacgatacagatgattgataaagctgaaagagaaaatgcatgtttaatcacttaacattggcaacattcctttgccaccaggtgaatgttagaaagttaaaaacttatgcttcaactggaaagtgtagcaatttttataagaagaaaatgcttgattgcatggaggtctgcatggagactgctcaagaagtcggtcttgatttggccctgatagcctagacttaaagacaaggggaaaagaaacagccattcttcgtgattatttccactgcacttatcaaagcaataaaataatgattactattgatgatggtcttatcactgattaaacaggccaatcaaacaggctaatttaactgcttctgtgaagacacacaattcttaagtgtatgtcatggtgtcagtaaagagtgtgaggcgtccccaagccttatggacaggatgtgcaatggcattgatttagagcttttagattgcaaccttccctctctccggagccatactccactggagacttcctctgttctttttaaatgcggccctgagctggaacaaagcaagaagcccagcaagaatcacaggggttgcctcacagagaggattaaaatgtcctttatgagctaagattcaagtcaagaagaaggaaaagaagacagaccataaaaagaaaacaggctgcaggcaggaaaatattgattcaaagaaactgtaaacaccacagcatccaaactccttgccctgctctgtatggtctgagtctggccaacctcctgactttgtaatctaccctttctccacggctgttagtgcttcacccacatgttggctttctgatataagacactggtcctgcagtgggtgttcacatctgcctttcttctacccgaccctcatcctcaccaagccacttatcttttaggcctcagctcaaatgttctctcctcagagagcccttctgtgacatcctagctaaagtacccctctccctgtctggacacttgtcatcacattgctgcaacacattttgtctgaggtactacccaatactagcttgatctgctcgcatgtttttgcccgactgtacctattaagagtaaccacacaagaccaggaactgccctcctcaatgctgtatccccagcatccagaataagcactccacagagtagatgctct

SEQ ID NO: 34503 - DNA, 941 bp, Bovine  19866881294994
  misc_feature (1)..(1): n is a, c, g, or t
naatccttaaatgaccgaaatattttcttcctcactattcagtgaatatgggtcagcctaataaggttggtttatatccaggagaggaaacagcactccttggtccaatatacagttttaataaactttattaaattttcattgatccatatgcaaaaataattcatttacaatttgaactcagccttctaaatggtgcctaactcaataaaggaagaggctgagaaacagcagctgtatggctattaacacattatgccattaaaaacattaaacagttgggtttggtgaaggaatcaaagttaaccccttgaatatctctaaactggagattaatcttggaagacattttgtagcgaagggaaaccagagtcttggggaaaagattctatcatctgaatgaaccctagtggaaacccagcctatggctttgctgtacaatcttctaggagcctcctttaaatgggcagtctgagattcctgcagggaggatgaggggctggtagagttaagaaggatatcatcataaaagtaaactagtagcttatttgacacattaacatgatttatatggcacagtatacttctggtatataaataaattgcttagttttgaccttgtactaatgaagccagggtcagggtacactcctttttagctcctgggttctcttttgtgattatatctgcagtacaatcagtaagccaataacaagtattaatagagtactaagtaaggctaagaccctaattccaaattatatataattcagagacatgaaaatttgaaaattattaagcactatactatgcaattccaaagatatgtatgggcctgaagaaaagagatgagtgaaggttaacaaagataggaatttaggaacaaagtgggactgagctgtgtttttggaagaaggtggggggtcaataagtaaaaggag

SEQ ID NO: 34504 - DNA, 849 bp, Bovine  19866881314240
  misc_feature (1)..(1): n is a, c, g, or t
naataaggcttttaaaaaatgacaataaaactcaagttcccactgcagcctgggcagcctcagcattaccaatggttaatctagccgtataaccctgggatttgagcatctacatcatgttagtattcaaatatcccagcacccttcagcttagttcaataaacaagtacgtttgcactgaaataaccagagttcccttgtttctcattttaaagtcattttaatatgttctagacacaagataatggatcacatttaaacatgagaaaattaagtcccatcagcaagtaataatacccaatcatattcaatcatgttgaacaacaacctctactaaaatcatcttctcctaggtgaggttaagaaaataacaacaacaattaaaaaaaaagctattacgttactttcagaaagatccaactttaaaatacttctgtgttatttcccataaggcaatacagtttcttgtgttcatgcctcccagacctctgcatactgtgaccagatgtcctctctcttgatgcttagtgaattccctcatttttcaaatttcaacttatcaagtctatctagatacccctttctctgctctccaaccccctgaacttccctggttctagtcctaaacgactttattcctctagaggattacaagcttcatgagagcaggaactgataggtttcttagatgctaaaccccaggacccaagtctctggtgcataaatattgttgaatatgttattcctttgactttaatgttttctgtatcactcaactcctggaagaaaagctatgacaaacctagacagtgtattagaaagcagatacattacttgccaacaaacatc

SEQ ID NO: 34505 - DNA, 1174 bp, Bovine  19866881406483
  misc_feature (1)..(1): n is a, c, g, or t
ntgcctggaaatatcgacgccttccttttgattcagatgctccattcacatctatccttatatgtctcactgtgatacattttctttttaaaagatcctgtagtcctgtatgaaatacagactgtgcatcttaggtaaaccatacttctttctgaccaaccatgacctcatcagtgaattcatccaagaatgactcagattaatacctgtactttctccaacccctacttcaagcccctagctcactaagcctctgtacctgactgctaaatgggctccctggttcaatttacagataagaaaactgaggtccatacgggctaaataataagacccttggcctcatagaaaatgtccttcaaccagcactggaggaaataggttcttaagtccctgaagggcatttgtgaagagcatcaccagaaaggcagtgcaagaggaggggagtgtgttttacacccagagttctctccttaccacaagccagcgttacctcctgtcagcctcctacactcccccagccttcctgtctgcagctggcaagaccctccatccactcccctcagagcatgctatccacacacagggaccattcaactcaggcatggagaagatggccttctcaacccttactccaaacccaagaaactcaaactagccaaaacaaaggacaagatttttttttttcttaaaccatatatccttcctactcatgatgggtttctacctgcctcaattcgatgaatcatctcctcctaaaacacacacatcccaacagtaagcccctcccagagctagccccagggctacagtcctggggagcaagagcgggcacatcctggggcttcgaacatgaggagacgggaagtcagagtggagggatcctcagctggggctgagaggaaaataatcgaacccttgcaaattgcaaagcacaagatgccagaagagatccctcactgtcacagctgcttaccatagaaatctctcctcctttggggatgacatcagcagacctgcttttttgtcaccagtcactccgcacttgctttaattatgcagcacaccaacagaaattttctttctgatcacataaatcacatcgccctgacactgggctcaataggcacggctggaacaatgtggggagagctatcgactccatcgctcaagt

SEQ ID NO: 34506 - DNA, 1198 bp, Bovine  19866881423782
  misc_feature (1)..(1): n is a, c, g, or t
naattgtatagatgagaaaactgaggcttagaaagattaagagactggtccaaagggcttacaaggtatttgttgtacagctggtgtattagcttcctaggggtgttacaccaaataaccatgaacctggtgtcttaaacaacagaaatgtattctctcatagttctgcagggcagaagtctgaaatcaaggtgtcagcaagcctgagttccttccagatgctcacaaggagatttcttgcttccatctcccagcttctggtgacttcaggtggtcttggcttgtagctgcctaacttcaatctctggccctgtcttcacctgaactcctcttgtccatctatctttcctctatttgtctatattcataacacaccaggatagtccaggatgatttaatttcaggatcctttattatatctgcaaaaactttttttcccaattaggtcacgttcatagtttccctcggttagaatgaggatatacctttgtttgcttggtttggtagggggaccactactcagcctcctacatctgaatttgaaagtcaagcctttctcacttacagcccatttcctcatggcactgccatgctatttcctgtcttttcttttatctgttttgtcaaggatagctttggccaagataaagatgctgcagtcacagtcacagtatagcaagaacatagcctttcaactgcccagagttatacagcaagttagtgacagtgttgaaaggtaagctcccctcaatcctgccactattctaggaaccaagaagagagctgctcctggaaagatacctttccattgcctctaaacatcaaaacaattgactcttttataaagttctgctctcctttgcaggagtaaaagagctatcaggtgtcaacttaacctatagccaccccctaataagtttaagataaaaggccaatacattcaaataagattcagacataatgtgatagtatttgttaccaaaccccatctaattatatcagtcaatcttttattaccagacccacaagtgcagggaactctattataatctctctttataatgatctcctctctagctgactcctggaactctataataaattaatcatctgctcacaatcatgagtaaacatcaactcaattaagaattgataaataaacagtttgctccaacgcttgtcctgatacggaggggga

SEQ ID NO: 34507 - DNA, 931 bp, Bovine  19866881431758
  misc_feature (1)..(1): n is a, c, g, or t
nacttccttttcctctctggaaattgtatttcatgcggtgtatttctgatccaagtgttacatcaatcagcagttcagtgtaggtttgtggttctcctggagcgttttacaagcagggatggagtttcttatgctggtctgcttgactctcttggttggactcttggaaaaatactcaaagtgcagtttccttccatctattatgatttctttttagttgctattggaattattgctttttctaaggcattatcctaatagaggcattcctttctgggctgtatttgacctgtgggtgagattgggaatctgtttattctcatggttattgtaaagttaaggctttcagaaaactgagaaaaataggagcctttgaaatgtgatccccttggccaatgacttccctgttgctgaatggatgctggatgcaggcttagcttgtgcctttccttctaaggtggtttgtttttgagagaagtcccccaacccctgcctcctacagtggtcagttcttcatgttttggatgtcaaagaaagaaagaagacattttaagttacgaatagtggtgtaaatattgatgacgaagaaggagaagggagaccttggacttgggcatcgtgccaggctgttgtctgttgtctgaatgtgtaacaagcatgtgactgtgatgtgccagatcacagaagccagggctggcaatcgcagtgactaatatggtatttgttgaccgaaagtccacctaagagttagaatctgaggtcatgagctaatctcgctgaaagaaaggagactttggagtctgggatttgcaattttttttaacaaattttttttttaaaggaagataaaattgcttccattctccaaataataatattgagctgatactttcttatattgggtccaaagaaggaaattaaaatttttttt

SEQ ID NO: 34508 - DNA, 1785 bp, Bovine  19866881509453
  misc_feature (1)..(1): n is a, c, g, or t
ncagctgcttctgtctttgctcatggttcactgatttacatatactcagttaaattatgtttacaaatactcacgagaaaagctggcataaagcagttgagagtaaacacaattgcttcttggtgagagcaaaaatatatggacacagtaggtggaagtggcctcctcactggagtgtggacaccagttagtatatctcatggagggaaggaagaagatggggaaggtgaaaaaaatggaggaagttggataggttttggggggaggagtaaagacagcttcttctactaaacatgaaataacttgcatgtctctagaaggagtaacatacattcttgacattgttttttaagtgattactccatcccccaaccaaaaataaatacataaactaataaaggcatgacatggttctcaatccataggacagagttaaggcaaaatggcagacccatcccctgtagcaacacctaagcttgccaaacttggaggcagttgccctcaaacttggaaacaaagtaccctaaagactgatttgagcttgagaaagttaaaattgaccaggtggaggaatctactatggtcacttgtaattattctgttcctgctggcaaagtgcatctgaaacagtacaccattcagggtaagtgttttgatcaattactttcgctggtaggttagcaccttcataggttactctggctgattcattaccctcattgtggcagagagaagcatttcaaagcaccaattaataagtcagacaagcttgagtttgaatcccagctctgcctgactgccttgctttgagcaaattatttaactgctgtgagctgtggttttctcaagatgaaatggaaatgacagaacctatgtttacagaagtgtggtggggactaaatgtggtcacacatataaagcacttattagagagcatttggcacatagtaagccctgcagaaatggtagctggcccttaaggacataaggacgttctgatttggtaggagtggaaattggtgacctgggatgttgtccagaccccaaggcatggaataaatgagagtctggggtgatcgggggcatcataaagatgctgcgtatgaaaggagaaagtaggtacacagagaccctaggatggtcttggcccacctgatgattctgctcaatattgatccaggaggcttaggtagtctgatacttgttaccaaaacagtccaagtgtctacctggaggaatgtgaaattcccagaataccccagaggtcattcttcatgagatcacctgtattttcatttagttataaaagtatgggttgagtgcctattttgtatcatgtgctgaggacatagggttgcaaacaaggacttgaagatcctcaggagtttatggtcaacaaaagcacatggatatttacattttcttattctactgtaatttatcaggaagtcaatacacagaagatagggtctctaatcataccagggggaaaggcagacttttccccaggaaagatgaaatgtgaacaagattgcaaagggtgagtttgataattgaggagagaaagacaagcatttcaggcagtgggaagagcacatgcaaatacagagagccctgaaaggttctaacaagtcagtcagggagcagtgagaaagtcagggtgactgggatgggtggtatccagcaggtgagaccgaaggggtaatctgaggtgtcccactactaagtccagttcctagagattaaatactttcttctagactatcaacaataaaatcaagaaaa

SEQ ID NO: 34509 - DNA, 2298 bp, Bovine  19866881520696
  misc_feature (1)..(1): n is a, c, g, or t
ncagattggcatgtctttggattagtggaggcactgaagcaaaatgctcaatccttagtgacctttggcaagtggaggggggtgtgtaaccattgtgggttatctttatgtttgctctatagacactcaacctctgccaggccaagacagaagctgtcagggcagataaacctagtagggagtgggctgttttccttactgcatcacagtgcctggcagagctattttgtctgataacctgcttcttctttaaacttgcctgtgaatagttccatgaaacattaaaccttccttcttaggttctgagccttctaggttctgttgtaatcttgggcctaggactttctttttcatacaatgtgcattcagttgtcctctgttagagtattctgacaaatacttggaaatccatgggagaagccgtatctggctgttgcaggcacatgtcctgtgtgtgtgtgtgtgtgtgtgtgtgtgtgtgtgtgtgtgtgtatgtatgtatgttccttttgtttgtccaggaagcattctgtggaagtggggtcccctttgatcatttctttctgagctcattatcgcttgtctctagttggcacttacttcgtatgttgatttagaatttcacaagcactcagagaaaaaaatttgggcaaatatccttaatatttggagtagagctcatatttcatttttctctttttgtcaagcagcagtgactccagcccagggatgttggttcaggagactggctttgtgactttgggcaagttgcttcacttgtctgagctcagatttgctcctctttaaaatcagatagtcacatcagacgattgcttagacctgttccagctttaatggactccagggtttcttagccaagaataggactgaagcagagtgtattttaggggaagtgggtgaagtgttgggctcttctttcattcctattccaggtgaagataaaagactttgctctctattgagctgacatgaattcagaattcattagtgttcagactttcttttaagcttcagacaggattgtgaaggaaaaagcctgccctcgattcctttgccttattagttcttctcatataatgtatggcagaaaaaactgctaattgtcacttgaggtgatgagtgagggtctggtttcttgaaggaagttttgaatttatcagttcctgtctcctcttacttaggtagaggtctagtcaggtctaataggagaggactctaaattaaatctaaactaaaattaattcacatgtccctctttgccgaagaagaaatggggagtccaggagaattgtagggtaagtatatatatggagttgtgtacagatccaaatgtaataatgaaaataaaaatttgggggtgttagagtgtctgtgggttccccttgcacgagctgtgactgggagaatgtaaatatacacaagcacatatacttcactaaggagccatttagacataatttcaatttattacagactctcattgctgaccttttaaaggctagttttatttagttttagtttataacctaagtacttgatacttgtgtgtgaaaattcactccttgtatcttgagcccaggatcttatattggtgcatcaacctcacagtgcattaggcttaaaatataaatggtgttttataaaatgccattagcattcatttccagagaaggcaatggcaacctactctagtactcttgcctggaaaatcccatggacggaggagcctggtaggctgcagtccatggggccgctatgagtcagacatgactgagcgacttcactttcacttttcactttcacgcattggagaaggcaatggcaacccactccagtgttcttgcctggagaatcctagggacggggaagcctggtgggctgctgattattggaaaagactctgttgctgggagggattgggggcaggaggagaaggggacgacagaggataagatggctggatggcatcactgactcgatggacatgagtctgaatgaactctgggacttggtgatggacagggaggcctggcgtgctgcgattcatggggtcgcaaagagtcggacacaactgagcaactgaactgaactgaactgaactgaagcgacttagtagcagcagcaacagcgttcttttctgaatccttggtgtctgctgatcttaccgttctgtcctacctctctccgactcagccttctctctgtctgctgagcagtttgtagttgttgagcatttgccttttcaagtccccaggcgggtcctcagaggaacatttg

SEQ ID NO: 34510 - DNA, 1633 bp, Bovine  19866881577341
  misc_feature (1)..(1): n is a, c, g, or t
naacattcttaccagcaactctttggatttaagtttagacagaaaaacatgattctctttcattttaagccattaaagtctgggaaactttacttcacattactgaacttgggatcaaacaaaacggcctggggtgcatgatgggatttgtttaaagaattgaatctacctcaaaacccaggatatatctttatctgaaaagagacaagagacgcactcccactgacctgccttctcaccccaagatttacatgaaatatgctctcccagctttaacaactcctttccaaaagctcctatggaaggacatcacagctctccagggaagttcccacgaggagctggcttttcttctcttgttagccttctcttgggtgctaaggtcagttggaagttcaaagacattagggttgctatgggcctgtctctcctttcttaagtcctatggaaaccactatctatcatgtgagatcacatttgtcaatgcatcactttcaaggatatctacagcatgttagactctgccagtaaactgcagaagatagtgcctgcatgcaaagtcacttcagctatgtctgattctttgagatcctacagattgtagcccatcaggctcctctgtccatagggattctctaggcaagaatactggagtggattgcagtaccctccttcaggggaatcttcccaattcagggatcacatgtctcttttgtctccgcattggcagggaaggttccactagcaccatgtgggaagatcttcctgacccagggatcgaaccagggtctcccacattgtgggcagattttttaccatctgagccaccagggaagcccccccaaatttcttcaccaagtttggagtaaaacttcttttatataggcattatgtgtatgtgttactcagtcgtgtctgattctttgtgaccccatggactgtagcccactaggctcctctgtccatggagttctccaggtaagaatactggagtgggtagccaggccttcttcaggggatcttcttgacctagggattgaacctgcattggcagatggattctttactgtctgagctaccagggaagcctacagaagatgggatctttcccagtttttctgaatcccccacaatgttcagcactcttctagccaaaggttgctcaaaaacatctatcatattgagaatggcagctcaaggaagatttctatggaaagtaaaagactccttttttttttttttcttgaaaattaatccctagaaatgaccttaagctactccaaccttaggaaacaaataccaggtactgggtttcctaggtggttttaaagatatacaaaagggatagagcctaatggtgaaagagcctgtgtctagagtttgggattagtcctagtttttctgcattccagctgaataatattggatgtgtgacatagtttttatggcctaaccttcctcatctattaaatatctatttgaaaattacatttgatttcctcacaggggctagaaagttcaaagaaggtaaacacaaagaacttgcaacactaatgtctggaaccaatgaaggaaataagagtgggagagacgggtggatggtccatggatggattggtggacaggaatatgg

SEQ ID NO: 34511 - DNA, 781 bp, Bovine  19866881794159
  misc_feature (1)..(1): n is a, c, g, or t
ntgtgtctacaaggtggagttaatgactttctatcctgtgtgcttctccacaccttcaataggaaactaaattgacactgaccaaagggaagcagatcaattggatgcaactctgtttcctaagtaagatcttctcaggtttgcctgtggttggcaacagtgtatttctacggccaaagtcaacctcctaggttagataatttaatggaaagaagcatgagtgaaagcccctaggaactccaagctaacttgggtaccactgtaaaaatcattccatcacccatattagcaatggctaataaataaccacacactgaaacctcaccatactggatatttgaaatctgatgctgccaaagaaaccattttatactgagctacttttgccatttccaagagggactgtctctaaaacagatccactgtatactcaacactgccctccaatataaagttgggtttgtggttccagttggcttgatttggcttctcggggtgatataagagaaggggaccccattcagagaggttatccctgtccttgggcacccatgttaattcagtagcctcactgggtagtagaaagtaactttatttataaccccaaaagcaataataaacacagaactatgatttactctgaaccttcctattattaaaacactttgtcttatagttttattgatttacaatctgtcctacttacttttttagcatctgaaaacaatcaaggcacaaagctgcaaaatgtttggacattaattgttaggaggcagcattt

SEQ ID NO: 34512 - DNA, 754 bp, Bovine  19866881824628
  misc_feature (1)..(1): n is a, c, g, or t
ntaaagcactcaaatacagttggtccatgtaaaatgctcagaacaatgcttatgtatggcaagagctcaacacgccactaaccgccatcagcatgagtatcactaccatcttggaaaggtctttcccactcaagctttactccatgtaccaatgataccaccatcactattgaggtcccagtgtttgcatagcttccagcactgagagtaactatatcatccttacacaggcttatcctgaccaaacctataaatgagtaaacctccatgaatgagatcacttgaaagcaattttgagggcttggtccttcaactctttacataaccagtatataataatggagctttttttgtggtctacaagtcttcaggattattagtgctgctttggttaggaagctgcagtctgatcccctgactagaaatactggcataatttattgcattattactcctctgaactgaaagcaattaattacctggagcaggatgcacaagtgaaaatttatcagaggaaagtgatgaaaaatgtgcccattgctttaaaataataggtgcttaatgggtttttttgtttgctggctaatctcaggcatcttataaacaactccagccctgttatcagctgtgaatccagcccccactccttcttgcccccctctattattctatcatcccatatctctcttgagtacaagaaatgtctaaaacattcacctaaaagcagaagagagactccatgcctcttctgcat

SEQ ID NO: 34513 - DNA, 1305 bp, Bovine  19866880449724
  misc_feature (1)..(1): n is a, c, g, or t
ncttatgttttgtattcattcaggtgttgaaatttttctcttgtcattgcagtaccatcttttatgatgctgtcaatctttgggaatgagtgcattgcaaccaaagccaggttctattaggcagaaaagggatggagggtactgagaaactgtgatgtgtttctctggctagaagtggtgcataatgttgtatgcccatttcgtcagcaaaaacagtctcactgtcacatatcactgcaaaggaaattgtgagtcattatgtggcttggctgccatgtgcctggccatagttaacctctgtggaagagggtgagacagcctctaggggacagcctgtttgtccagtcttccagtttacccttcttgggatatgtactaagttcagggaaacaaactttagtttcatagaattgagagtttgagtataggtattctttcactgcttggctatgtcaggattgatgctttaatagtctatcagaggatatctagggctgaatgattttggtattgtttctaacaagtaggaggaagctgggagattaatcacaatgtagatctttaatgaaaacctatacagatggtccctgacttgtgatggttcaatttacaatttttcaactttacaatgttgtgaaagtcatacacatttagtacaaactatactttgaattgtaaattttgatcttttcccaggctagtgatatatagtactatactctcatgatgccaggctcccagtcagccacatgatcataaggggaatcaaccaatacacttactacccttctgtacccagataaccactctttttttcactttcagtacagaattcgataaattgcatgagatattcaacactttattataaaataggtcttttgttagctgctttggcccaaccttaggctaacataagtcttctaagcacatttaaagtaggctgggttaagctttgtttagtaggttaggtgtattcaactcatttctgatttatgatattttaaacttatcatggacatatcaggacataacctcattgtaagttgagaaaactctgcactctgaacccctccttcaagctttggctgtgcacagatgctgccctatgacactcttgtctcttttatcctgtagtcattgcactaggtctgggtatctagatcacctgcatgagtggggtcaggttgcctttgttaaagtcttaactttccccacggctgggcaaagtgattttggttaattatttaaccattgtacttcctttgtttcatgtggaaaaccaggataataaatagttacttc

SEQ ID NO: 34514 - DNA, 2496 bp, Bovine  19866880720552
  misc_feature (1)..(1): n is a, c, g, or t
natggtgatggacagggaggcctggtgtgctgcgattcatgggatcacaaagagtcagacacgactgagcgactgaactgaacctgatatatatatatatatatatatatatatatatatatatttaagtacattatatatttacagaaggaaaatagagttaaaaatctgctatgaacagattattagctttcaataccagataaggttaaaatgtcagataaatcttaaatgaagagagcataaatgtgtattgaaaatacacgatgtctgataaagttaccaactaggttagggaagggaagatgaaaatctcaaatctgaagttttgccttgattcttatccagacctctaaagacagaatgatttgccacacacctgaaaatattctaaaaactgttcctctaattaccaatgggctaattaagagacaggttattggaaaagcttcaactgtaactcaccttcaagaccacaatttacttgcaccatacagccaacattctagagaacttaatgtaatcatagccattaagatagtgggatttacataaaaagtagagccaagttggaaatgattgacttggggtgataaaaaacttaattgaagggcattgcccatttgtcatttcaaacagaacttctggaactctaaaactgaatatgcagaactgactggaggaaattcacaactctcatactagacttgtaggaaagagaggtgtcctttgatatctctacttcccttccttctcttatttaactctttttaaccaacttatttacacaattatgttttatgatagtatctattgaatccctccaaagtaaatttaaatagtcagttttatattttagtctcttctacatgcctcagcaaaaacataaacattttgctttcctctgttcttcccacataaccttatgagcttttttttattatatcaatctttatgattttattgtaattttaaatgcattgtttactaccaagccaagtgaagtaatattatgcttgttttttttatacaatgattgttttgtagtgaatcatgccctatgtggtcatgtacactatatatacttatttctaatttatctctaattatttgatagaattttgaagaaacagatattctattttttgtcttttcttcttgactatgatgcttttctgttgttttcataggttgatttctatgcttttaatattttttctaaatcattccttcatttctctttcagattatattgactttttactggatatcatgtcttcttcttgcctgctattatttttccctattttgtgtaccatataagtacatggaaagtgaagatttttgagaacattcaagtctaaaggcaaaatatttaaaatgactgaacatagaaactaaaatttttcacattatggaatctctataaacaattttgattgacagtcattcaattggcaagttattctaaatcattttacccacatcattagtttactcttctccttaatgagaaataagtcatcctctgtttatagcttaaacctagtttaaattttcctggaggctttaagaacagatggtagtatctgtttaaagttgatatggttattaaagtacagaaatacctaagcactaaacttttaattcagttgacatcaaccctttatgcatctaaaaaaagtctacaaagacttgaaagttatatctacgctaggaaaatgtaaatatcacaaaagtacaaaaaagaaggaaagacaaaagttgatagtgcatactttatctaagaccaaaaattgttgactcagtttgattcactgaaatgagcagaggtgcacagctggctgcagtccatggggtcgcaaaatcagacatgagttagtgactgagcctgcagcatgcacctctcatattccagcaattcttcctttctagtaatttcctttcttttttttttttttctttctttttcgtctcctttacatcagacatgtttgccatcagtggcttccgttgttctttgacttacttttagcatatacaaccaaaagcgccatcaacactaactgggttatgtgtaggcttatgaatctccattaaactctgcatagtaaaggtacagaaaagaaaatcaggaatgcactggtctactttattattagatacatttgatagttaattgtatgggtcaacttggctgggccatggtaaccaaaacatttggttgaataccagattggatattattgtgaaggaatttttaagatgatattaacattacatcagtcaactttgaataaagccaagtaccctccattatgtgagtaggtctcctccaaatagttgaaggccttaagagaaaacagactgagatccttcaaggaagagggaattctgtcttcagattgccattggactcaggatataacatcaaatcttgcctgtgtctccagcctgttggtctcccggcagatttggaagagatagctttcacag

SEQ ID NO: 34515 - DNA, 1461 bp, Bovine  19866881001652
  misc_feature (1)..(1): n is a, c, g, or t
ntaccccatggattgtagcccgccaggttcctctgtctatgggatttttcaggcaaggatactggaatgggttgccatttcctcctccagggaatcttactaattcaacaagtgaacccacatctcctatgtctcctgcattacaggtgaattctttaccactgatccatcagggaagccctcatatcaatacatgtgggtcaatataaatgttgaaggctttgaggaagtacatgtcaccatttttgagtggaattattaatttgatactcaaaatgtgtataaagtatatacatttttgacccacaaatgtaataatagcatcttataacatatgacttcgaatgaaaaccaattcatatatgcttagtatttctttaatattcctggggactagtaaaaggtacctaaaaccacttaaactttgaagttttatttactgtttaccatcagactcttctttggacctcagtctagcctctaacttttttggtgtcctagccatttgcttcaataacatcattatccattactgcctatcttcttccttaatcttatccaggtatatctttgtaacctccattatattaacattggtttttttcatcataagttttctgctacttataaattttacctcagatgtactttaatagaaggaaagttggaaaacacagctgggaaacaggaagccatgtgttgctggccaatttttttctataggtgattagagctaacagcatggcataaatgtcttctctataagataattggatagaaacattttttgatcctcaactgaaggaactggagcagaaaagatgaagtggttccttttcatgccaaatcaagatgatctatagctgagtcaataacagaattgctggtatataacctatgtgcccaaggcaacttctgacccataagaaaagtttcagcttggtctctgactcttacaataaagctagacataaggtttgttgaaattatacaattgacctgtttaaaataggaagtgatcttataaatcagtcattttaatctatgtatgtggtacataaatttaataaatttattctagataatcattgaacattaactaagaggagcttaaatcaaagaaaaaaagcagctattaatatttgattcttaatgtagggttctttcaattttcaaatattttgctgcataaaatgtataattaatattatcatgtaaacagagattgtttcctctgtaaacttgcccctttagtaaagtgaaagtgaaagtcattcagttgtgcccgactctttgctacccaatggactgtatagtctgtattcctcaggccagaatcctggagagggtagcctttcctttcttcagggggtcatcccaaccgagagactgaacccaggtctcccgcattgaaggggatttttaaccagcgatccacaaaggaagccgaagaatccagag

SEQ ID NO: 34516 - DNA, 551 bp, Bovine  19866881184249
  misc_feature (1)..(1): n is a, c, g, or t
nggtgagggttcaatccctggtcagggaactgagattccacatgctgtgaggcacagccaaaaagtagaaaaatgaaataaaaaaggtttgttatttctctaaaacaggcccactcatagcttactaacagtaaacactactactgcttttcttcctcagatgtgattttatctatttaaaaatacatataaactacatgaaatatatgagaaatgtagtttcttctagggaaaattctaaaacttgtttcttgcattggaactttaaatgggtaccaagtgatattcaatattctgtgatattattataaatgataatctaaaagatacagtgaaattgaattttgacctcttattcacctctggataaaaatgataaaagactatggggaccagggaatttaaactgaaggaaaaatcaataaaattaagtagattttcctcagtagcctggagtgtatctttatgccagtgctaaactgcatttaagatctttttttttttctttatgctttcacaaaaagcttttaaccttattatagaaattaaaa

SEQ ID NO: 34517 - DNA, 886 bp, Bovine  19866881473465
  misc_feature (1)..(1): n is a, c, g, or t
naaaaataaaaaaataaaatgttaaaattcgggaattgtcaaaatataatagggcattgaattcagaattgttttcactttggtatcactcataatagaaaagtaatatctaagttttcatctgagctttctttctataggtattttgactcagagtatttaaaaggttagcaatttacagatcttatggaataattcagatatttttctgcattttaaatggtagatctgccttaagtcagatggataatgactgattcaagccatatttctccatgaacatcataggtatgaaatcataatgttcactgtattttagaggaaaagcctcaagacagaaggaaatcatttaatactttaaaatatatgttaaagaaacaagataattttattcttcattaacttactcttttaagctatccttcagttacaagtaacaaattaaatcagtataagttaatgacaaatgttggtgtttgtaacaacatatttgagtcaaactataacactatgtacctgcggaaggggctttactcctttgagcatcagttatcatgtttgagagaaagagcgagagagagcaagagaaagagcctttatactgtttttgaaggttatatgagataatgaatataacgacctgtaataaatatacagttaagttgtagatggctttaaaaagtgcataatagatgataatatttggacatttgcctactcttgctattaattactggcataggacttaagtgtttattcaaacaaggcaaaaagccaaaccttctcaaatgacttttttctcagccttagattggcatattgctgcacactaacaccttgaaatcttcacctcttggtaattagatttaaaattttaggtaaggaa

SEQ ID NO: 34518 - DNA, 1162 bp, Bovine  19866881574770
  misc_feature (1)..(1): n is a, c, g, or t
ntatagcagaaccgcactgctttctgtatgcattggtttgagttgaaataaaaatatttctgttaacattgcttaagagccagtttaattctgaagctttaaagtgaatcaatcaccaaatgcaagaaaatatccatgacagctcagaaatacattgagtgctattttgagagaactttaaaataacaaagaaggatggcttttacgataaagggaagcataaatagttctgataaaacatatctgtattcagaggttaaacataaaacaagatcaacaaaatccgacaaacaaaattatagaaaaagaattcatcacagggatgcggacatttggaaatggattactataagaagcaatgaattttaaagcaatcattgtgcataaagtggttaaaaacacgggccctactcagatgggctaggttaagtcaactctacaatttcagagtattatgacctcagacaatttacttaatctcctggcaccatctatgaaataaatacacatatcatatggttgcacagattaaatgagcctttgctcagcataatgtctggcaaatggtaatttctaaataaacatttagtactatcaacagatcagatgatgtatctataaaacaggagctaaaaaatcaaagaagataaatggctaaactatttttataaaaaagatcaagtgaagaggaagatgagtaagattaaacaagagttaaaataaactcgtagcttttggaatattaaagagtagaattaaaattaaggcaacttgcctttgtgatgttttctcaagacagaaaaaagtagggggggtaaaaaggatgagaattgtaagtattacagataataataggagaagtgaaaattagcctgcctaatactacaagatcatagctcgcagtgtttatctgggtgattccagtatacttttcttcccatcaactccatgccaagggcattttttctcttttcaaatgaacaccaaagcaataaaaaattccagaatctgcaagctcaggttctggtaagctttgctataccagaactggagagtaaccagaactagccaacaggggaataaaaaaagccctttgcttagttgctcagtcatgtctgactctttgtgaacacatagactgcagcccaccaggctcctctgt

SEQ ID NO: 34519 - DNA, 699 bp, Bovine  19866881824283
  misc_feature (1)..(1): n is a, c, g, or t
nataattatttgaatgtatttatttactcataagtatttcaataatttaaaatatcagaggtatgtgaggaatctggaaatataaagtgttttaatttgaatatatacatgaactaaactagtcttagtatttgttcattcattttatgctcctttttgtttacaaaattattttgtaaaattttaaaaatcagtatgttttatatataaaaatatttttatattcacaaactaaatttcatattttaaatattaaaatgtataattttttcattttagataagatacaaattttatgtttataacctcacaaaatatttacataatagtgtttcctctgttcacatgaatgacccaattcagtggttccataatttaacattttgtaatagtagccttaatattgtttttctataaattctgagtttgatatttacactctataaagtcaaaaaattttctcaggaggaaactaaagtcaatttgacccttaaatctcattttattcttaaaactctagagattctagttcattatttcttcaattctaatactaatagtattttcctgagtatataaactctccattaatacataaacttgatttgcatttttataatatctttcggccttggccaatctaccattaatatatgcagtaaatctaaatgacagcgatttaaaaattgcaatccctta

SEQ ID NO: 34520 - DNA, 1182 bp, Bovine  19866880496687
  misc_feature (1)..(1): n is a, c, g, or t
nacgtggcatttggtctaaaacttgttttctcccctaaatgagatgattactttcaaccataccttgtgctcaggccaaattcctagggcctttgtgtggaaaccttgctgacattgacagatggtattagattcccatagtgttgggctaactggaaaatgttaaggagccatttgaactccaaaagcaaaagtaattaagacaaacattggcgccttcatggtgtgactataggcaggtgccccaaggctgctgctgctgctgctaagttgcttcagtcgtgtccaattctgtgcgatcccatagacggcagcccaccaggctcctccgcccatgggattttccaggcaagagtactagagtgggttgccattgccttctccggccccaaagttaggaggatgtgaatggctgaggtaatcaccagccaatccttccactctccccagggtttcctgtttcttgctgtcctctttccctcttccaccttctcttctgcctctccttagtaagaggggctctcaggatccctaccaagagtcattagtggcagttaacctttttaccatacttgctgaatgcctttcctgagggacatagaggtgagccatccagacatcggtgaacaaaatccttgttgtatcatacctgtggttatgaattgggaagtacatgatgtattgctgccccggacttcgctgaaggaatataccgtgatgttgtacttggtgtcacactctagagcagaaagcgtgcaagctggagccgtgtcattacactcaaccacattgaacccatccacagcctttgtttcataaagttcggcacctcggacgggagaccagacaatctcgactctgtcactggacaccagcacagggttaatgtcactaggacaacagggagctgcaagcaggagtagagagaaggacgtcagtacaggagccatgctgtcagaggggcattgagtcccggcgtctccgtgcccaggagtctctgcagtcactgtaagagtctcctacaggtctgcccaacagtgatcctggcctgacacccactacatagaggatagcttctctctgcatgacattcaaggttataataagcgctaccctgtcgacacatccagctgctccccacaccccctgcctcacctgactccttattctccacccaacgtg

SEQ ID NO: 34521 - DNA, 1879 bp, Bovine  19866880579452
  misc_feature (1)..(1): n is a, c, g, or t
ngtccatggttagacattgttttgctaaatcagttagggagctacttgcaagtgaagctgggtttcattatatctttctcactgaccactttagaatagaacattttgattcagaagatctggcgaagtttcctgaagttgtctttgggtacatgtgtccagccatgattgtcatcagcacaccaaactctgaattcaattccctgtttccatgtgcagtctttagagattcagatcacaaatttgagtggagcagaatgcagtttcagacctggtgagttcttaagtgtcttttttgtatgtgactacactggagttttaaaccatatgaaatcttagtatctacggttaccataataagttatttcttactttactccaacaaaattgattcccagaatgcaacttggcatataatcattaaggaactaccatatttgggcatttattttctctgtcgagtgtcgaaagtgtgtgtgggcactgctacctttcatgtgaaggtatcaggagttatctcccagaatggcgtgacagatggtcatgttctggcaaaactgcaaacccaaataggagctgggattatagcccttctggtttctttgtccctgcacgctgttccatattcttatggttactgggaaactcacactgtcattgccttaatgcgctttgcagaaataagcaaagccagtgatatggcctcatgtgatgttgtaggaattgcagtttattttaacttgtaatttttatgttctgtcctaactagaaatggttgttttagtttagaaaatcatcttttctctttgttttgttttttagggctttagatgtggccagtcgctacaattactcggtggagtttactggtgtgggggaaccacccacaggagctgaggatgttggctattgtacccagataggggtcttccggagaaaagcagaagcagctgaactggctgttttggagcatcatggtgaacatgtttatgaagttgtgagtgttctttgtattctcagagcaagttcatttactgggatggtgagataagtccccattagagagaggtgtgaatgacattcttttgaggagaatcccatgccccatgatctcccaaagcatgttacagagatgatctgctggtgtcttggaaatacttccccagcagctgtgcactccacccccatctttatagtctgttaggaaagaggaaaagcagcagcagtttctgtgtagcttgatttaggacatgacttgaaattgagtcttgaagcttgtcagacccattttgtttgaggagatgtgtatggtaaagaatatgttgaagaatgtgtctatatgccaggaatttttgaccctcataactgggacattcacaataggtaaggtttgacatgttcatgtgcttaattatatatacagtttaattctaatgtgctaaaaagttactagtggttttgaaaatttttcttctattccagatcttttttttttttttgctccttcaggtttatacaacctcgtacccaagtttacagcaaataaattaccgtagacgtgtggtgatttatctagtgtaccgagaagtgagcagattgaaacagaaataccaagtgagtttgagacagcatgaattggagcctgagttcatagcccctggcaaccagacaggaaaattcacctcagaccttccagttccagtactcactgaagatgacaaagccatggagatagctccccaacctttctgtattgaagataagttttacgtacccctgcaaagaatcattgcttatcccaggctggggcacttatgcggtaatgtaaagaagctgaaagagttccttggtgacgtgattgaactgaactgtgatggtt

SEQ ID NO: 34522 - DNA, 1368 bp, Bovine  19866880594069
  misc_feature (1)..(1): n is a, c, g, or t
natgaaggcactgtccacaacaaacgttctggtttggttgtcagttgtccaggaaatcaggccattgcaatgagcaggactggctaacaggagataagatgaataatggggtcaaaggaagaagcagaggttgagagataccacaaaagtcagaagaaagaaggccaaggactagccaaggacaagtaactggggcacagaaaagggatgagtgtgaggagaaatgaatgtgagacccctggggggctttctgtcctgcaggggggcggggacataggcgcttcctgcagagtcagcttctgctggcaaatggctaagatgaatccctgcaacttttccccaggatatataagccatcagagttttcttttgatggtgaaggagacagtcctgggtgatgttcaaggaatgtctggccagtgcacagtggactctttgtccattcttgcagcatggttatttctgagatgctgccaaagccagctctcttggccttggggacagaaagagaaggttgtctgtgtcatgcacaaggcgatttggcaggtgggggtctgctggagggagttgatactggcaaatcacacattcacactgtatttactccttctcctctttgccctcgagttttgttttgccctttagttttgaatttggcatacagtgatcttacccagcaaatgcagttgttgttgttgtttagttgctaagttgtgttggattcttttgcgaccccatggacggtagcccgccagcctcctctgtccgtaggatttcccaggcatgaatactgaagtgagttgccatttccttctccagggaattttcctggatcagggatcgaacctgcatctcctgcactggcaagcagattctttaccagggaagcccacaattgcagttcattaaacataaaacccagcaatttcggtttgaccttttcttccacttggacctcctacacctagagcatttttgtgtccgcggagttttgcagagtaatcaatctgattgccatgttgtatctcctaccccattcccaaagtataggaatgcctagtgtaaattcataacataagcattcatcgcctcctggcaaaccatggccaggtccaggtgaggagggaccacagcaactcattcttattctggggcagatattttgatagagaaggagagaataatgtttaatttttaatattttatatagaagaatcttaaaattgttacattctgatagtactaaaacagtacaatggagcaattatgaaacaacccaattctccctccttttccattaggtgaaataccacttgggaagtgtgcaaagtgcatgaaaggaagtcaaagctgtggcaggatggggga

SEQ ID NO: 34523 - DNA, 1060 bp, Bovine  19866880596935
  misc_feature (1)..(1): n is a, c, g, or t
natcactgtactatgtttcccttaaaagatagattgagtaggacgtgtaagtctccataaattagcagtggttcttcactcttccttagttctatatttggcccacttactgcattgatgaaagagaaaaatttattccctagatttgcaatcaaccaaaagtgaaaccctttgagtctcagcatttgtgcattctaccaactcagagatctaaattatctcagctggccccagtgatcagacacagataagtagctgatgccaagagcccagagaaaatcaaaatacacacacaccaaatgaaatctcctatgcagtatcaataaaacactttgcatctgttgaaaagacaggatgaatcagttgacagcatcatcagtatctcagcctgtcccattccttctctcaaatagtgtggagagtggggttgaaaaggggcccattttgagggctcactgtgtctgggtgttctgggaggaccctctaagagacagcagagctagatttcatccatttaaaggccacttattattttaaaaattacttcgtgtatatggccaaatagttcttctcacagcttcctagtcagcactgaaggtgtcttaacaataagtaagaataaagcatggcataataattttaaaaaacctattttataagcacagatttttatggctcagtcataaatctctatcacatattttaattgctttatttatacttccttttctgtggaatgaacaaaataataaataaaaactgttcttatttgtactgaattgctaagagagtttatttgtgatataattgatataatatggtttcttcagataatctaaatctctgaacataaatttccattctagggacttaaatttctagaatgtatgagccaggagaagcccgtagagaaataatccttgccttcagtcatttattcaagaaaaatggtgataaaatcttctaaaagaaagaatttttctagctctgggttatcattatctatattttatggatgcaatattagaggtataaaatcttttttactaaagtagagaat

SEQ ID NO: 34524 - DNA, 2651 bp, Bovine  19866880719334
  misc_feature (1)..(1): n is a, c, g, or t
ncttctaaaagaggaactttccttcatggtattagtctacggacactacaaaatatgaacgtgcaaatgtaaataaatatatgactgttatactttcagacaaataactcatttactgagcaccaacttacgttttgaaacatgggtcaccagacatcagttgcatactaatccaaacctaaacatgagaaaaagaaacagcataattataaaaatctcaagaggaaaagccacattctgttaatctatgcaccttccacagtacctaatccactactgcctgttttagaaagtattaaatacaatgattactgaattgggttatatccaatattgaattgctgctttatacagacatgggttaaaactaatttttagcattcaaaactttgtaactgcaaaaataagagtggaaaagatagaaatgaaaagcatagacttcacggaacttccctagaggtccagtggctaagacttcaccttccaatacaaggagtgagggttcaatccctagttggggagctaggatcccacagactttgcggccaaaaaaccaaaacaaaacagaaatgatactgtatcaaattcaataaagatttcaaaaatgatccatgtaaaaaaaaattcttagaaaaaaaaggcaagggtttcaccagtaattatcctctgtgctgttctggtctgttttatatgtctttcctcccagattcctgtgttgtttaagtgtctagaatgttttcctccaacacatttgccatatgatgcttctaggggtgcctgttggtagcctgctaagagaagaatgcttctggcctttgctctagctttgcaccagaatgaatgcattaatgtactttaaaaaaaattttattcagcagcaattattttataaagcttgtacattatgtgaggcttagaaatatctgacttcccgacactccaagctattcaatgcttttcaccaagagtaaaggcatttcctctggaggatctctgtacaagtttatcctgaagactaaatgcttaatgcaagtctccacatgcctattagcagcatctgaaatatgaaatgcacagggtcatctatgaagttccccattctaagaagctaaagaataaaagggctcaatatttggagaaatctggactcccatatactctgctgatgggaatgtaaaatgtttcagccacttgaaaaagtcaggtagttctgcaaaaagttaaaagcagagttaccatgtgacccaagaattctgttccaagcatatatactcttgaatgtatgcccaagagaaaagaaaacatatgcctacactaaaacttgtatatgaatgcccatagcagcactgttcataacagctaaaaaagtgaaggaccattaaccgataaacaaaatgtggtatagccatacaatggagtattacttagctataaaaaggagcacagtactgatacatactacagcatggctgaactttgaaaaacattatgttaagttcaaagaagccagacacaaaatactacctattctataatcccatttatatgaaatgttcagaataggcaaatccagagagagagtaggctagtgattgctgagggctgtggggaagggcagagagttggggtaaagtgggaagtgactgctactgagcacatatgaggtttcttttttggggtaatgaagatgttctaaaactgattatggcaatagttggacacacctttgaatacactaaaaaccattcaattgtgtactttaactgggtgaaatgtatggcaagtgaatcatagctcaataaagctataaaaatttaaaagtattcaaagtccctgtctactaccagctggatcagcttctctttcaaggtactaagtgacttaaactaatgttcttgccactttctggaaaggaggagttagcatcttgttgaacatccatcctgtcctgaagcgtaccatgaggctactattgcaaacacattttgggaaacgtaccaggccaagacctttcagacaaggtctctaaaaatagcctcctccacgtcccatattttgctgacatcatagcaagccaacgccacttagcagctgacattcttaggaaggcagggaggctgtgagtaagcacaggaagctggtctgcagacagaaattataatgcagagagccaagaacagtccctagaaaggtccttcagttcctggaagttcaggtctggttgtaacttcccatcctagggctctgtgaaatgtccctgcatttgacctaaagctctcttttataggagctaacctaagggatttctatttcatacaactagagagtgttggcaaaatcacatacagtaactctttcagacctcaggatcagcccccctggggcaactattgaaattccccttttatagaggaggaaacagtggggcagagctgaagtgcttacacagggctccagaggtctaagaacaaacacagagccctgatgtcataatccaccctcctgctacgtggctgtaattatgttccctaagctccctaagcctgtggctactcaaattctggctgaaagctaaaacaatgaaggaatgaatacctagagtactattattggaaatagtgtttttgtgttttgtggaccagaacttaaag

SEQ ID NO: 34525 - DNA, 1734 bp, Bovine  19866880720558
  misc_feature (1)..(1): n is a, c, g, or t
ntatggatgtccgctttgcctggccggatctgctacagccctgactttgtgagtcctctgtcttggggggacagggtgtgagacgcttgtcatgatctcatctactggtcttttagatttttacttccttagagctacttatccaccaagacattttcttggaaactctgattcagttcccaccaatcttaagaagagtccagcttctcctggatggaaattcactttctagacaggatattttcctccttaccccagcacctcctctccacatctaaggcctaaacacatgtgtccagtgggcagcccagggttagactttcttcctctccctccttcctttcagcttccagttctctccagctgtccagaaactgctcagacgtccacaccattcctgtctcccacactggaatgtaggacttctttcctaatcattttagtgttgatcagcctgaggtctgaggaccaagctccgccaggtctcacagcactgctggtctgacccagggcaggtgtctggagctgagtggtgacaggtccgggaacagtgcgttttgccctttgccttcccacagtctctcacagatgggagatggttcccataggagtctagtgaacacaggtgggttgaattggccctggaccctgactcacgtacagtcaagggacatgactgctcacctgacggctgggatcagacacagccctgggaggactgctctctgccgggaggactgctctgtgccgggaagtctgtgtgtgagggtggtgacagctgttttgtgtctcaggagaaactgaagcctggtttcttgaaggagatccctgaaaaaatcaagctgttctcagagtttctggggaagaggccttggtttgcaggggacaaggtgagttggacggctttgggggcaggataactgtcattttccccaggttcagagttcagtccgcattcatgttttgtcttcctgcagctcagctatgtggatttcctggtttatgacgtccttgacatgcaccgcatatttgagcccaagtgcctggacgcattcccaaacctgaaagacttcatttctcgttttgaggtgattctcctgaaccccttgtatttacgtctttcttctctctcttattctccctgatttcctagttgggactacaatgaagactatcatttatggagaattttgtttaccagaatctctcctcagttactgacgtgtattgtgtcacatttaatctttataacattcctacatgtggaacaattatcctctccattttacagataaggaattaagctgaaaggataagtaatttctgaaggtcacacaaccagtacaggctgtgctgggtcagcactcctagtcagactgtctggcttctatgggcagcagtcagtggctgtccatctcctgtactgaaatgaaaagctcaggtccttttattgtctgggttcacagttctggaaagtgtgtaggaagcagaatattcaggagatggtatgcagctggcattagtagaatgagacacagtaggaatgatatcaagtactaaaaacacagacaatatattctcctgatctccaaagggctctgcagcaattgagccccgccctgtttttctgagattgtcacatctgtagttggtgctgggatttgggtgcatacagaggtgtcctgtgcaaggatttcatcttgacacctcttacggtgggcagttccttcactc

SEQ ID NO: 34526 - DNA, 1570 bp, Bovine  19866880730952
  misc_feature (1)..(1): n is a, c, g, or t
natttgttcattcagtattcaatattgaggacctccaatagtgacctgggagcacgggtggagcataacttggggaaccccctgctgcagaatggtcagtggggtgagggagatcaaacgtgttcacataggaaggagatagatttcctaagcaattttttaaccctggctgcacaatggaactcccaggagagcttttaaaaagtatcatgcctagctcctctgccagcccaatgctatcagaatctctgacagcatcatcagcagggcagcaacagcagcaatttttaaaggacccccagggatttccatcgtgcagtcaggcgaatcactgatgagcagggagtcctcgagaatcaagaggttcagtgctgaagctgacgggggcctctgggagatggaggtgggtgtagggggtagatgccgagtggtatctgcatttgggactcattaggcaggatgtataatggggccctcggatctggagagctcggattgtctgcagctgaagcccttggctgggggacaggaagcgaagcggggaccaggtgcagagcatcttatctctgcctgcagctgggtgctggtgctggagggagggcaggaagagaggcgggccccagccatatgtcccactgggaggctacttctagtaagttctgtcatcagtcctcactactacatttgaaaagtaccatgagaaagtggggcctgtcttgagagggcaaacaggaaggagacagttctggaagtcatgtcacattaggaatgaaagaagaaactgggacctgggagaaggaaaaagctttgagtggctctgacaactatcatcaaggagttaaaaggctatcctgtagaagggtgattagacgctgtgcttagctccagaaggcacaccaaagagtagaaattcaaagaaagaagatttcatctccatttaaaggatgacatttctaacaactagcttccacccacttgaaagggtcaccatgtgaagtggaactttcttctagactttaccaagaggttaggtagccaaatcttgaaatggtttaagaacattacagcactactttgagcaggagacttgataccatgatctttatgatctcctcctaatcctagattctagaaaattctttgatgtgaacattaaaaaaaaaacagacaaacacaaaaaacctgaaaaaattcttggtgtgtattggccattgtcttggggaaaacaaaatgttttctttttcttttaatctagcattgcacttggcaaatacaggtaactattaaactattcaagctggcaggtcctttttttgaaattaaaaagcaaatgcttccttcattatatatatctataatttaacacattaataacaatatttacaggccctggcattttcagaacaatttcttagttaatcctcgcagtgtttctatttaagtagggtcagtatttttacaggagaaacttgaaaaagagagaaatctatgtgacttgaggaaggtcatagcttaagtcagcactgtagccaaaaataaccaattgccataatttgacaggtatacagct

SEQ ID NO: 34527 - DNA, 1957 bp, Bovine  19866880797856
  misc_feature (1)..(1): n is a, c, g, or t
ntgaatgcggactgaactctgaacctggggaaatgacagttatcccgcccccaaagccgtccaactcaccttgtcccctgcaaaccaaggcctcttccccagaaactctgagaacagcttgattttttcagggatctccttcaagaaaccaggcttcagtttctcctgagacacaaaacagttgtcaccaccctcacacacagactgagagagagagcagtcctcagggctgtgtctgatcccagccgtcaggtgagcagtcatgtcccttgactgtacgtgagtcagggtccagggccagttcaacccacctgtgttcactagactcctatgggaaccatctcccatctgtgagagactgtgggaaggcaaagggcaaaacgcactgttcccggacctgtcaccactcagctccagacacctgggctgggtcagaccagcagtgctgtgagacctggcggagcttggtcctcagacctcaggctgatcaacactaaaatgactaggaaagatgtcctacattccagtgtgggagacaggaatggtgtggacgcctgagcagtttctgaatagctggagagaactggaagctgaaaggaaggagggagaggaagaaaggctaaccctgggctgcccaatggacacatgtcctgatccctgagatgccaagaaggaggctatgtggtaaggagaaaaacattccgtttacgaattgaatttctatccaggggaagctggactcctcttaagattagagggaactgagttagagtttcaaaggaaatgtcctggtggatcactagctccaagatcaaaatctaaaagaccagttgatgagatcctgacaagcacctcacaccctctccaactcagtgggaaggactcacaaagtcagggctgtagcagatcctagccatggccaagcggacatccataacctggttctccaaaatgtccacacgaatcatctcctcctctgtctccccacctgtggccacacaacagagattcaccctcagcctcccattacagcccaacccagggcatggccactggtgtccctgaccccagctccagacccactcacacaggttgtgcttgcgagcgatgtaccgaaggatggcgttgctctgggtgagcttgtgagtcccatcgattaagtagggcagctggaagaacaacagggtctggttatttgggccaccagactcccctgtaccccctctattgaccaagggcagatatgaaatctggcactcacagagcctaaatactgtggtgggcactaaataatatgctgcaaaatggagggatgagctgggacagagtatcatggaagggcaagggagagaaccaggaagctgagagacagagcagaaggcacctgttcctgaaacctctaagccaggaaaggagatggatggagatattgtccactccccctcccagcaccccagcccctgcacctacattggggaagtccaggcccagcttgaatttttcattcagccactggcttctgtcatagtcgggagctgagaaaaagaagatgcagtgaaacaacctcccaggaatccagccctccttcccggggggaccgaccaaggaatcagaggcaagaccccctgaactggtggatacggattctgaattggattctaatctcacatggagctttgggggaaagcacacgtagaaggatttggaacctccctgagctgaggcttacagagagctaatgcaagcactaagcagagcccaaggggctctcatgtcctgctttggaggacagctgcaccctcaaagggtttgggaaggggcaagtcccttttccagctggtggagtttaagggatgggagcaacaaggccaggacatgggctgcttggcaacaaatcaatatgagttgagcagaagttagaatagaagaaggattccattaccatctcctaccgagt

SEQ ID NO: 34528 - DNA, 2307 bp, Bovine  19866880834940
  misc_feature (1)..(1): n is a, c, g, or t
ncatgcgaagagttgactccactggaaaggactctgatgctgggagggattgggggcaagaggagaaggggacgacagaggatgagatggctggatggcatcactgacttgatggacgtgagtttgagtgaactccgggagttggtgatggacagggaggcctggcttgctgcgattcatggggtcgcaaagagtcggacacgactgagcaactgatctgatctgataggtatataatatacaaacaatactatgcagctctttactataattaagcaataatccagagaaattagaacagtgtacagagcacgctgcacaaacatgtccttgtttgggtgtatctctttctggaggaatacttcagaagccaattgtagtggttgcttggaggaggagtcacagagaattagagaatgacctagaaggcagacatgcttggtatatttggattatttaagatgtgcttacaatgcttattttcaaaaaagaataatttaacatattttttaaaaaatatgtccataggaaccatacagtttgttccatctctttggaacaaatacttaaagataattttaagaaataaatttcactctgtgaaaagagtgccaatgttcagagaaagctatatttagataatgctaaatatccatttagtctctcaaatacagaaaacttttggactcttaaaattatctttgcggaatatttttagtcgcgtctgcctactacgctaaaaagttcttgggcagggaggcagggattcattttgaggggcttgaaaaataggaacatggagttggaggggactctggggggcatgaaatgcaaaccccaaagcaagacttctgtaacatgcagtcctctattcttcagatgaggcaacccagcctgtctgtgggtagctcaagttaccacaaaagcccttcagacattaggtagaaacctgctgtcaccaactgagttataactggcctgtccaccctctctggcgccacctctcagaaatctgccagtttttctagatgcaaacccaatgtcacagtctgccttaggcttacattacatgcttagcacatgagagctcagttgttcggtcagtactctttgtgaccccatgaactgtagcccgccaggctcctctgtccagggaattttccagaaaagaatactggaatgggttgccatttcctcctccaggggatcttcctgacccaggaacggaacctgcatctcctgtggttcctgcattagcaggcagattctttaccaactgtgccaccaaggaatcccacacaccttaggcttatcactgacaaccatgcaggccagaccccaggtccctgggggcagatatgcactttctcctttgaagtgccttatgctaggagcacacagtaggtgcccaagttatattgcactgaatcaagagctctctatgtcctatttgccctctggacttttaagcaaatagctcagcagtgcagaaaaaggacaccctgaggcagtgggaccatcccaactacaaggatgaagagggtgtaacagacgagaaaacagatacttttcagtctccttgtgtagcagggccactcacagggcatcctcagcaggcctggcaaatggaagactttcctgcagtgtccacaccaggtgtcgtagttaatgctcctcagctgtgcgacagaacccacaagcatgatctgccttcatccttatctaatcactttacggggcattaagctgcctttggctgaaccggttgccagctgcaacaacactccaggaaaggacaccatcccctctcatgataaagcgcatcacactaacagaacccatctatatgtagctctgctcaagagcttatataatttatcttaggctcatcctccctctcctctctggggcgtggaattacacccactcagctggaggcaattgctttttgatggtgcctgtgctaaagcatttttaggataaagttagtgaatcttttccccgtggcaatgtagctctctcaaggtgaaatacagacagcgagttatagatagaactttaaggcaacagtttcccagtttgtaaaagctaataagcccagtttacatacaaacagtcgttaccttgttggcgggatcaacctccatccgtggaaagacgcagagccttctggtaaccaaaggcatctcagacgtgtttttgcttgaagcggtaattgcggtgtgcctctcctcatcctcaccctcttatccacttgctctgctttgctgccggtacatgttcattctgcaattcctggcagctgct

SEQ ID NO: 34529 - DNA, 4769 bp, Bovine  19866880888329
  misc_feature (1)..(1): n is a, c, g, or t
naagaaaaatctaattagctcagttcctggcatgcttgaaggcagtcaaatattggttgaaatagtgaatgccataatgatgccaatatacataaatgaaccaataaaacaatacttagtcaacaaacattaattcatgtggaagggactatcagtgctttcgatttaaaagagggcaattattgctgattcacaaaggagatgatctgagctcagacttagagaaagtttaggcagagatctgtttcttgagacggtcattttgagacttgaaatcaaggtaatcaatcataggggaattccttggaggttcagtgcttaggattccagcactttcactgatgagtgggtgggttcaatcactcatccgcggaactaaaatcccacaagccctgagaccaacaacaaacaagttatcaatcatgaattaaagcagtttagtttctgagaccctcaactgtaacataaacagcatatacactagcaaaaagcagactttctcacaactgatttgcaaagaacaaatggtcttatttcgagttggtcacatagggaagtggaaatggttagttactacaagtaataatattggctaacatttactgtggatgtagtatatgctaggcagcatgctaaatgaattatctcactgatcctcaaagcagtcctcacagtcaaggaacctgaggcttagtgaaactaaataacttgccaaggatgcacaggagtggtgtagtgggaaggagaataaggtttgagttacacagataagacaggctgtgagatgacttgcaatttttgctctttaggagaaggaaaatgaagaataaaaacaaccataaaatgggttcaagtaaaaacctatggcatgaatgactttccattatagacttgattgggctctggggctctggcctctttcaaatctactttaaatagacttagctgctcaaaattttaaacaaatgcatatattatatttctctaccttttcaattttaaatcagattctgctctgtatagcagggttgagcccccagccataaaaaaaaaaaaaagacatgttacagactcacacttctaaaatgaagctccttgtcctcaagggtcaaaccgagacagaggaatgaggtgggtgaaagtgtcttgagaagaatgaccacgtgccaagggtaacacagaaaggaccttctgggttggaagtttgacttgggtcacatggggtatagctgtgattcatgctcctgaaggccagattccaaggtggcaatgcgtggagcaaatgtgggcgttaggagcatgtagacatgtgtccacaaaccctggattggcctcttattagtagcatgacttaaaacaattcagtgtcattgcatttatatattgaaggtgagtatagtatctcaaacctcacaacaacccaacaagatgataatctttatagcaattttacagatgtgaaaactgagattcagagggagacattaaattacgttaagatctcaagacggctcccaaaccactggcttttccatcatactacgttgcctaacctcacttgccctcctagtttcgcataacctctttgagctgtctctctagtctcctctagttggtttacctaaacagattgaacgaaaaatttgaattccctgaacaggatatagcagagtggaagacagaatccaccaatgctaatcagagatgaaaaatctgcattgcataatttgtagagcagatacacagttgaaataattgagactgaatgtaaaagctcttgagttaaggcagatcactcactcaccatcctatatccaggtcttcttttctaataatttatcaattaatcatgataacccagatagatattttccataaaaatatcatagattagcaggtctgatcaatgctacatacatacttggccccctgataatctgtgtttcaactggttagctgtgaaaacatggatgaattccttgacttttctgggtctcatttttgttatatatatataaaggaatattatcatttagctcagaaagttgttatgagaatgagtataggaaaagcacttaaaagcatgtagtatgtgtgacatccatgttttggttttacattcacccaatatggatcacattgtcttctgtggaattctgaccaaagcagcccagaattagatgcctagctaagtagacagccatttcattttttctgtattctggtatttgtagggtatgagtgcactggtcccagcagccccctagtgtcctggaccagggatcctggccttccatttggcttttgccctcggctctttgcctgttccagtcagccatggacacaactcttatcagagggcacacataagacaaccactatagctacatagctattggttttatagccagtcaaataatatccttgctttgcttccacctcttttcagtaaaagtctccccctcccaccaacccctgccccctgctcctgtcagtagagtattcctaatcatctcagttttggtgctgctgaattcaaatcaatttttgctcaaataaactcttaaaatttttaacatgcctcagtttatcttttaacatgtttcagcttcccatcgctgaaattttgcttcaaggaagaaatggggccaacgcaagtcttttaaggttcccaaacttggccaccaggcagaaacactttgtgagtttgttagaagtatagattcccaggtctggtcccaaacctgcggagttagaatctccaggggatgataccaggaagtttgtattaaataatgagctccccagctgatgtcaatgcacctagtccgactcctgttcacccactagtgcttaggaacaaaagtgaactaaattcggtcctcttctgtgtgtactgtctgactcagtgatttctatttttctggaatctaagttctttgacttgccttcttttcaagtgcaaatgctcttgagtatctcatcagtggcacatttgtatctcagtctcacacagaaagggaaagcagacacagaaaaggaagtttgctgttccctcccagtgtacctcaagcctaattccatgctccaattccctctgggcagagttccatggttgttcctaactacagacagtcttagttccacagctaggcttctggggagcaaacactttagttacatgtgttacacaagtccagcttgcactatcttttaataaggtttctggcactcaaagcacaattttttttttaggtacaacagagttatcattgtcttttctctcggaaaaaaaaaaaaaattacagtgtgagtgagcaatagagccaacaagatcaatggtccttccctccaaagatgcatgtatgtcagtctgccacagtttggggctctggctctgagtatccctccatctgaagtctttgctcattcaaaagcatgactacagtcattccagtaacaggctagcaactctgctttcccagacactcacacagaggtgtcaacacatgatgctttctctcgcttgggaaagcctgcaagtggctcggcttcctcctaactttagatgagggtgttatttcctacaggtggccctggcagctgctgctatccaacctcagccgaagtccttgttgggttttgttctggatgagtgcaatcaatgtgtggtggcttgattttgacttctctgggagtggatgcttccaactcttgaatagcgagagagctgcatggcaagtgctgggtcgttgaaacacttatgaagtgggtgtgttgtagtatgtactatgtctgggtgtaagaaatctccaagaatttctgctatgcagatctttcatatctccaggactttccctgtgtgctggctcattctggcagccttccacaagactttctggattaatttctcccctgagtcttctctgcagcagatcttgaactccttgccattgaggacacacctgaccttgaactcaggaagtggagtcagagcagttcttctaaaggccaaaggagcttgtcctagcctagaggaattttgtattctaatagactttttccagctctaatcacactaacaattaaggaacctctgcaaaagatatgggaagaaatttttaaagcaaaaaaaaaaaaaaacactttgcctttgaattataacatttccaatttaaattactcactagacaagtctctgtttttaaccgtggtttactgtgtcattccacatttctcttccctctgtaaatcactaaaaaggcaaggaagggaggaagccacaaaaatgcattagtatgcagacgttttcttaagttaaaaagccctcagatgtcactgaggttcagattagcgtttcgatttgaaatgctatttttgcagcacttcccagcaagtaagcagaaaagtaagataaactgaaccgttcaaagggcaagaagaaactgaccatcagggtctaactaaccaggatgttctctctgctgctttgtgatatgaatcctacccaagagtctcttggagctcagactactgacccaagacaaaggactttcctctccacccccaagacttttatttactgagcctactttgagcctgtcattgggtctaacaatttatatctcctttaagcttcataacatcttatgagaagtttgttccaattttcagatgaggaaacctgtacttagaattgaagcaccttacctaagggaaagggacagtggcaggatttgaacccagatctgtctcttaaaaaatccatt

SEQ ID NO: 34530 - DNA, 1494 bp, Bovine  19866880924915
  misc_feature (1)..(1): n is a, c, g, or t
ntctgatgttcagcagaagttcgtgttatgttggttactcttgtcatccatgcttctaattttctatttctaatatgttattgtgcctacatatacacagacatgtgcatatgcaactatacctttttggaagagatgggacacaattaaatgttttcagttaattgctgcataacagaagatgcccgagacttgagctaaagagagctgaccacaaggttcatcttgccagatgtcagctgagtgactttgggcagttcacttaccttctctagcttcctcatctacaaaatagctacctagtctctccctcatgaagctttgaggattaaattagatgacacatgtgaaaataagtagcagatagtgctacttctccccatgtacctctcttcctactgcagccattcacctgccctggttacaccctggggccagatttcagcagatcccactccagatctactgtaccagaacccaagggtcatggattaggtatgtggatgtttcacgtagtctaccaatacaagcaccagaacacagtgtgttcaggaaatggggccacctagaagcctcctgatacacgtgcgatagcccccaaccctacaagtccatgaataatggctgctccttggctctctccaggacttctggaaaaacccatatcttctgcttctgtctccctcctcggtgaacaagagtcctatgagctgtggcccaacccaggtgtgaggggcaggcctcgccactaggtaccgttactccaaagaaggctcccagtgccacccaccttgatgccctatgcactgtaaattaggtgcccagctaagtgctcatctgccccctatgcaagtttctgctgccatagtcttcaaatctcacattatttccctctaaatctcccttctgagaatgagctccttcagattggagtatgtatcttaactcagaatccctaatacatctatcacatatgttcagtgcatgataaaaagtcattccttttccttcatcttttcatctcttattaccttgtcttggaatataggttatattcttcctgctcttttgagagtagggatagaagatgctccaaaaaaggagggtaagatcattttgctgagaatttggggacatggtaattaggaaggaagccagacgaggggtggacactaatatttactaagtgcactctgtatgtcaggaaatgttagggtcacccttatctgcgtgtctcatttaattcttccaacccctcattcctaaatgcttgtgttctcatttaaagcactcacccattaacccacacaatgacttcaagtcaaaagcttgactgaacttgaacaaattacatgagcaaattaattatatgttacaggaatactgaaacaggttttcataatagaatgacacccattcaacttatccccaatcccaaaagagcacatccaacatcagaagtcaggagcccattatttgtgtcggatcatctac

SEQ ID NO: 34531 - DNA, 710 bp, Bovine  19866880942303
  misc_feature (1)..(1): n is a, c, g, or t
natggaaatggtacataatgcattgtgcatcttggtttatgaaggataagaagataactccattcagcaaacacatgtacagagtatatactgtgtgataagcagtgtctcagcattttaaatcttgtatctgtgtgatgtcccaaattgagggatttggcaaattaatgtagtttatatattttaaagtaaagtgttaagacatgtatatatatttttattatttttcacttttgccagttttgttcacattagataagagttagacaaggaagtttctactgtattaccatgggacaatgttatatgttttaggtgggaaaaagtaaggtatatgtattatgttaaggtatatgtattatgtatatgtattatgttagtataatacatataccttactttatctgagtaaaaggggaataaatatatatacacacacatacacatatacacatctaaaaattgctaacagtggttgtctctagggtggggatctccactcttgttgaaatctttgtgcagtgtattattaatatgcttaattaagtaaataatttaacctttctttggtgattcaggttattgcaatgtgtccagaacacttttcggcagtttcttcttcagcaaatagattaaatgttagtttgtcttctcaccatttgtctccttcaaatttaagttaaattctaaataaaaactctggttacttg

SEQ ID NO: 34532 - DNA, 2524 bp, Bovine  19866881171401
  misc_feature (1)..(1): n is a, c, g, or t
natctctaataatgacagctttgatgaagctattattaaaaatattattgtgtggcacgttaagaattcttggccaacagaacaatcctcagaactcactgacctactcaactccaaaagtgatgatgaaaatagcaataagcccagttgttttctgactatgacggaagaaaacacctctgattcagatgagtcaatggcttctggagaaagcaaccatgaggaaaattcaaattttctatctaaaatcaagagtctatgtgataaacaaaaaagttgcctatggcagacacctcagaaacaggctgaaaaagaaagctctggcaacaagttcaaatatggccatagtcaggtttattactggttctctaatttctctaaggttgcttccaaagtgaaaattcctaaaaattacacgattgacaaaccacttataacagatccacaagccagcttttctcctaaattgagagataagtcagctgttgggcaagatatttcagaaagcacatctagatcaaattatgttgaaaaacaagagcagaagtgggaaactactcaaccttcacagccagtagaggtgagtgaaagcagccttcaggaaacaccccccaggaccgctgctcatccatatgcgtgtgggtcctcagaagctgcatagaactaagttgtagttctgaggttctgaattctagttccagtccggtaccctgacctctcagagctcagtgggtgtcctcatgagaagaatctggaactgaactaacaataacacagaataaaatccaaattcttcaaccaggaatttgcatctccccatgtttcctgtcatcctagccttctgaactcagctcccctcccccaggagtcatcctgttagtgggctggccccaccttctctgagctcctgccttaccaggaacatcccacctctgcttatcaaacccccgctcattttcatggtctccttcaactccacactggctgtaggacttttcagaatcccacagccagtcttttgcatccgtatttcttaaatattctgtcagagcttatctcagcctccttgcatcattacgatttccaaacatctgttccttcgactagatttcaaggctctggaggcagctgcctcgtcttcatctttccatcgcccaattcccccagaggcctggccaggtgtttgcatatattatgcccttggttatgaatgctaacttgaattgtgatctttgataacacatttcaagatgttatactggtaactatttaacacaacattttgtttacatttaatttatactttttcccctttccccatctttccatccttccacccaccttcccaaatgctgaggctgaggatctcattgactatttgaggttccgtagttaaataagtttacattaatgatcaaagtaaacactttagttctccggcacttttccaggactgtatgatttttcttttaagcagtctatgaagggcaccctgcctgaacacactctgcctgtctctatttccaccccttcatccaccttttcttttaactgaaacttctggggaatttgaatagaacctcccttatgccttgcaactacacacacacatacacacacctggagtcagcagcccactcagccttgaccgggatgcttctctcagtcttagagaaatctgtacccccatgacactgggaagtctccacattcctcattctgcttggagaagaacactcttgggtgggcacagttctcagggccctgtgggcagtaggggcagaaccaatatcaagttcatctgtctctggtaacgggagtctgaagtggggcatcttcttttctcttgtcctgtccattcaggttggagaactgggctctgtggtttccatagcgatcatatacccgagatattcctaataaccacagtctagtttgaccacaacattggctgtctgtctctagtgtgtttgtgagctgtgtgtgttgggaacaatgggaagacaatcaaggtgaatcactctggaatttgaagtcttatccagttagcctctggtgattagaaaagggaatgtcctgtgtgaagtcactgtcttgctcccagactctagccaccttgtatctggtgttagtgagagcgctagcgatagagtcagtgacgagaccaacagaggtccctgccctcgtggagcttgtggtcgacctgtaggagaagggtttgagtattccatataatagtatcaaacacgataacaggaatagctaacatatattgaatgtttaccatgtgccagatactatggtaacatttaattctcatcatgacactatgaagtaggttctgttactatccccgttttattgctgaagaatttgaggtttatagcaatgacgtaattgctctgggtcacccggcagataagtgtcagagtggaattcaaccttggcatcagggcctcagctcttgacataaccctgggtggcctccatgatgaccagaacacattgggtcatcctgcataat

SEQ ID NO: 34533 - DNA, 828 bp, Bovine  19866881191717
  misc_feature (1)..(1): n is a, c, g, or t
nttactcagccccctcagagccctgaacaaaccccaatattccccaacctggaattctcccacattgctgcctcaaaatcctggcgaatatttgatgagggacggacatttagaagtttgagaaactgctactttatcaaggttgtgtctcttactcaagcttgctgttttgactggagtgaaaagtatatgatttataagattcagtcataaaactgagacagttgatctggaagggacattaccctgaaggttggcctccatgaacagcccaagctgagtgggtcacaaagtgtgaccagccagaaagaaagcaaagatcagaggccagggaaaatgtggtggcatgatttggggtatgtgtacttgacagggcatactgtgaagacaaggttggtaactacagtgaacagtggtaactgtaattgtagtttttgtctgtccaatgagctttgctgtctttattctgtttcctctggtgaactcctcctctcctccacatagtctcagaaaagctgttaatcagagtgtatctcttccctaccctatccccactattcaaaacccacagagatgggcagatgtcttaggctgggcaaatttgttggttcaggaagaaccaactggttctaaatcaggccagtatattccttgttgtatctctaggggaactggcagaggagcctgggagagcataaataacatcagagacaaggagaggaaagggcagagatgggggagagagacagaaaatgaataagagttggcattgttaagcaggatccagccatgttagatctacctcttgatttcccagtcaagccaata

SEQ ID NO: 34534 - DNA, 2973 bp, Bovine  19866881246667
  misc_feature (1)..(1): n is a, c, g, or t
ntgatgtactctgcatagaagttaaataagcagggtgacaatatacagccttgatgtattcgtttcccagtttggaaccagtccgttgttccaggtccaacagttctaactgttgcttcttgacctgcatacagatttctcaggaggcaggtaaggcaggtttggtatttccatctctttaagaattttctagtttgttgtgatccacatagtcaaaggttttagcgtagtcagtgaagcagatatttttctggaattctcttgctttttctatgatccagcgaaagttggcaatttgatctctggttcctctgccttttctatatctagctgtacatctggaaggtctcagtacacatactgttgaaacatagcttgaaggattttgagcattaccttgttagcatttgaaatgagtgcaatagtatggttgtctgagcattctttggcattgcctttctttgggattggaaggaaaactgaccttttccagtcctgtggccatggccaagttttccaaatttgctggcatattgagtgcagcattttcacagcatcatcttttaggatttgaaatagctcagctggaattccatcacctccagtagctttgttcatagtgatgctttgtagagaccatggtggtgttcattttaccgatgctaagccaccacatcagaaaagatgtgctatggtagtcatactgggacacttcccccagccattctgtagcttcagtttccctccttcacagaaactctaactccttgaaagggattttagttgataaaaattcttaagaaagttctagctcagcccctaggatactgtaataagcccctagggaacgttgctcattcttagtgtggagggcaccgtgcccaagatatcctggacatagccagtgagtcaggaatgagtgtgattcccggaaatggggtttgagcctcaggccttgcttgcaaattcaggctcatccaactgtgcctgggcctgctgccggtggactccaaaccctacttggagtctgtgaggctaggggctgagaagccaggcactttccctgcttcttggaaaaacatgctctcctcctgagtcacatattttctcacaccttattttctgcctccaccctcctcctctggggcatgtgaacatctgctctccaaagtggaaaacttggattgcgctcaagtgagctcagtctaatacacgactttctttttccgcctctttgaaacttctttgtgcactaaaatcttcttgccaaacagctaggggaagctctacttgagaagacagtttttcagcaagacaaagtttttcagcaatccaaaatctcttaaatccaaaattctgcatcagacataaagggataaacattttacatgtagcataattgttatttatctgcatgtatataaatatccttcaaacagtatgtgcatcagtaggctaaatagataatacattccatctgagagaactctaatcttctaaaagagtaaagagtctatacagtcttctgtttaattaattcctcaaggatgatgtagtttaccaagatttcaaatgataaaccatgcctattgccagcaatagatttactgttagatctgattttacacttggctgtgttttacctcctaacttgtttgttataaaagagaaaatgtagtctggaacattggtccctgtattggtacttaagttgttctgtgaggtctagactataaatttggtagagaaatatctagtaccttgaatgcttaatcagaatgtttttaaaatgtcagactatttgttattatacttgtttttattactgttgtttagttgctaagtcatgtccgactctttggagaaggcaatggcaccccactccagtattcttgcctgggaaattccatggataggagcctggtaggctgcagtccatgtgatcgagaagagttggacatgactgagcgacttcactttcacttttcacttttcactttaatgcattggagaaggaaatggcaacccagtccagtgttcttgcctggagaatcccagggacagaggagcctggtgggctgccatctatggggttgcacagagtcggacacgactgaagccgacttagcagcagtagcagcagtcagctaagattaaattaaacacataccaaaaaagcagataattaaaagaacaaagactaagagagagactagatctttgattaatgaaaaattatatagtggtctactataatagggagaaggcaatggcgacccactccagtattcttgcctggaaaatcccatggatggaggagcctggtgggctgctgtctatagggtcgcacagagtcagacatgactgagtgacttcactttcacttttcactttcatgcattggagaaggaaatggcaacccactccagtgttcttgcctagagaatcccagggatggaggagcctggtgggctgccatctatggggtctcacagagtcggacacaactgaagcgacttagcagcagcagcagctactataatagaaagtgaatattgaatttttcaggatgtgaactggttccaatgctgtgactacacttactgccaataaaagtgggcagtcatgtctacctcataatgaacatttcaaaaaatgctagaaggctttttttcttaacttgagtactttaagaaaataggaacaacttggagattcaaggttgagatgaaagggcttttaaacatttagtatttagttgggtagatattcagggaaaagcagatgctctgaaataattttcttttaagtcataatctggtgggtgtgagcaggtgtatggattgacccttgttctccttttccaccctggaagccggcatcccatgttcttattacctggagtcccaacttcatgaaaaacaccaaatctctcttctcaatcccctcaattccttgaaatccaatttttca

SEQ ID NO: 34535 - DNA, 893 bp, Bovine  19866881251943
  misc_feature (1)..(1): n is a, c, g, or t
ngaaaatccaaaagaaagtgacctgtgaaggactaaaacaactctgggcggggccctaatccctgctttattggctgaaacactccatctttgaggtctggttctctcaaagttgagaaacaatgccccaaataaatagtgcctagaccccaaaaatcatccttacaggaacttccacccaggtctctgctgaaaatttctacattcccaatagcaaatggttctccacaccatgaccaaggtgaaggctgacaattaagaacccattcagcttctagcttccctatggtagccctggaatagaggagcaacagaggaggcccgcagaagccgacgataagaactcaccagaccaacagatttgctcatacattctctaaggataatgtaaacccagctgtttagtctccggctgggtggccaagcctctctctcctgcccacaattgttccaactgtcaattatggcccgtgagtcacctccgcagagataagcattgtgctacagagacaatcccctagggtcatcctgggaatgcttatcgtttttttctcataccacaaatgttccacttggcttcttccatctggcatttcaacacctgaaaaacttcagacttggagtgcaatacacagtgagcttctgagggctttgaatctctttggaggcttctgaatcttgtgatgttgcagggcactcatcacaaagaccagtgatcgctgtacattagtcagtgccctactgtgggtaaagccctgcattatggtggctttacaaacagtctggaacccggcattggtaatgtagcagggagagatgtagaaagctgatagaattacatagcaaatgagtatgaaatgaacaataaatatcttacatggctataaaaacgt

SEQ ID NO: 34536 - DNA, 795 bp, Bovine  19866881297518
  misc_feature (1)..(1): n is a, c, g, or t
naaatgtgtattgtgtattgaatgaatggtgaagcatcattctatattgattgaattgataagtaaattcactatttttcagttgcctgtgaataattaaaactttctgaagattttcagattacacgattaggaatttgttttcttcatatttcatagtttccaaatatttacattatggacttgcgtgaaatagtgtgtgtgtgttttaacatgtcatccatgctatcatagttaattaactggttcttttttttcccccctcagggaggtggtgcaagcaaactgtgttcactggagaaagaagttctcatttatgtgcaaaatgagcgccagtgccaccacgggtgtcctggacccttgtatctacagagtctctgtgaggaaggtataagaacagcctgttccttctctcctttcagaaaccgtggttggttccatcgtcactgactcactttagctctgctttactgttagaactgttataaatttcacttcatacctgcagcataatttacatttctatgataagtatgatgaggaatctaaagaaataaaatattatcaagatccttcatctcattatcattatgcatataattaataatcttatttctgttagtttaggggccataataggtctttgtcctgccattcattgtttctctgatttattaggcactgtttttttagggactttacatattttgtgtctaataacagccctgaaaatgtgttatcttttccgttttcaggaaaaccaaggctcaaagaggttgttactgcacaaactca

SEQ ID NO: 34537 - DNA, 839 bp, Bovine  19866881395443
  misc_feature (1)..(1): n is a, c, g, or t
naaaccctaacatgaatacatttatgcaattggctaaatggtcttttaaaaataaactttaaatgtagcaagacagataatattgctaagtgttgaggctgagtaatgggtacaggaaagtttattttctctactttgtgtatgttagaaacttctcaaatggaaagttaaaaagataaaaaattttacacaaactttaaaattcacatttgtcataaccttgaaagttatattaacactcttacctttccttctgttgctttctttgttgatgaaatttccttcataagcttgggaatttccctgtcaaattattagaaagttctttaaatttctaaagtttaattcacaaaagtatcttaagattaaaaaatgtactattagtactctgtaattagtatttaaatatggaacaaaaattaaacaggttcacatactctaatacaactgcaatatggcgatgccgaattttgacccagaggtcatcatcttcttcaaggattgcctccttttccttcccatctgtcttatatctacaagagaagtatgaaacttttggattatttcgtgccagataaagtaaaagaaaagtttttataaataacaattttaagacacagctcaagaaactgaagatttttaggaggataatgaatacctatccaaaactaaggcatattgctatccatacaacaaaaatcaagcgccatgcccaccatgacctttttactttcaatgttattttttgctgtcattattacagacttttatctcagtatcttagaaacaaaaattcagtgttccacagtcaactttaacaagaggaatttattaacaat

SEQ ID NO: 34538 - DNA, 1103 bp, Bovine  19866881432013
  misc_feature (1)..(1): n is a, c, g, or t
nagaagagcctgagggatgagaaaagaggtcaggttttgccgtttcctcttgaagcacataaatagaacaaaaggaagcagtgagacgaagacaatggtaaagaacatgaaatcaacccaggacatgttaaatgttgatggaaagcccaagcaccgaggatttgtggtacccctgaaaatagagtaattaattcagcatgtttttattgatgtctgtgctagtctaccagggactatgctaggcattagacatgcgtgaaaacaaataatgtgtagcttttgttcttagagctcacagtctattgaaaaggctgacatgaaaaaacaatttcaatttaaagtgataagtgctgtaacgagtttgtacagtgtacagtgggaacaacagatggggtgttgacaaggcatcttaggggagatgacatttttgttcagtctttgaaagatgaagagaattttgccacacagagaagataagtaggggtgtttcagagagaaggggggagagctagtataaagacatataagtatgaagtggtgtgtttgggaaattgtgagttgttctatgtgactggagtgtttgctggagataatagctagacagattaaaaccagctagcatgtgtcattctgaggagctgtgtttaaaaagagagccactggaggaattccatcagaagggagtaatggaacctaccaaatctttgcagaaggtggatgggtaggaggggagtgaattggtagcaggtacagactgaaggcttagtggctcagtggtaaagaatccgcctgccaaggcagaagatgtgggtttgacccctgggttgggaagatcccctggagaaggaaatggcaacccactccagtattcttgcctggagaattccatggacagaagagcctggtgggctacatacagtccatagggtcgcaaagagtcggacacgactgagcaactaacactgtctcactcacaaactgaaggcagagagactacactctcatctttcatgtctgcatccccagggtcaagaacattatttgctatatggttggtgctcgacagatgttaaatggagaatacatgaaggaaggcaaggcag

SEQ ID NO: 34539 - DNA, 1841 bp, Bovine  19866881657652
  misc_feature (1)..(1): n is a, c, g, or t
ntatacaatggaatagtcatcttaaaaatgacattcagacccaggctacacatagatgacactgatcactgcgccttgctcttcaaccaatgttctaatgttctccgtcagtcatttcaagcattaggcacctactgtgtgccaggcaataggaaatacaaaagaaataaaaacactgctctagagaacatgttactaaacactggaaatctgggcacaatagtaggcaaactgaccctagaataagatacttaactactactaaaggtcatttagagacatattttggtttgtgaataccatttcccattaaaaggaaccagaaatggcagatgaggaaggaaaggtagacaaccagtctggtacatcttgttataacaggaagtaagtgctcaaaaaaacaaaaaccagacatatcacaaggacacagatgccagcttgaaaggatccctccactgctgttgaccaatcatgggaagatatgagtaacaaaataaagtcagtcacaatccattaaaaaaaaaaacacaggaattcatgagttcacactgatgatggttaactgaggtgggagggctcctgactagtaaatacaaagaactgctgaaaccacaaaaaaacatttaccaccatataatataggcaagttaaggggggaaatatggatgagtaacaagatatgtgcatggtgtgcagtctccatgctgcttatttggggctggaaggcagtaattatacagctaagcaagcacaaacacaccttgactggagagagcaaaattaacctccccaggaacaaacagacattagtgcctccagattgaacgacctgaggacccaaatatagagctctactgtattccaggaatctaatcattaagagccaaaactgaaaaaatactcctattaaaaataaagagaaccatggaactgcctggtggtccagtggttaggactcggtgcttgcactcctattgcctgggttcagtccctggtcaggaaactaaaatcctgcaagccatgaggcaccaccaataacaaaaagggaactggctgtttaatactgaatttattaggggcaaagagtaaaacctacatttacacggttcagaaaaaaaaatgtgtggagggaaagggagactgagggaaacaagagagcacatgtacataagataaaggaaatatggaaaatgttcacctgtgaatcaggataaaggagatgggtgtttgtggtactatatacattttctatcttaacctataaacttgaaatcatctccaaacaaaaagctggaaaaagccagtgaaaacccagtcccaactgacaagcaattttctccacaaataactcagattatgacaaatatttagcatactaactttactgagactgattaattcatattttccaaatgaatgtgtatagtaagaaccagtttcatacttacaattcaatacatgctgccaagtcaaatccaagcaaacgacagtctttctctaaaacagagccatgatacaaggtaatcgctaaatccagctctcggggatccagatgatcccctacacatggggacagccttgacctgcaaagcattattgcagaaggaacacttgcacccatataatctatttagagtatcttaccagctacagaaactctgaccctctgataaattatctcctgcctacactggttaagtctgacatacgcccatttccatgaattgccgtattaagcacaaggtcccagggtaacttcctctctcatgaggcattaaatggccgacgagaacaagatttttatatttgatattgctctcattattaatactttggtctct

SEQ ID NO: 34540 - DNA, 1288 bp, Bovine  19866881848223
  misc_feature (1)..(1): n is a, c, g, or t
nctttaaaaataatagtttttcccttattttgccaacatggaaatactagaccaaagtaactctaacacactatatttcttggacctggtttgaaagttaaggactgggaattactggttccataggagcaacattctttttcagtgactaattgagtccaagaaaactgagatctttccacacagaaactgtcatgtaagaccagaaaaactcttgaggtttatctgctgtgctatttaactggatccagatcagatattcttacttctacttgatgtatgttgtattctattcttgcctcaaaataactgatttctgatgcagcaaagaagaaaacaaaacaacgggtccatgtcagtaaggtcaagtggctatcccttgttctttatccattacctccttggaataattttcagtttcatgtaagcttgaatcttcagagaaaaggcagttttgtttctgactgcatctcaattttcctcctgttgttctaatatttgactcctaaacccagcagatattattgttagttaacagagctcttacgttagggcatcttatggaagcttaacatactgaatcttatacttctcttagtctttcatatagcactaatgggaattctgcagctcatctaatattaacaagtaatgacacatactgcataataatagcattatactcattcatgtatctcagacttaaataacacacacttgtttttgaatttatgactgattcgtttagaattaagcattttacatatttaaactgtagtataacactttcccaaagcacaagcacccacattttatataaattattgcatcaagaagagtgaataaatttagtacaatactgtagggagtataatatggaagatttccttcccaggaattatacctattcttggcagaatttatagtttaaattattgtcacttcttgtctcgcaaacacaaaatttaaaagctagagccaaatctgtcgaacattgtctgtcacaggtttgacacttaaacactaaaactatactcagatgtatagtgttttttcccactggatggttttacagaaaaagcaggcttttcattattatgtgcagtgaccacagaggctgtgttcctataaccacacgtggcacactgctctggtactgccattccgatgttccctgttggtaggtgagaaagagtggtgggcaccttcagagaagaaatcagtgttggctttcctcttgatagacgaacatgcttcattttttaaataggttcatttgctctaagtg

SEQ ID NO: 34541 - DNA, 2099 bp, Bovine  19866880395427
  misc_feature (1)..(1): n is a, c, g, or t
nggcctgacatagaagcagtgctcagaaacacttccaaaataaattagtaaatacttgaacaaagtaatcgtcagttcctgggcccttttgttttctatgcactcacttccctgtctactggacgcaggggtctctatgtatgtgtgttgaccctggacccactggggtatggctccaaatcctgggtctaggtcccagtaggtctaagacacactgtacagggtcaaagtcccttgaccttatgactgaatttgagtttacagaatgcccaaatagggaaggacattagagacttctgggttcaactgctcccgtgaaggaataagcaatgtcttactcctctttaatattcaatgccaagcacaggacctggtataaagtgggtgcttggtaaatatttgattttgcatgaatccctctaatacttttataaataagaaaatgaaagcccagagagggaaaacaaactctctcagtcacatagtaattttctggtagtctagtttccagcttggctcctgacttccaagaagccagaatccagtgaacttttcctaaggtcttgtttctcatcacagatcaaaggttatatgaagtatgatgttaattacttgttccgaatttatctcagatcattggtggatccaacgtggatgagttcatgttgctttaaatccatgaaggcaaaaggcaactgatgcggcagcaatagagctgacttttgaaactgacagttttgagcctaagagtctgcagaggcacctgccaaatgcatgaccttgggcagatctcctaattgccctgagcatcagtctcctcccccacctcttgctccaaacagggaccataacgcctatctttcagggttgcagtaaagatccccactaacgtgtgccgtttgcctggaacatcttactcttagatggccagtcgcttgatgacgttgtattttcagtctgtgcttcaaagctgtcccgaggctccagccatcatcacctttggcgattgtttgcccttacaaaggcacccagtctccgcgccccgccatcctgctattttagtttccacagtgccactgctcactgaggaacagccactgaccataaagtttgacattttcaagattaaagtgctttgaattagtcatgcacatgtgaagtcattgttcctgtttgtcctgctccagaatctaaaaatgactttcagcagagcccagtaactttcctccacagtcaccttctggtgagggatggaggagtttaagccaagggaaaactctcagttgctcagaagaaaaccagagaagaggaatggcatgaatcagcattattaggagagaggggtctgctctgccaaggcttggtggtcctctgcctctacaaggagaagtgggggcccagagctctggggagaatgggatgaggcaaagaaatctcacctagtcttgttgtaagcacaggagcagagcaggtgctgggcagtcacagggttctgggttcagaacctgcctttatgagctgcgtgacctcaggtacgcccatatcttgagtcaatattgttctcatgtgcaagacagaaatagtgcctctttcataaggctgctgtgggaattgaatatgctaacaaggcccttagcatagtgcctggcaagtggctggcaatcagtaaatattttttgtctctcaaaagcttcccaactttccatgactcagattatcttcagagtcttttaaatgctgtgcatttccagaatcccagagaaggccacttgcaaatattactaaaatgcttagccaaacggaagtgaacttgggatttctcagtctgcccttaatgcacgtaagtagggcggaccacagcccgcagttttcttgcggagaactcaaaagaggactcctctttgctttatacctagttgtctggctgcacatctctggggggatgtgggatggttctccatccaggcaagaagtctggtcctcaaccagctggcctcctgaccacctactcagccgatccccacgaagtgatcacatagaatcgtaatgtgtaataatagctaccattccttactgggagtcagtcagggtgttaagta

SEQ ID NO: 34542 - DNA, 2769 bp, Bovine  19866880436044
  misc_feature (1)..(1): n is a, c, g, or t
nattccttataccacagcacagactagtggatcctctcacagtatcatcaaagagatcctcctggagctgcacatttgagtctctgattttcaagatgtgttacatacgtagccagtaataaggcctgccaatatatttccatcagtgcaggcaacacttcctattacaaatgcaggagattaagatttagatatagttgatcatccattattgattgcattctttaaaacagattatgtaagtcatttatcctgcctaatagtttatactttgtgtaaacacataaaattataactttgtaaggacaaactagaagctagaaggttttaagcaaactattagcattttaataactcattcctttataatgaatccttttgcaatgcgggagaccctggttagattcctgggtcgggaagatctactggagaagggataggctacccactccagtattcttgggcttcccttgtggttcagctggtaaagaatctgcctgcaatgcaggagaccctgggtttgatccctgggttgggaagatcccctggagaagggaacagctacccactccagtattctggcctggagaattccatggtctgtatagtccatggtgtcgcaaagagtcggacccgactgagtgattttcacgtacttcctttataaaggaattatcaagaatatgtcatgtagatacattataatcagatggatgtagaaattttcgttatcacttagataaagcaagatatcttaattatactagtgccagctttgtgtttgggaaatgcatgagaaagagaaatgatgggctgctttagttcttctttggcatgtttaattccaagaatggaaaataattttaaaggtactatatgtggaattattgctctagtataaaaatttatatctttgtttagagataaagctctaaagaattatatatggacattgttaaaatggttaggtatatagatttgctgtccccaaagcatgtccaactttgttagactatgaattgaacatattgtgaggacctaatactatagttgaggttgagtatttgattttatatctgtctctcatcctcaaagaaagaaaatatgttattctaatccttatatgttatcacaaagggataagaaaaaataactatgtgtctggcatttggtgatttatttttctctccctctggaatgcaatcatctttgttttttatgcctacaggttccattctgattggtgttcaccttccaactgtgatgagatccatgaccgggtaaagaatgtcttgaaatcacatcaggctcatcaaagacatttatatgttagtttctaaatttttctcttgaaggctttttttaaaattaggcatgaaaaccacccaagatgtttaatgctcacaatatttaatccctgggaaggaaaagaaaagatacaacttccatttaatggaagtcagtggtttagctaaagggaacatatctaacttcctgcctgacctgagtcattatgcaaaatgtttgacacagatcatgttaactataaaaaaaatattagtgatacctatctcataaagagtcagtaagtagtgatttcacgataatttttcacagccttcaaaatacgggaactcttattttatgacccggaataaattccatttcctgcaaatagatttgattgaatggtagaatgagaggagggatgagacatgtgttttggagaagtttcccagctgatttttatgctatttaaatacttaaaagaggacaagaagaggtcaggtttatcagtttagtactaaataacatcagtatgaaaatctgacataaggcaaatgaacatataaataaatgacaggtgggaaataattacagtatattattctttttatgtttggtatcttgtttcagtcatttatttaaaaacaattgtttatcaggagtcatgttggacaccaagcttggtcctgggaatgtaactggattatgtgacattggcatcattttatatagttgaaagcttctattatgcataattttaaattaaacttgttttcaaagtataattacagatagtcccagtgactgcctctcccaaggttaacattatcctaacttctaataacaagattagaagtgttagaagattagaagtaaaagtattgcatgtttttatgtttatagcagtgacatcctaccatgtcttttcccttttttttccttacttatttcattttgtttttccagttcggatatttttgcaatgcagacatcttgttacctagttcttcactcttgctgctgcatggtatttcattgtgtgaaaatactaccattggttaatgcattcatctatcgatgggcctttgggttgtttctggtttgagctattttagaactgttatgaacagtatgtatcctcagataacattgtatacattttatttgggtatgttgccaccactgtattgctcagtcataaactgtataaacattaagcttttccaagtgattttaattatttacactcccactaccagtgtgaatgagttcagtttgtttcgtatgctcacttctgcttgataggttgtgtgcatgtatatgtgtgtgtgcatacatgcattttaattttggcattttgactgtgagaagtagttttatcacataatggtttcaatttgctgtttcctggtgactagtttattgactgtttgggtattctcttttgtgagtatttgttcaagttacttgcccatttttata

SEQ ID NO: 34543 - DNA, 2666 bp, Bovine  19866880465649
  misc_feature (1)..(1): n is a, c, g, or t
nctgcacaaataagagagactgatctagttggttttgatagattatatgtaccttttaacctttgctatatatatggtttacccaagggtcataatatgtataaaatatattctcctggccaaactaatttttattttttatgtttaggataaatttgtttaccatacggctccagttgaaaaaccacacggcagactacaaaacagaacatcaaggtcacaaaagaaaaaatccaagtcacctgagaggaataagtattgcataaatgcaaaaaactacgaacagcctacaatttcttcaaaatcacactctccatctccttacacaaaaagacgcatgtgtgagctatcggaagacaccaggcggcggctggcccatttaaatctcggcccttatgaattcaaaaaagaaacagataaacctccatttgtgattagacatgtatgtgttctttgaaacatttccgtttgaaattgatctaatttgtaattgcactaaaatattactcaaacttctttcaacttctagcttatatgaataatttttcttcatgaactgtatgttagcctagcaatctaaaatggaaaattaacttaataaaaacattcttttgcagcctttaaacctgacagagatcaagctccattatgaatcccataagtcctctaagtagccatttcctttcttcttataagtggacagcgtaataactttacaaattgaactgatatataattgacattagtactaaaatggcagagtaggattttaaaataggaactagttttctttgtgaaaaggaagacacccaccccccagccctttaaaaaattgtaatggaatagtttcccttgtaattatgtcccttgggtaaaccttatataatggagtttgaagcaaatcatcatttgatgggaacagaaaggcctttcaaagagaagacttaactttaagggtaatagagtttctaatctttctgtatggaagcctgttatgatgtgttttgtgtttaaagcttgtatccatatgatagtcaaaaagattttggctaatttttaagggtctatagtccatcctaaaggagaccagtcctaggtgttcattgaaaggactaatgctgaggctgaaactccaatagtttggccacctcatatgaagagttgattcattggaaaagaccctgatgctgggagggattgggggcaggaggagaaggggacgacagaggatgagatggctggatggcatcaccgacttgatgcacaaaagtttgggagaactccgggagttggtgatggacagggaggcctggcatgctgtgattcatggggtcgcaaagagttggacacaactgagtgactgaactgaactgaagtgaactgatgcccttcatgggcttccctggtggccagtcggtaaggaatctgcctgcaatgcaggagacccaggtttgacccctggatcaggaagatcccttggagaagggaatggcaacccactctagtattcttgcctggagaattccatggacaaaggagcctggtgggttacagtccatgaggttgcaaacagttggacacaactgagtgactaacacacgtacacatgacctttatgtgtcctagctttggccagttaaacaaatcccactaaccataaaggccttcctaagaaagccagggatcttcctgcttaagctttgttatgatctttttacctagcccaaggcttcaagtcaggcacaacacaactctagctagtaagttgaagctgacacaatgccttttagggctgaggcagtgtcagggtacacatgtcaaaattacaattccagaggttacatgtagtacctctggagacagagtttacattgttagggcaccccaagcagaacatatatcagctaggtagtactggttgacagcctccaagatggcctccaaccatggtacctcctactctgggattctcagttcagtccaataattcagttcagtttttggtttcaaaggggcttcccaaggcagtcatttccaaacagatttgcttggacactatatcagtttatccacctcatgtgtgtggacagcatctggaagtgttctgcatcgaaagtgcaggagctggagccattctctgctgcttcatagtcggcactgtcaggtgtgattgagggctcagcagtccagctgaattatatgtgttcacagcagcttggtaggcagcatggggagttttccttcaagaagagagggaagcttccaggaacagttctgaaaaacaaaaaccattaatgtactccccactctctgtgcctctccagaatgtgttttcttcattgtcaaaaaatcaagtgtatcccatttagcaactataactttttattttttagttatcccctactccaacccagagctcttgtttggaaaggctgtgtgcaagagacaaaagcagtttcacagaaaagatttttgatgtaatttaaccacaaagtcgtatcatgttaaggagttggtcatgaagatattctgaattttcaaaggttttcaaaatgatttatagagatcaatctatttctggggatagttgtatttaacagtcaaattgccttaataagatgtgtctactaggaaaaaggtgagggaaataaagttcacactattag

SEQ ID NO: 34544 - DNA, 3172 bp, Bovine  19866880487860
  misc_feature (1)..(1): n is a, c, g, or t
nccagtttgaatctgaaagcaaattatagtggtgtcattttgatattgatgggtccagactaaagatctttggcaaacatttccttccggcagtcggtgtggttcatattgttctctctcagtccgtgtggcaaacactggctccagccttctcatgtgccaagaacagtgagcgtcactggtggtgaacagaacgggggaggtgatgatggcccaggaggacagcagtgatgctggggactgtctatgagccagggacacccagggtcctctggccagagagattggggtgaggggcttagtgaaggagggattcatgacctgggctttggagatgctgggcagccacaaagctaccttactgagtgccatcaccatgtgcctggctttagtcctcacgccggcctctgcagtgagaggcagaagggctcagtgtttaatggccctgaaactcagggattaaatcctgatgggtcatctctggagtctacagcaagtgattcaaactgcttcttagtctcttgtttggtgaaatgggaatgcaggaaccaccccatagggtggttgtgaacaccagaagaaattgcgcacaccggtgaatgcagagatgaggtgggagggaggagagagcagatgggcagggtcaggtcccgcagctgtgatcacccagtgaggtcacctcttctgtgggccagttgcattgtgcagacccacagaggcacccagaaaaggctcgaaagctgttagttatggttagtgccacacagctggaggtgtcagagctgggatctgaacccaggcccatctagctcaaagccacttgatcttaattcaacctattgccacgatgactaaaagtaatggaaagggccatgtctcagcacaggttttctgactcactctttgcaggaatattcctttggaatagaaaaccctcctctgagaggcctgaccccacccccaggcagtgcctgagtctcctctgggttcccatgccctgtgcatccctcggtccacacagcagtcactcgaaatcctccttctccacttacagctccgtctgcccctgctgagttcctgagagcagggaaccgagcacagaatttcaacacaggttggaacatcaccccatgttggaatgtttctcacatagaaagtttccctttaacagtagcaggtaggaaatgtaagtgtgttaataaaccatggggctggcagttgtaaaatattaatgatttctagaattgaaaatgcaaatagctgtctggaactcctccacttggcattaaagagaagggctttgaaaggacatgtgggaaactcggggattggagaatatggccttgctggaagatgaggagacaaatagccatttactgccctgtcactgccacattagcagcattacaaagcaagcaccagttcctccgaaggcaagtcagtcacatgtgctgtctgacggcagggctttaaagtgagtgactggcttgtccatccactccaacgttcacacgcggagcacttactatgagccagggaggagagggcgcaacccctgcaacataagaccttcacttcaccctcaaaccagagagaaatgtgggctgggggagacaggagatcccagtccagccctgatcagttcagtccacagctgggctgtgacccaagtgaggggagggggctggtctgggggaagcactcacccccacagcactggctcgtctgtgaactctgcagacaaccaagcatactctccccagcccttgggtctcgaatacaaaacatgcttcccatttttcaaatcgtgtgtggttgcgtgcatgcgtgctaagtcacttcagttgtgtccagctctttgagaccctatggactgtagcctgccaggctcctctgtccatgatattctctgggcaagaatactggagtgggttgtcatgccctcctccagaggatctccccaacccaggaactgaagccatgtctcttacgtctcctgcattagctggtgagttccttaccactcgtaccacaagggaagtccagggcgtggttactagatggtaagtttctggaaggcagcctcatgactgcatcttctcaccatctccagcgctcagcactggcactatgtggcagggcccaggagaactggcaggggcagcttgccgagtgccaaagtggggtgagagagtggggtgccaaggatggatagtcaccccgtgcggtcaccccattgtggcactggctgccttgagggggccccacatctcagtgccgtcagctaccctctccctgccagagacaggctgggctgcactgccctgtggagctccagaggcacccagcctcctgccaactgacgccagcttcttttcgatgtactcatggtgttaggcagtcaggaacacgtcctgggaaggcccctgtctctctatgcgggcctcgccagtcctatcctgtttccctctgtgctcagagactagctttcaaaaggtacactttgttcctgattctcagaaatcgagagcaacaagctgtcctgtcactggtgtccccgacaagttctgaggcctaacaggatctttattgtggggtctgtgcatctggatttggatggttttagccgcttcctgcttccctctggctctttgctgtggtatggatgtgtgaggttatgagtacggggaagctctggataagtgaggcaccgagctggaggggaaggagcaccaggttctggagtcagtgacctgggctttatccaagcacagcttgtgtaaagactctcaccacctgtggggtctgagggtggggattagagccctgccctctgggagccgcctgaacagaaggagattatatgataacatgccccagtgcccacacagatcagctgctcggccctcaggatctccctttctctcccctgtcctcccaggatcctggttttcctatctcctggttgtgcatacattcgaacccctctatgtctctaattgcaagcatattaatcctcctccttcatcctttgaaaatgcctttcctccttctcctcttgcacacggcttgcgtttatgttataaatccaatctgtttgctctaagctttttgagttcccagagaggctgcatcggtattatcttagtacttcttgtcctgttccaggaag

SEQ ID NO: 34545 - DNA, 1483 bp, Bovine  19866880488347
  misc_feature (1)..(1): n is a, c, g, or t
nctgagtagagttccatatgctatacagtaggtccttgttggttatctgttttgaatatagcagtatgtatatgacttgcccaacccccctaactatccctttccctctggtaaccagaagtttcttttctaactctgtgagtctcttctgttttgtaagttcatttgtgtagtttatttttagattccacatataaggaatacatatggaatattactcagccattaaaaagaatggaaaatgccatttgcggcaacatggattgacctacagagtgtcatactgagtgaagttaagtcagacagagaaggggagatatcagatgacatcccttatacaaggaagaattcttaaaggatgcagtatttgaactggtctggttcaagaagtcagctttgcttaacaggaaaattacctttactctatgtggccagttttctcatccttcaagacctcagtcaatgccctctcctccaggaagtcttccctactaactccatgctggaataggactctctaggctctcatagctccactccttcaccccctccaaacctgtgcttccctagacaccttacctatttcactccagtacagatgaccagtttatacacctgcctctttggctagctcatgtgctctctaaagacaggtctatgccttattcctgtcttcattcttggtggcccacagagggcctggataagacaggtgttcaaaagtgattgaagaatgaacgaacacccccagagtgagcaacttgaaagaagacttgattgtgcttagggaacacaaggatgaatatttatccatgggccaaaaagttaaattgggatttgatcagaaaggccctaaatgacaagccaagggaagggtttgagcttttacagatggatctggctgctctaaagaagatggctgggagtggaagatgggggtgggagggaaggagctgtaagccaggcagaaagagcagtcagaaagctgtaaccatgatccaagccaaaggtcagagtggcctggaccagataacagccatgggaatggagagaggggaagagctggatgggagctttgaagccccagccaccctggtggcagcaacactgggtcaccagccagctattccaattattcatagaaaatcaatcccattccatggagactcagataaaactcatgcacagtaatggatggagagcttagagtgaggagataagaggaggccccgggtgtggggtgatcaggtggggctttgcaggagggggaggaatggtaagaggttatcaaaacagccctcaaatagcaaaggctcagagccggtctgcccagctgtggctgcagagggacacacaggctcaccccaggcctgggagagtcagacctagtggtccttgggcattagtcccagcagcaggggagactgattgaatcttgctaccctgagatgacatggaggtcctataccctctattaggagac

SEQ ID NO: 34546 - DNA, 1159 bp, Bovine  19866880647598
  misc_feature (1)..(1): n is a, c, g, or t
nacctggggctcgatttagacccttggcacacatacacaaaaatgtaataaagttctatttgcaattccatggtaagttagttatgttacagaatcagctgtttccataggtctctttttcccttaggcatgctattttcctagcattagataccactttttaaagagagtggtgaagtgtgggatcactgggcttggaatccaatgaactcggcacaaattttggttccatttactggctggaagctcttggccgagtcacttaatcttgctgagcttcagttttctcacctgaaaaagtgggataataattgatagctcttcctcaaataatggcgatccaaatttaaacgagatcatagacaccagagaaaacacgctgagcacactgtttggcacgtgaatttgctgaactaaaagacttattttcctgcaaagtcctctcactgctcgtaggttctgtgaggttacactgtgcgacatttcagttctttactctcagtctagagcctagccctcaatagttgcttagattagtttagattagttctgccactggcctgctgctgctgctgctaagtcacttcagttgtgtccgactctgtgcgaccccacagacggcagcccaccaggctcccccgtccctgggattctccaggcaagaacactggagtgggttgccatttccttctccaatgcatgaaagtgaaactacattcacccaaaactttctccagatctgggtccttctcttgctttctcttggctggtaagtctctaagtctgcatagttcagcatatatatatatatatacatatatatatatacatatatatatatatatttacttaagtctctgagtctgcatagttcaacatacttccaatccatcctttatatatatatatatataaattttatttacttatttattggtagtgctgcatttctgtcgctatgcacaggctttctctagttgcagtgagcaggggctacgctctagttgctgtgcccaggcttctcatcgtggtggcctctcttgttgagaagcgcaggctctagggtgtacaggcttcagtggttgcagtgcatgggctcagtagttggggtgcaggggcttagttgccctgtggcatgtagaatcttcccagaccaggg

SEQ ID NO: 34547 - DNA, 1332 bp, Bovine  19866880655395
  misc_feature (1)..(1): n is a, c, g, or t
ntaactgaagtcactagactaagcaacactagggttatgactttgcctgtctttttcacaagttgttttcccagggccttgcacacagaaggtactcaataaatcctcgtggactagttgtagagcactggtttgccctttggtggtgtgagtgcatcaggcaagaactgagtgcccaggtttttcctaacgcatgctctacctttcatctgtcccagcctccagaaatctctcaccaggttcagtttcaggcttattagcaaatgcaaattgaattacgagttgccctttcacaacaaggacaacaaaaacagtttccccaggaaaagagggtgagaagaggtgaaagctaggatgaaagtcgaagacaatacattctaatcaaacttgataaatatgtaaattaaagcagctaaacagttggctttgacaaatgacttctcggtaatggatttttccacactgaaaggcgagagttcagccaacctgctagttgcaatcagaatcctctcctgctttcccggtgatgcgggctgacggggcaggtgctgggatgctcagaggcggagcagagaactgatccttcttttaatggatgccatttattgagcatctgctagctgctaggcgagcctcccttggccctttgagggcagagaatccctgtctcgtggaggaggaagccagggaaaaggcgaggaagggcttgactcaccagactcccaagtctggagttgctcaggggccaaagcaaccagtccattctgaaggagatcagtcctgggatttctttggaaggaatgatgctaaagctgaaactccagtactttggccacctcatgcgaagagttgactcattggaaaagattctgatgctgggagggactgggggcaggaggagaagaggacgacagaggatgagatggctggatggcatcactgactcgatggacgtgagtctgagtgaactccgggagttggtgatggacagggaggcctggcatgctgcgattcatggggtcgcaaagagtcggacatgactgagcggctgaactgaactgaaagcaaccagatgttgagaatgtaaatttaacccctccagtggatttactgcggtctggggtggggtgggggagctcaccaactcaacagttactgccttttttttttttctacccctcacaggacctggcacagtggtggtcttcagaaaagagctttccttaacttgctacatagctttagaaggaccccttccctctggcccctcccatctctgtttttccatctgtaaaattagctgtgggggtcgccctgcgaaggctcagacag

SEQ ID NO: 34548 - DNA, 1346 bp, Bovine  19866880671646
  misc_feature (1)..(1): n is a, c, g, or t
nattcagctgtgtgacgttgggcaagtgacacaccctttctgacgttttctttattgctaaaatgaggatactatgtaaagctctggcttatgtaaaaattaaatgagatgatgcatgtaaaacatagcaccatgcctgacagtcttattaaaagaagatttctgggttagaaaagctagccataacattggcagggccagacactgttttcagaagtactttatttttgtattatctctaatagttctcaccactgaaagatgggtgttattattattatcctcattctatgagtgaagaaatgaattaaagtaattgcctgtgcaatcctgcagacggtactggcccccgagagtgtgagcagaatgtgtattcttagtccctacagctttccaccctcgtgatgagacaggcattggctgaggccaggaccctccctgactaccctcccctcatctcctgctctctcttgctgtctgtgcaccccttgcctttggaagtcaggctacctgacatgagaatcccttctctcccagcctttgctgtagccccaagccctggacctctgtcggggagcctcagcctgcttctaaacaacctgtcaggctgccagagggctgggcggcctgtctgcttttatcagggcagctgacagagctgggcaggcttggcaacagcttcagctatgaacagaatctcaatgaaggctttcacccaacctacagtatgtgtttatgacctgggagccttgccctggcagctggggaggagagtaaatattgcaggcttggggcccagctgtcaacccctaccccccacctgcaatgattagatggcttcctgtcctcagctatggtgaaagccattcagctgtgtgtgtgtgtgagtgtgtgtgtgtgtgtgtgtgtgtgtgtgtgtaatagggaaagagggacgcctcattcaccaagaagctggttccctggggtcaagaagggtccagcaaacagggagtatgggaagagaaggggagaagaaggaggaggagacaaagaatctgaatccactgagaaataaaaatcagagggaagtgaaggcccactggaaaataaagtatgtagactatctcagatgacctaatctgacactgttccacctaaatggtttactgacttaagaattctagagatttggaggtggaaggacaaaatagccccttacaaaattgatttaaacattatcttttatgttcaaaaggcacacaacctaaatctgtaacataagtcccaaataggtttcagtcaatcagttcttattctcaccatcaggatgtacctctgctctactgctctagccgccctcccca

SEQ ID NO: 34549 - DNA, 1632 bp, Bovine  19866880720620
  misc_feature (1)..(1): n is a, c, g, or t
naaaaattgtaaatgtttcctcattggcttattaatttctaaaactccatcaggggaatggcagcgtaattacttattggctgaaccagtatatcttacatagggaggcaagattaataaaacaaaatattcttttgggtacatattattatagttgcataatgcatatcaagacaaagtacatttttccaaggggtaaaattcatactgttctatataagaaaattttaccacagggcaactcctgctttatcttttcatttcaaactctatctgaaaatttaaaagtcttgtttctcataaaccttccacaccatggtcagtgataagcctacagtctagtgttaggggtttagaaatagttctattttaaaatacacagaatcattctgagaatcaagtggtagaaacatactttcagaaataaattcatattcagatgaaagatcataataacatatgtaacagattctattaatataacagctactgctgtcatcatgattatctggttgtattgcatcctaaactaattggcatgtttgcttttgatattgtaaagctaatatgtaatgagaggcagcattttataacaaaaagaaggctgcttttggaataggggagactaaggtgtacattcctgtcgtgccaggtactatctgtgtgagcacgggtaagtctttagtctgagttttttcttcatttcttaagtgaggattcaagtacttaccttgtagagatgtgtgaggtatataattattcatataaaataccccgtgcaatgcctgtttataatgcaccatcactgaatggttactatggctatttgtttggcttataactaatgaagacactgactttgttattactaaatcaatccctttaggagactgaacacaaatgaaagataatagaggtctttaaaaatgtctctgacattctggccatttggccagggagtcagttaccatcctcccttcataaatgcaaagtcgactacataaaagaaaaaaaataattgattccctccaagtattcatcaaatgagataagatctctgagaaagattaagggcttacattttttattagacctgcttcccataaaatttcatagaggataaaaggagggggaagtgtagaagcagcactgtttctgttttatctgctaccctgcagttataaatcttcctgagatatcattaattatagtggtgccattcacaacgctgctattccaggcctgctagaatttttactaaaaattctaggactgggacttagaaatttgcagctgaatttttgtatgaggttgaaacttgaagactgtgacagaagtaacacgttcaaactatcactatggactgaacgtctgtgtcctctccccagtacacatgctgaaaccctaacccccaatgcaatggatccgtgggttcagttcagttcagttcagttcagtcactcagtcgtgtctgactctttgcgaccccatgaattgcagcacgccaggcctccctgtccatcaccaactcccggagtccacccaaacccatgtccattgagtcggtgatgccatccagccatctcatcctctgtcgtccccttctcctcctgccctcaatccctcccagca

SEQ ID NO: 34550 - DNA, 933 bp, Bovine  19866880744830
  misc_feature (1)..(1): n is a, c, g, or t
ncctggtggaagttatagaacatggccaaatgcatcacatatgccctgataagggaactcaaagattctggatgcagagtcttcggaattcagcacatgcaaaagatttctcttcctttcctcctctttttctctctctctctctcacatacacatacaccaaaaccacaggaaaattaaatggaataaccaaatgaaaaaaaatcaagaaagctcagacttaaagttgttttcaatttaaagccatgccctggctgccctgcctccctgccacccaggtgcctacagcataacgttcagaggctgtgcgcttggctagaggtgtcctagactagaaatctgcccattaagacactagatggagccagatgggaaagtttctgctctcgctgcagaggaaccattttctctgctctttccttttcaggagcagtagcatgatatggctggtctcacagaaaacctatttctctaatagtcttcatttgagctgtcctcaatcagtcattcttagaacattcaccaagcccttgctctgagtcagctttcagacacaaagctgagtcaaatacagtcctcgcctcctttctctggaggggtgtatgggctggtgggagaggccgcttagttaacaggctgatcttactttacttttcttcgctctttctagactccaggcaacagggcccaacacattgcctgatcttgcactggaattctctagcttcttgacttccttcttgcaattttctctctcagaaaagaggtttccttctatttctttgtatctaaatcttaatctctatcaggcccaatccaaatgcgtcttccgctgggaagcctttcctgatttttcccacacagaattcctctttgattcctttaaccctttgtttagtgcaccagttatcaagatttactatgtatcagaat

SEQ ID NO: 34551 - DNA, 960 bp, Bovine  19866880776174
  misc_feature (1)..(1): n is a, c, g, or t
ncagatgaggaaacaggatcagagaagtaaagtaagttacccaagaccaccttgtaagtaaggagtctagctcaaagggtacttcttctccaaagcctgccatggtttgtcctggccaaagtgattgatctcccttgcccccaaggtcctgtagcagctactgtccccttattcaaactcagtatttgaggtcttctctcagtcgtatcagagagtttttcttttttgtgggtttttgtctagtgtccctaacaatgttcattcccagtggcccaaggccccagctaggtcctgcaagtgtacttctgagtaaacattaatctgaggtataggagggaaagtgctgaactctggctacctggtctgagttctcacgctgttcaagttctgatcctcatttccgtgaccttgtgtaagcatgaactgtccagaatgggaaccctgcctgtcctactcctcctgcatccctgggcctgctggtttagtggacagatgcatggatttaccatttggaacctcatctccatcttgaaagggttgagtgaaatgatctgaggactgctctcagttcaaatattgcccagttttgtgagtctgaaggattgcttctctccataccaacatgattctgagcttcagagtttcagctcagggaggctgagcatagcttgtcatttctaggttggtggctatatctcaaatttttgcccttgaacttgtcaaactgaagactaacccaggagctttgcctcaacacattcagaagtcctgataccaccctctcatcccctgcatctctctcagtttctttgtttcttcacttgcaaaaacacccacccatcccatttcaggataacttcatttgaagcactttcactgagttttacttttaacagctttttaatttagaaagaaagaacaaggtttaataggagggtagctgctgttcttcagaaagac

SEQ ID NO: 34552 - DNA, 1702 bp, Bovine  19866880776244
  misc_feature (1)..(1): n is a, c, g, or t
nctgtgttggtgcagcagtcagctagccctcaaatagctgcaacctgtgactgccctcaggtctccccaggggatgccgtgaacggcaacctcctgacactggtgctggcatctgccgaaggaaggcttaagaggccacaggccagttctcccaacgtgggtctcggggtgagagctttcctgtagagttcagtgctgggaaatgctccatgtggctttagcatggcctgggcttttgttggaattagcacacatggtaaataaatgagcagtctcattagaataagtggcccacggacatacacaccagggtgtcatgtggggactcaggagatgactcctcctcacaacccaggacactctgggaagagggactctcctgacagccttacaccctctgcttgtcccttagttcggttcacaggcccagatcgcacacttggtcagaaaatctgctcttctcatttggggaaaaggcagatggtgatccttgaaagacatttccttcaaggtgaaggtcaagttcccacttttgcaaagagctcaatcaatggtatgtgaatgtgaatctgtactgagctgtgaggagaggggaaagaggaagagggagggagggccagtgggggatgagaggagagaggaagaacagacacatggggctggaggtgggaagggcagggagtgctgaggccgcccgtagttccctcctgccccgggcagcaccagctcctttaatcttcatcaccagggcagttaagtgtcgggttctgcacacctgaacaggatagtgcaaacggaggacactagagtccagtgcagattttggtgcaaaacatttccactcaagagaggaaaggagctaaggaaaaagaaggagagagaaaggatgagtggaggagaggggaagggagatgggaggctgggggaaggagaagacagcaggtgggattgagcgagggcatgctagacacatgggcacgctagacacatgtgtgagtgagtgtgtatgtgtacaagggacagagtcctgcagacctacagacaagaagagaagtgggggatcagaggtggggaggtgggaagaaacaggcaggagggtggatgaccacacgggagggaaacctgggagaggtgagcggactgcccctcccttctctgccccccaaaggtggctcaggcccccagagctcagatcctggctcagacaaaggacttggcagcctcccaacctctgcaggatgaagacagactttccaaggcagccatgcaccctgggggccaggagagggcacttcagcctcagacaacagcaatgagcctcagcctgtggtccctgccagccaggcagagagagacagagatgagggagggaagggagaggccagcctccggttcaggtcagggggttactaccaggacctcttggtggagccaggttactctgtgcatccatgcagacacaggatgggcactgagctggtttgggtcccctaggggcctctgcgccagcctagtgtctcctctagccctgccctgccctgcccctaactgatggcagatttctgtcctgaagggcagggtgcctccagcttctccctatgctccctctcttccccttcaccaaaagccatccctttcttgagtacagggaagattagatttcagaaccatttcttctaccctccgccatcgattgcacaac

SEQ ID NO: 34553 - DNA, 3354 bp, Bovine  19866880805946
  misc_feature (1)..(1): n is a, c, g, or t
nctggtactggatctgaggggtgttcctgactcccttcttagttgggggcgacaatattcagaggaggtgtcaggtgtgtcctgggaccatagccctgtttctcttcctccctcctcatttcaatggctatcgtctcctatactgccaggctgctttggtaagctttcactccagggtgtgcgtaggttcctgtcctgcttggttggtgacctaacacatgacattgaatagaagtcttccactcactcggtttccacatttgtgcaagtgatgcttaccctcttggatccactgtctcctctttgtaaagtagatgaaggagtacccatcttgaggggtagatggcaccgtgctggcaatgctctcagcaacctgccaggcacatagagagcactcagtaaacaggagtttggggcaatgcctgggggcgagacactccaggctgactcagaacagacaggggcagcttgctgtactctgtactcttctgctcaagggtgctccagctgggttctgtggatcctgacacacttccggggaaaacccttgagtttcatggaccccttgcagtggtaatttagacagttattggtgagctggggtatcctgctagaatcctgagcgaggcttcgggaattttgtgactctcagatatgctcacatcttaagtgggcgaggctagttgctgtgaagctagttcctcttattgtatccttgttctaccccattctaccctgttctcaggagcacatgttctcaagtgaaaatcatggtcccccttggggtgtgaaaggggccagtgctgccatctacagacagaagagtgattagactcacttcttggaaagcctggtgaagagcaactgaaaaaagaggaaagaaattggttgctaatccccactgcctctatgttttaaaatctgtcattgtttaccactgttgtcgtcagatgtctcaccttaatggacatttctgcttgcaaaccagggtacgtgtggtgtcacttccatttgggactgccactggagccctggcaccatcctggtgccttgtgtagaatacaaagggtttaggagtctgcttaattatatattgtgtcattgctttggtattggatcaacatttgtgaaggtcctgtgcaaacctttggttttagcaggtcccaatgggatggagaagtgaagtagctcagtcgtgtctgactctttgcgaccccgtggactgtagcctaccaggctcttccctccatgggattctccaggcaagaatactggagtgggttgtcatttccttctccaggggatcttcccaacccagggatagaacccgggtctcccgcattgcaggcagacgctttaacctctgagccaccagggaagcccaatgggataggatgatccaaaaggagatacctggaattggccaaatggggaattttggttcttgtgcattactgggttccaaagaactctctccagatataacttggccagtgcctggagagcaaagaggacatgttctggggtcagagatctgcctggctggtgtggggagcaaagaaaagagtgtgagtctatgcaccccaggtctcatggtggagttgtgatttgccaccaactttccttggctgtgtagatgcgaacagttaagaccctgatgctgggaaagattgaaggcaggaggataaggagacgacagaggatgagatggttggatggcatcaccaactcgatggacatgagtttgagtaagctctgggagttggtgatggacagggaggcctggcgtgctgcagcccatggggtcgtaaacagttggacacaactgagcacctgaactgaactgaactagtttcagcacctgtgctggggaaacaaggcgaggttccatttcctgcacccagttgctcatttatttaacaaatattttgtaaatctttgtaactgagtggagaagcaggacttgggcagggaggtgtttaaagaaaagggatggtcaggaagagtgtggggccagaaggtgggttgtatggggtctctataagggtaaagtgagagatagaactgacccagaatgcctgctgtgtacaatcaaaaggccttcatttgatgatcccactgaggacatttccagagcaaggattcattgcttttgcaattctagttactaatggagaagccagccacatgtctgaaactgtaaataggatatcaattcgcctcaagaaagaaggcctcctgaacattcaaaacggatggacagaagctgtagggcatcacaaggagtggaagggtccacaggggtgtgggcagttagatgaggatgcagggaaagagcttgtccccacttggagatgatggtgagggtgaacctttccttctccaggaaatcctaagccctagggaactatcgggttctgttaggaagcacccagctgtaccagcatacccagcacacctgggacgtgtctgtgacttggattatcacacacccagacttcaagaagttatatccctttgggattgacattgccatattgcagctgctctttcctgtgaacttcacctcctacatcatccctgcctgcctcccagtccctagcatgaaggtctccaataactcatcctgctggataactggctgggggatgctcaatgaagaaagtgcaaggttatgggggacttgggggggatgagaggaggaggaggaaggggagaaggacagaggagcaaagaagggaggtatgtctctacctgaggggtctccaggcaaaggtcctcttggcccagtatacttcatttccagaggactggaccattctagttctagttcttaaagtgtgtgattctaaggctttggtgttccctaagtgtaaagctctgaagtttgtgaatctgactttcgagtcaagaatctgagttcttgaagtctttctggttcttgattccaaggtttaaatcaaccatagatctgagatgacttgatctaactcaaaggtcatgttgaggcatgactccttccaggtcactgataaactctctgatttcccagtgccataggaggtgcttgggaaaagtggaaagaaaactcaaatatgatctctgacctctgagtctgcctgatcaatttagaatgattactacttaagagggtttcactctccagacctcactttgattttctcccagctcaggtcatctatctaatttgtagacttgttaggcaaactgagtaacaggaaaaaattgtattttttaagattgaaagaggagaaatctaggccaaaagttatgaataacttataagcaagagtcttcattaaggaaaggagtgtttaagacttggtgaaatga

SEQ ID NO: 34554 - DNA, 1635 bp, Bovine  19866880868957
  misc_feature (1)..(1): n is a, c, g, or t
ntagcagtctcttttatcaatctggggtaaaaatttcacctggataggagaaaaatatttgctcatattgcctcccttctattgaagaggttataatagaataaaccttcaaaaagtaaggaaaaaactatagttggtcttctgggccaaatgagtaaataagttcatgctgcaataaacccattcattcccattaaatggtaattttgaataatacatgaaaaaagaaatgaaaatatatagctgggctccattgcaagagacatatctccatgaaactgaaaagcacaaatgcaaattgctatacatgctcctgaggctacttgcttattgagatctggatctagaagcaggcagtagctgctgaaatttggactcctgtgagactcattaaagtgttctataggagatgaggaccagagataaggtcttccacttagaacaaggaccacgggtggggcttcccagttatggaaggagcctagaaaaataaaagcctggtgcagattctgggagatagcccctatgtgctatataggcctagagaagtgagggatatagacatagcaatcagaagcaaagccaagctatcctgctgactttttgtcactggatctgacatatccccaatatctgtaaggttctgtactgaaattatggatagagtcaactgtaaaaaccaacatatagggatatgtgagcatagtgggagatttttttttggggggggtcagggatgggaacaaagagtaacagaaaacttccttctcaaagtgatattacaaattaaaatttcaaaatgcatgaagaaattaaatgctaaaagcgatactaaacaaaatcaacagttataacttgaattcactccagatgaaacttattttataaaacagtcaaagcttttaaaataagcatattgaggatgtttgaagaaacaaatgaagacagaataagaaattatgaaacagaataggcagaaataaaatgagagcaggtggatatgaacaaaattagaaatctcaaaattaaaaatagatagtcattgaaatattgaaaaagacaggaaaaaatctagactagatatggtcaaagagtgaatatgaattcaagttactttggataactcagaatcagtgcattaaaataaaattataaaaaattatgaaaagtcagtaaagaaccatggagggcaacttgagaaaatccaacattcatctaaagaaattattaaagaagaggattgaagggaaagcaacatttgaagaggtaatttgctgataatttctcgaaattaaagaaagacattgattctcaggcagaaagtgtactcagactaccaagaagggtaaatagaaataaattcacatctagacttattaaaatgaaaaagtagagcatgaagatcaaaaggaaaaattttttagcctacccaataaaagataagttactgcaaacaaataatggcagacttctcactagcaactatggatgtcaggaaaaaaagaaaaaaaatcctcaaagtacaaagggaaatcttccttaagctataatttatacctagccaaactattattccaaagagaagtcagaataaggacaaatacagatccagatagcttcccaggactctcacta

SEQ ID NO: 34555 - DNA, 1297 bp, Bovine  19866880877816
  misc_feature (1)..(1): n is a, c, g, or t
ngaagattccttggagaagggaacgggctacccactccagtattctggcctagagaattccatggattgcatagtccatggaattgcaaagagtcggacacaactgagtgacttcccaccttcacctgtagaatggatacctacagtatggcagattcatacaatgaaatgctattcaaaaatcataatagtgtcactcacaaagtatggatgaatcttaatatcaagacaaaaaagtacatagtgtgtgatcatattcacataaagtcacaaaacagagaaaactaaattaaatcatttaggcatatacacttaggtggtaaaagtataaaacaaagcaagaaagtaatttcacaaaagtcaggatagtggttacctctaaagagagaagaattttggaaggaaggatcacaagggtaggaggtattgaaggctaatcctgagaggctggaagtgttctatttctttatcaggaagtgttacattttatatcaaaaaatgagatttaaaaagggtagtcactaaaagatttctggaaaactctgtgggcatgggcaaagctccatgacggtgaactttaggatgaccccattttgtacccttcttttacttgaagcagatgttcagtaaatatttgttaaatgattgaatgttttcagctttgtcttgcttggataagaaccacctgtgcctccttccccagaccttggtatgtagaagtctggaatagttcttaggtttaccagacctgaagggctctagatttgcagatagagttaagagtccagtctgctggtaaatgggtctctgagctagctagggaactgtagtaaaataaatcttgttatgcttcgtacccttatccctgatgctaaagaatatttctgcttgcttctgctcatgtgttaaggttgatcatttgattgcaaaatactaaaccttctttatagcaagtattgtcatacccactcagttgatgaggatggtagacatgatttggttttttccacccattttacttgtcttcagctgtgtagcagccaggctaattaataaatgagatttatcttttactttcgaatgcaggggtgggctctgattaatctcaaatagggtcagcaaactttttttctgagagagccagttagtaaatattgtagattttgcaggccgtaagatctctgtcccagttactcaattctgccaatgcagtatggaagtaactatagacaatccatacacagatgaacatgggctgtgttccaaaacaactttatttgcaaaagcacatggtagg

SEQ ID NO: 34556 - DNA, 2219 bp, Bovine  19866880903959
  misc_feature (1)..(1): n is a, c, g, or t
naccatgttgttcaagtcaggaaactgggcatcttccttaatttcttcccttacccaggcaatcaatagaaattctaccagctagatattggaacatgctattaagatggaactgtactagtcttgattttagctgagatctcaagtctgtagataccactttttttttttttttgcagattcttttttataaatttttattggggtatagctgttttatagtgttgtgttagggtctactgtacagctacacttaacatatatattctgctatacgtcacatataccccccttttttcagatttccttccactgagtagagttccatgtgctttacatgtacttacacatgtgcttagacactccatcatgtccaactctttgtgaccgcatggactgtacaccaggctcctctgtccttggggattctccagacaagaatactggagtgggttgccatgccctcctccaggggatcttcccaacccaggtattgaacccatgtttcctgcattgcaggcgaattctttactgtctgggccgccagggaagcccaatagttatctatcttatacatagtatcaatagtgtatatatgtcaatctcaatctcccagttcatcccatccttgccatcccctttggtacccatgtttttttcctacatctgtgtctctatttatggcttgtaaataagatcatctataccaattttttcagatcccacatatatgtgaaattaccaggcaggacttggacaacgaaaccaggaaaccagatttataaactttagctctcctttagacaagagggccactagagggcatagtctccgaatggaggtgaaccagcagaccaccagagactgaggtgggatccatgaacaagggaacccttgcccctatcagcagctctctagctctggggctgatgtatctgaggaagctcataggcattgcccaggtcttctctgggagcactcgtccccgaagaccttcccttctctttccccttttccctgatcctgctcaacctcagaggggtaaacatctggggttagccagatggggtaaagggctggaagtcaagccagggaaacaggagtcaccttgagcacctgtctgaggcctgagctagaggatgggaaggttttagctttgaaaaggctcaatgactttgattggaccagacatagtcattgctgaactgagactgtcttgtgaccagaattaattagaaaacttttaatttcctgagagtggctgggaagtcacgggatctgcaagagctgttatatctctagatctagatgtagaatacatatgcatctatctgcggggtcaaccgggagataaaacatatttcataattgtaccttgtgtgtacagcttgtttaatattcctgttatacagttcacaaatcttttcccttctattcatggtctggttctgcccatatttatttatcacttcctgtttctagcccaaaccaacttcctaccttccaatactttggatatacattctctctctggaatctgggctctctcctttatgtctccctctgccaggaaggcgccttcaccctcttctcctgcctgcatcacagccattctggaggtctgagacctagtttctcttcctccaggaagtctttcttccctcttcttccccagcactcctgcatggttacagagctcccatgggagtcacgagctagcagagcttccctctggctgatcatttacccctctctgctgcttcctctcctctcaaaactgtctcctttttgaaggcagggaccatgccttattcatctccctatttttagtgtctagtgagtttcacgtgatggatgagtaaataaatggtatctccaatgtctgccatatgcttcagaggacctgtgcaaggcacagagtgggctgtgaattgagaccaagacaactaactgaattctaaatctctgcattttctcttggctacacagccatttccttctcctagagccagcattttctgatttcaaagtgcccacagttataagtgtgtgtggaaaacagtctactaaggaccctcagtctctgttcccaatgtttttctcatccatatgtcaaagagctatttccttttggcttgaaaccagaccataaacaaaggccagagaaactctgggttattttatgattccagtttaaccctttctttctctctttttaa

SEQ ID NO: 34557 - DNA, 661 bp, Bovine  19866880908245
  misc_feature (1)..(1): n is a, c, g, or t
ntccctggactgggaactagatcctgcagccatgtggtgtagctgacaaaaaggaaaaatgggatggcattcctgccccctgccatgaaaagagcagatctcagacagagctgaaggttcagcttggacctagataataagatacgtgtgcagagctgcaggtgactcgctcacagccctcatagaacatgctgctgctgctgctaagtcgcttcagtcatgtccaactctgtgcgaccccaggtgcggcagcccaccaggctccccgtccctgggattctccaggcaagaacagtggagtgggttgccataacatgagcatgaaataaatatttgctgttatcagctaccgagctatcagggtcattttttaccatagcaatgccaaataacacagcacattttcttgcagaaatgtgttgtttttctcatgctcaaagttgcctttagttatacaataattatgaattcaggccatgaggataatcggttgtgtgcattttaagtactaaatacataagaaataattagacaaagagttgaaaagtacaagggtacaggaggaaatgccaggtgtcagaggtctggctttacgaggtcaccttctgatgaaaagaaaattgtggggaaagcccactctgtaggcagagaccacagtgaa

SEQ ID NO: 34558 - DNA, 1730 bp, Bovine  19866880917980
  misc_feature (1)..(1): n is a, c, g, or t
ncaaatatggtccttatattacttgcattagaatcatgtccaatatttttaaaaatgctaatttctaggtctcactcctatatataaggaaccagaatctatggaagtagaaagtagaaatctgtatttttagaagcaatatcatgcatataaaattttgaaaatcagactgtttaccaaccccttatcaaccctactcacttcttatccaaagtagaattaattatgtggatacagaacacaaaattggaatgctaatccatatgactataatttagggaacagaagtctaagtaacaatagtaaatggtaaaaattcttcccaaggtatgtactttcttgcaccttccttttcctgtttgaattacttcttcttcaaactcacttaaaatacagggaaagtagagtattcctttaagattgggaagcagtaactttggacaggagtttacatttatactctgtgtaatgaacacaaggaaaaggcctcacatgttcgtgaaacgtttacacgagcctaccacggtaaagatcagagatttcagtccatatccctggttagcaataaaacatattccattatctggaacttttttccttacacttgttcagaaaactcaggaaggcggaagacatagtaatcagtggtatagcatcaatcagtcatacagactcagagaaattttagttatataaactcaaaatttacacattcagtttttaacaccacacttaatggcaattaacacagttttcaaaagtcttcatgagatatgttagtataattttgcaaaaattttattattactacaatatttctgaaattttaggctagaagagctgaatttctcctatactattgaaaaataatttttaaattataataaattaaaataatttagcttacttatggacaaaaattatgaaacctgttgtttggatgagagttaatacatcctgaaataaattaggactatgtggatttgcaaggcagccaaatacactgtaaattttaagtagaaagaaaggcaacaccattaactgaccatatctgttttcattgaaaattttcagtaatgcaaacattaaaacattttactaggattttatatagctaaaataaaatataaataagtaaataaataaatataaaaatttgtcacaaatcctgcagattaaaaacaaggttatttggacactaactatgagaagatctctgtacactgcattagtcaagctcatacctatactctgggtcactgtcataggcagagtctctatataaaagacctcttttcagttccagttcatcttctttctctgggtctcgctcatcctgaaaaatttaaagatttccattaatttattttataattaaaattacacccatgtttctttggtaattgtgatccccctctcccaatacaagagattgaattaaatgctgaatttcttaaggaaagaaacaaaaaggtaaacgagaatttattattctgttaaataaaactaatatagctttttttctgttacagtatcacttacactgtttatcagagactagcacacagatgtttcttgcatcagtgaatgattaggaatggatactgtctcaagatacataataaaatgtgcagaagtgatagttcacatacttttccctggtggctcagatagtaaagcatttgcctacaatgcgggagacctaggttcgatctccaggttgggaagat

SEQ ID NO: 34559 - DNA, 721 bp, Bovine  19866880924829
  misc_feature (1)..(1): n is a, c, g, or t
natgggattgcaggaatgatgtggaatggggtaatgaagtcctgggaagcacaggcgggtggggagagcatttgagctaggaaattgaaaccttgaatgcagaaaaagatgtaaatgttgtttcccagattttatagctcccagatgcctcctctaattgcatagctaacctcgagtttattaagttattttccagagtcaaactcatttgtatacatgtcagaatataaactgaatttaaaaagtaaggtccttggattaaaattcagggatgataaacaaactcatttagaatgtaagatttgcatgtcatttgcatgtgcccaaatgcaattacatgtgctctgtaaatatgcatttcacttttatttgtcatgatagaacagtatggaagaaattaattgccacagaattttttttaatatttaaagaaaaaaaatgatggctcttaaaatagactctgctagtgtatgattcaatgtgcagaaactggcaagaagagataaggatccttcaaaaatcataaattccctctgcaacatctgtagtagttcaaatcgcatggtttatagaggccccttttgccttttccatgggtattaccatagtgttctgtagatttattactggctcagtgcaaggacagttttactagcaaagctttaaaaaagggagtttttttttttcctctttgaaagttcaggattgaattgaaatgaaa

SEQ ID NO: 34560 - DNA, 3389 bp, Bovine  19866880994051
  misc_feature (1)..(1): n is a, c, g, or t
ntccccagttgatgcttgggacaagtacttgctgagtgagcatttgagcatggggcaagggagataatcagggacagggaagcctggcatgctgcaatacagggggtcacaaagagtccactgagccactgaacatcaacaagggagacagtgggaggtgaggctgaggaagagcttcctgaatgctgtgcccaccttgaagacaaggctgacgagtataggttccttctgacggtatatagggcgcccccaaagtattgtacatggaactgacgctattccatcagtggtttcggaactaagactgggagccatgaagttcttgattccatcacaatgttttgctcctccggactccccagcccctaattctgggtaactgtcccacagaggcctgtcttcactgtagaatcaattattaaaatcaactcactatcaactctaactttgaaaggctacttgaagggacagagatggggagcagtctccacagacatctagccatctggccttttctgcggaacctggctgggaagctcatttgaataattggttttggcggtgtgtactcatgggttagacacctgattacgctgccagccccggtgtcctttcagcctctgtggaaacatcactccggttatataaaaagggagagagtctctgggaggtaaggcttggtctggcccctgtgtcacttgcacttcatcttgaaaaactacgtgactcacatactgtgtgaccttgagcaagatacttagcctctctgtggcttggtttcctctttgctcaaaggagcagggtgatttctgcccagtctatgctttcttgtaaggttctcagagaaggaagggtgggagggtggttggagtgtggggcttgtgacttagcagggatgcaagtggaaggattgaggttgacaagaggtcaatgtcagatagcgataggcaagtaggctgtaccaggagaagtatgtccccagaactaggcttgtgatgattccttccttctcctgtgccactagctagctctatgaacttaagggagttacctaatctacctatgcctcagtctcctcatctgtgaaatgagaataacaatagggttgttttaagaattaaataaaacaatacatgcaaaatacctagaataaggccagatccaggaggttcaatagtctatttatcatcaccattatcatggtcatcagcactaccatcatcaccaacactcatcattataacttttccatcctggacaccatgtctcaaatatagaccatgacgaacatctggagcatgttcagaagacagcaggaaggatggggagaggactggatttcagctcacatgtggaaaatcgtaaagctctgggagtgttcggccaggagaacaggagctgacagaggttggagtgagtgaggagttggggaggtgtggggacacacaatcctcaaacagctgaaacgctaccacgtagaagatgggtcgaacctgactaatccttcaggggcagaaagcagaaatgatggctgacagatttagtgtggatatgctgctgctgctaagttacttcagtcgtgtccgactctgtgcaaccctagacagcagcccaccaggccccaccatccctgggattctccagcaagaacactgaagtgggttgccatttccttctccattagcgtggatataaacagcctctaatagtcagagctggcatcagtgtggcgcttcttaaggttcccctgccctaggtggggccatgcacaagctatctctgaggccccatcccactccaaggctgacgaggctgagagaggcaacaagctggcggggggcggggggggggggtgggcaggtggcctgtgtggggaaggaggcatagtgagaaggggctggcagataccagttggtgaggcaacttgcagcggatctttgtgctcacttccagttgatgaaaaacacgcagttttatgcttgtcgaagaacaaatataatactgacgcatattttttacatagctaattttgttttccattctattttggacagttaagaatgtttccttctttggctattgaggtgagtggggttggtcggttacagcgtctgtgcatgcatgtgtatgtgtccctatgtgtgtatctatatgtgtgttatgtttgtgtttgtaagtgtgtgtatgtgtgtgcaggaaatacctcccctggtgttttaccatctgccatatgtaatgatgattgctgtaaaaatttctccttatatcccttctatgtctggtggactgtatacattcttcaaaaaccttccctcatcacccatagtcagaaggaatcactccctgcgtttacgatacagtgtagccacggatttaatttgtagcaggctaggcctggccagcttggattcataaacctgatctgacccttcctgctaggggacccggggcaagttctttggtatctctgagcctcaatttgcttctctaattaaaaaggggccataatactacctccacctcagggttgttttgagtgttagcagggatgatatctataatgtgtggttagtaggcacttagacactagctctgatgatgtccaggcttccacagcatgacacacacccttctagtacaaatactgggcctcttattgccaaaggctgcctctgatctccatctgcttccctaaggcgcagcacagggcttgacactcagcaggccctcgacaaaccttagttaaattggatttactgcgctggagcattctttgctacgtaaagctcaccagggccaacagacagaatgtgttgcaagtctgcgggttgtagcagcatccgtttccactgcggggtctgcagcgccgtgcaataaagctgaatcatttctgcaccacccgtggaggtctgttcctctcccccatctccagactctcaagaagcactgaggcttcccaaagatgagaaatttcacagcatcctgatatcttttgggtaactgcgtattttatgatgactaataggcaattactatggtaatattgcaattcagcatgtgtgaggtttgggaaatgagaaattatgggtaactacgttgggctcatttctatggtaacaaaaagtaattgtcattaaatatcagttatacggaggctgtacctggtaattatagatttttatgcccagaaacataaataaaaccaataaatttactcaaaggtctacgactgtttacttatatgtgactctatggaacacacaatgacaagcacctaattaagaaatgcaaacctaatgcagagattcgtattgtcatgtagagatggagagtctgtttctcagctgcaaggaaaactgcacatcacccgggcccagtggggtacagcg

SEQ ID NO: 34561 - DNA, 2232 bp, Bovine  19866881042639
  misc_feature (1)..(1): n is a, c, g, or t
ntggggttgtcatgaggagtcagtgagttgctaaatttagaatagaacctggcacttggcaatgctgcttgtgtacggaccgctatgactgtcatcattatctgtctaacagcatggcctcggagtagctggctgcctccaggagaaaaattaactcagaggctggcccatcctgtgcttaactcccgtggctcctcccctggagtctgcaggaaagcggtggcagagggcctcccccatctctctcatgggggactctccttttccctttagccttcttctctccagaggcccttaggcccatggccccagagcagagcttcatggtccttaatggatcttgctttccatgtcttttcttctttcccacttggcctctcaaatctctgggtgtcctggaggtggtgacttcatttctccaaacattaactcctggaaagattagtaccatccctccaaatacttttggagatttaagtatattagtgcatataaaatgcccagcacagtgctcaacatacagtaagtgcctaatatgtgtctattctgttcagcctcctcattgctccccagtttcctctcctccctctgatctcacatttatgagttcaggttctgctttctctgcctccatttcagatcctgaagctcatagtcctgactccaaattgattcagatgaaaactgacccctgaccctcgaccccacttgtgccttgcagatcggagcatctctgatgtccagcaacgtgggcagcggcttgttcatcggcctggctgggacgggggctgctggaggtcttgctgtgggtggctttgagtggaatgtaaggaagctggctggaagattctcagggatagaggggtcttagcccactccaccctaccctgtccctgaccttagtgctgagagaaacctcaaaggtgcttggggaggctgcacggtaaatggagaacccattttatagataaggaaaccaagtcctgatggacctcatcaggtcacacaggactgaaatcaggcctccggtcccttacttccccgcccagggctctcctctgcatggaccactccccctccatctgcattaggaacatgaatcccttttcctccccattctcccaggcaacctggctgcttctggcccttggctggatcttcgtccccgtgtacattgctgccggtgtggtcacaatgccgcagtacctgaagaagcgattcgggggccagaggatccaggtgtacatgtctgtcctttctctcatcctctacatcttcaccaagatttcagtgagtaccgttcccatgtggccatatcatgttgctctgaaaatgcttagtagaggacacagcacgttgttgctatatgtatgtacggatggataaattgatagctggatagatggatggatggatggataaatgaatagatggatggatggatggctagatggaagagcaaggataacagaagtggaggatgaattcacaccccttcatcacacactccccgtccacccccactaacagcagggtaattagagatggacgataaatgtttgttgagtgaataacagtccctctatccaaagaactcacaatttcaagttcattcactcatttatcttcccattaaattagtcttcattccgcaccaagaatgttaccattaaaaaggatgtattcctcctctattgaggcaaacttggaagacaaactcaggtcaaacgatttgccaaggtccacacagagcactagctctggggctggaactaatgtttggttcccgtggcccattccaggcctcctgcggctctgccatgttgaagcccctgtcatgggtcacaaaatactcagggaaagggaccaggaagcatgccctgagttcagggctggaaaaactatagcctcttttccaccaatgcttgtaagcaaccctaaatcagctcaggccaaggctgtgaccccaagtcctccaataaagcccagcacgtgggtatccaggatctgtgtcatctgcggctcctgctctgtcaggtcacctggggcccacatcaggtctgagtgggctggtgctctttcagggagcagttgaaggccctctgggttcccaccctctcccccaggggcctcttcttcctgacccccactcctgcctcatttcctcagcatgctactccatcctctcaccgccagcacatgccccgggagtgcagcggatcacagggccct

SEQ ID NO: 34562 - DNA, 1674 bp, Bovine  19866881097650
  misc_feature (1)..(1): n is a, c, g, or t
nacggatagaaggccggatcacagatgcaaagattacagaaatttattttcgtaaaatcccagaacattagaattatagaacccaaataaaactcaagaatttaaaaattagatcccttgaagggggtgtatggaccacctgctttcagaaagaaatccatacctttctcctttatacacctcagtaaagggcctctgttgaaaaactgttcttgggtgtgttgggtgcaatagtgaatattgccaggagatggcgcccaatccccactgattgctgtaaaacttggcaggtgggcagagagaaaaggattctgtcctctcctcacctttccctcccattctctctttctggccccagtagagcagcagttacctaatggccttcctgccattcactcccctctcatgctccacccatttgtaaaaatctgtcctgcactcaggtccttcaatggtcagcccctgggcgtagagctgggggtgcacagatgagtgggcattagggggtcccttaggcagccgtgggcaggaggcatcgtgatggaagaaacagtgagggcaaaggtaaggagagggacaagagtaagttacctaaactcaagtaccatctaccagaagggagaaggaacattcagaaacttgagttatagaaccttaaattatgaagcaaagatttcggaaaggtcctcttaactttatgtaaactataaatccccaatctagggagaaaaagtaaaaatagccaccaagttatgtcttgaaaaccataaaatgaatacctatgagataaggttcaaaattttcagctgagctctgcatcctttggagacaaactttctatgaacatctccatccacccatgcccctcactgcattacctgtgtttctgcctttctcttaaactgtgtgcatccttggggcaggaccatataaatcatccctgcatccccagcacaaaagtatgatgcaggatgcctgctgagactgagtcttttctggtatcctggggtgacagccagagctggtctgggagacactgggggtgagctgcttgctaactccttcccatcaatacagtgcatctttgactgattaaatgctttgtcagctgctctcatttacccttttggatcagttccaagataaagttgaacaggcaggcagggaagagactttttttctccttatctggagggaggtaaatggtccagagttggggaagaacttacccatgtcagagagaaaggtggccctaggttccaggtgctctggctgccggggcagggtctagacccagccacatctccttggggtaacccggggcagggggcagggggaaagacctctgcctacagggagaggacccaggaaggatgggcctgcgcacctgcccaccaccatcagctcctgttctgttgcgttcttgcggaagcgctgccacacgtcaatggcgaacagggtgctgctgctgttgaagatggaggtgagtgagctcatgagggcggccatgatcacccgcgatcatcaggccccgcagacctggggagagacgagggtgtctgtggaccgctggccggtgaaagccgatctgccaggagctatagaggctaccagcgtccagcagagtcaggagctcagaggagaagggatggcagaggtattgaatgaggtgcc

SEQ ID NO: 34563 - DNA, 1380 bp, Bovine  19866881110924
  misc_feature (1)..(1): n is a, c, g, or t
nttgggctggggtccaagtttatttaagaagaggaaaatgttattatggaaattacaacagctttacgaaacagcgtcgctgtatcaatccaggaccacaagaatgctcatcaacttaatagcttcctgttgggagcctttcaagttacgactgaaactggcaggcatcggggcatgggagtggggccaagcaactgggtgacaccgcactccgccccctgccctcgggatgagtggcagagtcccagcaggagaccacaggggaccctccctgcctgctcctgcctgcatccctgaacaagactgcagcttgggcttcccattctcaaaggtggagccacagtggtgatggtggtggtggtgatgtgtgtgtctccaggtagcaagcagggaggagaagcctggggctcctccttctacccaccccattccacacccacagcctgactcaagtacaaacacagttgtgatccttagaccttcttccaaagccagtgtggagggtctgtggctaggtccctgataaggacaggctttaggaaagggactgctttctttaactcctaagcccaaaaagagagaaagccaggacttaactctttttatctttaaaaaaaaaaaaaaaggagaagaaaagaaaaccattaaagtgaaattcctggggctgagagcagccaggagtctggcacgtgtctcctcctcggtaattatctggcatttagcacctctcttcccagcacttgtaattagcagggaaattaagatgctgtcattctacctcccagcttctctctgttatgcccagaggcccagagaggggagggtatcagtacaccaagaattgagactaaaactcaggggggactgagaggggacatttgacaggagagcagtggtgggtcctggagggagcacttcctgccgcctgcagccacagccatgccttttgtctgaatttctggagtgtatgcaagggtactacgctgtctcccatgggatgctgttatggcgctgatgaaaagactaggctccagtggagtctcattgccttcaccaagattttcacagaggctctttggtgcccacctcggtgctagaccctgagatcagggatgaatcagatacacccggagttgtagatggtccccagggaaaggatatggcatttggttggggagggggtacaaccataacacaaggctgaatgtgacaagagttgaaggaggcaggatcagttatagaatttggagggacttactgaagatgtgaattactggaattctaaataatttcagacagcaacagcagaagattaaaccaagcatatgggctcttctaagggactctgtgagctgcatactcatgaggccagccctggat

SEQ ID NO: 34564 - DNA, 1067 bp, Bovine  19866881164131
  misc_feature (1)..(1): n is a, c, g, or t
ntcgccgaaaggaattgcatactctggcccctgaagttttcaatttatagtacttgctctttcagatgaaatgtccatttacatttcaaggaacaagccagcaccatttgcactgtggctctggtgtctgactcttcagacccaaacctgtatcccttccccttggcggtatggcagtttttcctctagaactcagaatacagagtctcattctccccatttctcaggctatttgctatccctccaatagtactcagcccatttctgttcctgcctattctgtgctctcagtttctcttaatatacaattatggttatataataattatacccctggcaaaacatcgtagcagacacctaccataaatgaatcaaggaggaggcagattttaacttaagagagaacttttaaaatctagacctctataatgtctgcctcaagaggtagtgagtgcctcctccagaaatacttaaaagaggccctttgagcattcccgcagaccagtaccccaacaggcatacatgacagggacacctgccatctggatgccgtggcccagagaggacaaatccccagtcccccaaatgtattctactatcacagtctccccctcttttgtcgaaactaatgagtcacgattcgagtaatgtttttctgtggctccaaaaccattttgcttaatgaggtactaagtctttataattaggcccagaaggaaatcaggacatggcccttaagagcaataattatttcagttatttatggtaataaaaaactgaaaataggaattcttcctcagaatgcgactatttattcttttacatattgcctaacaggcaattaccctattaaggctgcgttttgttgctaaagacattaattgaaatgtaaattaaatgtaaatcagctaattaaattgatatgtaatgaacttgtcagactggcctctctgatcagatgcatttcactaataaacaagcattgcagccggcctgacacgcagctggggtgcaggatgcctgtgctgtcccccaccagacattctggtgatgaaggggagggtctg

SEQ ID NO: 34565 - DNA, 775 bp, Bovine  19866881176837
  misc_feature (1)..(1): n is a, c, g, or t
nagctcagagatgaaggtggctatgtggggcttccttcctgtgataagggcgactgccttactgaactgaaactcctgtaagcatggccggatggcggctgtgggcttgtaaccagagcctgggtttgagtctctgcccctttctgctgcattactctggacaagttacttaaactccctgagcttttgttccctcctctgtacaaagagaagagtaagctgctatccctcctcaacttgccctcatcttcgtctaagcttcagtttctttctcatctccaaatctaagataaatccctctgcccttcctgggttgcatttcccttccttcatcagactgaatatgtggtaagccctgaagtgttgccctaaggtagaggagacagccccacagcacagcaccaggctcagactttggcttgcgccagcctaggtgaagcagctcagaatatagaataaaggaaaaattcatttcctccctggtgtctaggaggaagcaaactccacactaaattatgttccaaatatgccctaaggtagttttaattttattggcactgattttaattcactctttaggcccctgttgcagaatgagccgttggctgctggcaaggggacagccctttatcacttggttttgattaaggtttgtaagtttggaaggaaagaacaaagatgctgtcccctcgttctattctcagtcccaaaattgtaattaagggccctgcattagcagcacaccccctgctctgacatagccacacaaaaaaag

SEQ ID NO: 34566 - DNA, 726 bp, Bovine  19866881181776
  misc_feature (1)..(1): n is a, c, g, or t
ngtgacagggtcttctttatcaaagcaggtggtcgttcatccacctccttccttcatcaaagaagggggcattcattcacctccagcatccttctctcctctcattataataccatcagtcttccttccttctttcctttctttctctctctccctctttcttttgtcttccctccattcctcctttccttctttccttccttccttccattcataatgcctgccatggtatcttagtttgggttttttcaaaagcagggactggaacaagaaactcagagcaagcagcttaatctccaagtgatacctggaagcagagataagggagaggcaaaagtgacacaggacagggagaaaacccagtaaatggtgtgttaatgagctaattatcactgaggggaaaggtcaatccctccagaaactttcttggaactggcgcaaaaactctccccagagttgtctccccagaagacagggagacagctgagggttgcctccttgggtataaattccccttcacttgctgtcttgctctgcaaggctgattcccgacatagccccagtccagttccaaatgcctgaaactgtccaccatagctgtgctgaaatcagaggagttgaggagatgcaaggcaggcagcgcaagcacatgctagacctgggcacaggaggctcaagtgaggcatgagtgccttgtctttgctatcccatgactgtcaagtttgg

SEQ ID NO: 34567 - DNA, 1300 bp, Bovine  19866881198485
  misc_feature (1)..(1): n is a, c, g, or t
nttgaagtcttagtgatttaaattaaatcatcaagtatactacacattcacaattttaaagcattctaatatctattatctagttgatgctgaaaacaatctgggactaggcaagacaggtattattcttcccagtttcagctgaagaaacaggtgcaaaatgcagcagcaaccttcctgtggccacacaaggtcacaggcaggacagagagccagcctccaccctcacaaaggcgcactctctgcccacccagctgcctcctcccaggtctgcttgtgcagatgagaagggaagtgagagaggtctgaggggccagagaaggcttcctggagggctggggctggctcttgaagatgaagagggacaatagaaaggacagctgtagcaaaggatgggcatggccagacggtcatgtggagatgggccaaagcctctttccaatctctcctgtgcccgaggtgaatgcaggttgcagaattctcccaaaatgctcaaagtgcacttcagccaagattcctgatctcagtgtaaccctgagccgccggtcagtcactgacactctacctccattgtggtgggaggtggggaggcagggaagaacagagagagtggagtcagacaaacctgagtttgaaggctgactcctccacgtatgcaagacctgccagggactcggtttcctcccttgaacaggacacaataatgctggacttgctgagttctgtgaagattagatgagacaaggtatgtgaggtctgtggcacatggtagatgacagaaacctcgtagctcctttccttcccttcctggttcttttgggggcaggtaagagctgacccctgtgctctggaccctctgagaagtttggaacacagaggagcgattgcagacaggacggcagcaggctgagcccgggctgccctcttccctgtggggccacaggctacacgtctcagggtggggtttatcgcacccttcctgcctctgaacagcctctgaacacggaggctaatttcctcctaagtgaagcccttggcagctgagctcccgcatatggcgggctcccctgtttgctgtcagaacaaagccctgtgctccctgtaaatgccatgcattttaattgtctgagcagccttcttgctcgccatccagggagacaagatgcatcttgaataaggtactgtcagaggaagcctgggtgtgctgggtaactcgctccagcttcagggatggcccttgaggccaaacagctggactcctgggggccaaaacgagggactccatccacagtgtgcaggc

SEQ ID NO: 34568 - DNA, 1316 bp, Bovine  19866881259464
  misc_feature (1)..(1): n is a, c, g, or t
nccctatcttcgttccccagcgtagccttcaaggaccggatcatcagcgcctcctttctgaagccgcccccgggcccctgagggagaatgaatcactggctccactcggctcccacagctctgaacttactctgctttgtgctgtgggtccagctccaatgatctgccccccagcacactgtgagctcctgcaggacagcactgggatccccgtctcctcataaaatgcctgccagctgtcagatctgtgctcggaaaatgttatgtaatcgattagctaattaatgaaagagaatgtcccaggacaggagcatctcagagctggagaagactttcatcccagggcctcattatctaaatgaagcagcatggatgtggaggaggctgagatctggggtgggaaggacaggccctgggacccacagtgagataagagcaggataggcactaagaggctgctctccacacctgaccaagggcagggcggtcagttccggttcacagttagacagacatggacctgtaggtggctctccactgccccttgaggaagttcgtttctcatcgtggccttctaagtccctttgtgaggtcgtccccatcgagtgctcacttctgcttgtgagcctgacttgctgttctcagtgctgggaacacctgcccctctgcctggccaaagcctagaatccttcaggtgtccgcgtagatgtcacttctgcagaagatgctcccttgtcccctgtgtccctctttggccccctgtgatcccatctgtcatacgaggctctgattgtttccgtgcctctcgtctagtcagagattgttcatcttgtacccctagtgcccagcctggaaggaatgtatgtgagtaaatggatgaatgaatgaagtataaggactggatatttggggggctccacaggtggctcagtggtaaagaatctgcctataatgcagaagatatgagttcgatccctgtgtggggaagatcccctggcgaaggaaatggcaaccaactccagtattcttgcctgggaaatcccatagatagaggagtctagcaggccacagttcatggggtcgcaaaagagtcagacacaacttagcaaccaaacaacataaagattggaactctggaccacaggcagccattttactgaaggcaagttaaccccagggcttcgcgggggttcaggggtggggaaagcactgacttgggaggagacagagagcagggtatgctctaggacaccccgcaggggcagaactgagagtgcggccatggagggagtcgtgttccccagaacccagagaac

SEQ ID NO: 34569 - DNA, 1032 bp, Bovine  19866881406538
  misc_feature (1)..(1): n is a, c, g, or t
ntcacccttgctttttcctcagatgcagtagacccctgacaggcagtggcccccatccccattgtatggacatggaatggaagcacagggaaaccaagtgacctgcccatgaccagacagtatgtcaggggcttccataagtgaaagtgttggtgctctaaggcactcatttccaaaactgtctgatcataaaaagcattcagggcacgagtctaaaaatatccaccccaaaccttttgctgcagatcctaatttagtgagtctggagaaggacccaggaacctattgttgtaaaagcacaccaggcaatggtctctcatacaagtttaggggtcagtgggttagaaacatcaccccatttttcattaccctcagcagctgtggcggcaactcctagaaacctctgccgcaggctgcatcttgccttctgttgagatgttccctttcctagcttggagttgctttcgttgcccccttttggctcagtgaggtccctgtgtcactcaccattgtctccgtgtgagtgtttcagagctttagctgccaacaccctagagctacctcgccagactctaagttaagcgctccagggggctgtctacccttagcctcccaaaaacacagcctcacctttcagctagtgcttctgaaattccacccagtgcttctgacatgctggggttgagctacttccctctgggctggggagggtgagtgattgtgttgaaggttgttttgttgtggtctcttttgtacaaggtcagcttctagcaattattttttttttctaatcacctgggatcactctcatctaaggacctataccgcaagaaacacaatacatcccagaaaagaaaaacgaaccgatgaacaaaaagctctctcctgagctctgctccgttagcaaggtaacggacaccatcttccggatcccctgcagcccttagaatcaggctgcacgttaattagaaatccagagccctggaacaaggaaaatgagtgtgtgtttcaatttaatttgttcttattttt

SEQ ID NO: 34570 - DNA, 943 bp, Bovine  19866881421141
  misc_feature (1)..(1): n is a, c, g, or t
ntcgcagggagttaataagcagtctgggaggactgcctgaggaggtccacgaacctgatcgttaactgcaaggcctaatcagcatgtgcttcccacccagagtcccctacagctacacagggcccggtcccccagtaatggatggaaaatcggcgatttcctgacagttagcaaccaattttccaccaattagaagagagactgtggtccctggaggaagctggatgggtccaccgcacagagctgggaccggaagacagatgatcctaggagcatcagggaaccaaaggccctgggggcaggggacccctccccctccgcatctctttccggatcagctttggcttatatcaggggaaggccacttcggggacaggggctgcctgcttgggcacttcccctctgagctcgtctcacttagcaaccctgttttgtgataaaccacccccttctcttctcctgggccagcagacatgggtttctgctgggtgtctcctcagtgcccaggacaactgagaaattcctccaaggcagttgatgtggaggcttaagaaagcataagctctggagttgaacagttacgcctcgaaattctgaatttgttttttttttccattgtgtgtgaccttgagccaaatacctaaattccctgggcctcagtttcctcatctgtaaaatggggctagccatatcacttaccagataggacagttatgaggattaaatgaaataatgtgggtaaagtcctttacatcacagtaaatagtgttcaatatagaggggctattattattcttcctattactacgttgataatatacgtactattactaaatgatatcagcgagtgtgtgttgagcattgtgctaagcactatgagatcactgcccaagacatccttagacatttctccagtttgtggccctgcccccatcatcttcca

SEQ ID NO: 34571 - DNA, 1769 bp, Bovine  19866881472158
  misc_feature (1)..(1): n is a, c, g, or t
ncagacacacatctctgctcacgctggtcccttcgcatgaaggctcgttccccttcctactcccacctctcctccaggcctcacctctctgctccttcagggccttacaagaattcccaggccccgtactgggtcatggcctccttgagagcaaagagtctgtttctcttttttctttctctgtggtgccttagcactgaatctgaccagcgtgatgtgacaagaatctgagttgggtcattgttctcccacagtttataatgttggtgggcagtggggttcaaaatactccttcctcaaccctcactgtgttgccaaagaggatgctaccctgatttcatacaatactcgccaagagcgaatcaactgcaggccatgacttccaggaaacctccccccaaactgccaaattcttctccccatgctgttgcctggctctcgagcagacctgagggagggggacccagagcaagagatttcgcttgttcctttgaggtcaacacctaatcactgtccctcttcaaatgaaaaatggggaaaacactagctaactattgtttagtgaccccaacccccacccctttaaaataaacactcttttcaattaggaagatttgtcaccggggacagtaattccgtgtcctaccaaaacaaacacagttgtaattagttttatccaggaagaaaattaactctgtttatcttagcataattaatcattgaccctttctgtccgggcagcttgggggagggcgcgggagtggggggttatgatctacagcaatggggcattccaggacccatctatctctcctcttggttactcagctgtctgcatgagttatttgaaataatattcctggccaagagttatggagctgcctcagagctcgatttgaagaaacactaaataaggctatgatctttatggtttcagtctgctgagaattttagatgagtatgcatcagatgggcatgaaggcctgctggggccccaggatttactggacttctgttgtgcctttcatagtgacctctgcaagtcctgagggtgagaaaggagctgcgggcaaagggtttggttcttgatgatgggggtgaggctcttgcttcagtgagaagggcataagctttgaggttagaagaatttgagttctactcctaacacatcttctagctgtgtgacttgaggcaagataccttatcttttgaagatagtcacctccaaaattaaaaaaaaaaaaaaaaaggttatggagagatcaagtttagtaactgatacccttggggatttggtaagattagaagtgaggtatgccaagccactagcccgttgcctggtactaagaagttgttcaataaacactggtaaagtttgttattcttgtatgaactgaggattcaggggtggaagaacatatggaaagtcttctctctatattttaaaagtccctgcaactcaaggagaccctactgtgtgctggactttgcgttaggccctgaaaatagaaagagggtctaatcacaacccaccttatggagttcacagcccactggggagagacagacacacccaaacattctcaatctgttaaccaaatgctaatccagagatgtggagtgatatcatcgtggtgaaagagaagcagagactaactgaatttgatttcacagtcagttaacatgtaatacctcaattaaccctcatgataattctaaaaatagacacaatggaggggacctagggacagcatattcaggctcacaga

SEQ ID NO: 34572 - DNA, 1280 bp, Bovine  19866881576658
  misc_feature (1)..(1): n is a, c, g, or t
ncttgtgcttggtggtaatgttgtgacccttgaatcgactatgaaacagacattgccaggtatctactgtataagaggaaggagaaagaatctcacatcggaagattcccttagagacccaaaaaaatcaataataaaagatcagtgtcagatggggaaacatcttggatgatgataatgatgatgatactcacgataatttcttaacttcatttagtgtcttaatatgccttatctcatttgacacaactttatgaggtacaccagttcatagaaatgagtagaatgagatcaagaaagaagcaatgccagtgcctaaagatactttagctattcatttatttgacaaatatgtatcaaatctctgctgctgctatgtcacttcagtcgtgtccgactctgtgcgaccccagagaaggcagcccaccaggctccgcagtctctgggattctccaggcaagaacactggagtgggttgccatttccttctccaatgcatgaaagtgaaaagtgaaaatgaagtcgctcagttgtgtccaactcttcatgaccccatggactgcagcctacaaggctcctccatccatgggatcttccaggcaagattatggagtgggttgccactgccttctccaacctctaccaggtaccaagataaatctgtaataggcaatgtttctcttctcattggggttaaaaggtaataaaatgtttaataataaaatatatgatagtatagagaaataaattatgtaatgatatataatacatgtaataagataaaataattattgtttataataatttttatgaaggaaaactggcagggtggtgagtcagcaggtaaacagagaacgcaattttcaatagaatagtcagaagacattctgggaaaggtggcattacagacaaaaagaacaataatcataggggccagttatgagaaaaggcttgatttatctgtgaagcaaagtggacaacagtttggctggagcatagcgagtgagaaagccagagtgatatgagaggaggtgggagaggtacaagtacccaaaccacaagagctctgtgaaccatggtaagaatttaggattttgagtgatgggaagccattaaaaaattttaatcaggagtatgatacctgattttacatcttaaaaggtcactgactgacctgtgggtaatagaccatatgatggcaaagggtaaaatcggcagaccaagtagaagactattaaagttgtccagacaagagaggggttagggctaaaagagaaaca

SEQ ID NO: 34573 - DNA, 891 bp, Bovine  19866881599361
  misc_feature (1)..(1): n is a, c, g, or t
naagagtaatttaataaccgcaaatgccttaacacagtggggaggtaaaaagaaggtgtgcatgtcccttattgctacaggtaaaataaatggcatttttaataaagtgtccccatacagcgtatagaatatggcctcatgatgaaataaatatcagctgaaattatgcattgcaaagcatactttttctggtctttcggttattaaatttaatcacttttgagctgtggccctacgcttcttcctagaggcaggtacacttttgattaaaatgtgggccccagagcactttcacgggggaaggctgagctacgtccccagaggagctgcagtggagcacgcgaatggaatgacagggccaaggcaagcgccacgatttgcttctctcctgatggacgtgtttatccccagacagagtgcatgcagtcacggtgtatggaaatctcacaattaaggcaaagtctaattagagactgcatattcaaaatacaaagggacctctgaatggcagccactctagtgggctctgaaacgtgattatctcattctaccccctgcttcagccactattcgactgaattacaggagggggaggcgggtgcaacttgctgccctaatggattttctggggatgactctgctttcacagcccatagaaatgcctaggtccttggagaagagcacaggtttgggatctaccagactggaattggaaattgactctgcccatgatcgggcttcgctggaggctcagatggtaaagaatctgcctgcaatgcaggagacccggattcagtccctgggttgggaagatgcggtggagaagggaatggctacccactccttattcttgcttggagaattccatggacagaggagactggtgagcta

SEQ ID NO: 34574 - DNA, 844 bp, Bovine  19866881726187
  misc_feature (1)..(1): n is a, c, g, or t
nggtattgatgaggaatggatttctgcttcagataatggcaacttacataaagcacaccaatcatcttactaagaagactaagaaaatctggtcaagttattttttaatatctgcttgaaggcacagagaagctaatatggcagtgaagaattacagggccaagttctaggaaaacaaagagtcagggagatgagccaaacattggaactgctttctccccaagggcatctgctaattccagaaatggcaaactaaggattaataaacttagctgagattttgatggtctcaatagacctagaagaaaaatatcactacaggagacctcccccagtggtccagtggttaagaattttccagccaaagcaggggacatgggtttgatccctggtctgggaagattctacacgctgcagggcaacttagctcacgtaccacagagcatgtgctctagagcctgtgagtcacaactacagagcccaaatgccacaactactgaagcctgtgtacctagaacctgtctctgcaacaacacaagccatcacaacgagaagcacacacaccgcaactagagagtagcccccacttgcaacaactagagaaagttcactctcagcaacaaaagcccagggcagacaaaaattaattttaaaaaatcactatagggcctacaccaagaaggagaggtctccataaattctccacagtttagataagagtgtctaaaagacaacatcacagcagcaaggataaattgcaaatatcctcccctagtccttgcactcagaaagaaacccagcttctaatcaccttaatctctgacatcagactgacataatagag

SEQ ID NO: 34575 - DNA, 1042 bp, Bovine  19866882006890
  misc_feature (1)..(1): n is a, c, g, or t
natgagatgggcggtgagcctagggagcctaacacagataatatcagctcctgaggctggcaagggaaaagtcacttcagagggagcgagccggtacgttcagaggaatcggtgctgggccagagaatgcacaggatttttccctgcggagaaggagtcaggcgtagtcagaaccctgcggggcgtgactaactgccccaatattcctgccaccgggccctctgggtaaggactccacaattatgggagagccagcaggagaaccgacaaacccgcctttcatttggccggcaaatcaatctggcttcttacctccctggggacaatattgcatttcccctggaaaaacaaaaagccagagatctctgaagggggatcagtttctgctcctgtttccctggtgaagagcttgcagcatctcaggagcacaagcaggtctggttccagcagtagagcttctagtccagccaatttaccgggctggctcctttctggaaaagcatgtcttggggaccatgcctcacttggggcatgggcccatgctccttgcaggagccaccaacccctgactcggagcgcctgttctgggattgacagcccgtctcaaggcgcagatgtgaactcattgttcccagggcctcagagttgagtttggggccagtgagttgtgagtgacctctgcccatggagacaaggcttttaacaacactttgctggataagctccgccctcctccctgcccccatgcctgaggttcagaaatcagaactgtcaaccttgaagcgaacacatctctctgaaattatgaacccccaaactatacttgctgactttctctcagcctagggaggcggtccaaggggcacatggagttctgtagaggctccgggaaatttggcagctcttaacctcaacctgcaagccagggccaccagacaccaggtctattgcacctctcctgcctcccaaccccaggaagcatatctccctctgtgcgtcctctgtacaggtacacacacacactcacacacacacatacaca

SEQ ID NO: 34576 - DNA, 1187 bp, Bovine  19866880342226
  misc_feature (1)..(1): n is a, c, g, or t
nccctccccctgctttggggtgacccagcaggatagtgctccccttaggggccaagccctgaaatgggggctccagcaagaggcagcggctcctcctgaggaaccccttcaacaagggcttcaagaactcagtgggaaggccttagatgtgggcgccttccactctataactgatagccccaagggatgaccctcagcacagggtgacacccccttcccaagagggctggtgtccggctcactgtggatggaaggagtcctgctggtagggctccagggcggtggtcacctcaggggcccatatcagcctccctcttggcttgactcagctgtgacacaggctatcagcacgggaacctcttcatgtccttccgaagcctcttccaggatgtgatggatgccttggattatgtccaccttttggtgaatgtcccaggaccccaggccacacccaggtccccagactccataaggtttcactctgcttccggttgaggatggtggtctgtgttcctccatcttggatgtatgcgtgtgcacgcatgcctgtgtgcacatacacacatacacatatgagcacgtgaactcacagctctgctccctcctgcagggctgtctcaaggagaagaccttggaggacttagagaaattctggagaaggatgtgagtggccttagactagggtcatgactaaaccttgtccccccctctcccagggcggtggggctgctcctcctttccctggctctttcttcaagatgtagacagagctctgcaccctggccttgttccttgccttcctgcctgacctggggccccctgcccagccatggggctgaaacctgagaacaggctcccagggcagctccggggaggccccactgctggaggtggctcctctctctgccccaggcatgaatcctcgtccttctggacaagatgaaggaggtgggaaaagtgttcctggccaccaacagcagctacaactacacagatgtgagtgtgtaaatggaggtgggtggaggggcggagctcagcctctgggccagagaactttcttttctggctctggggaaactgaggctctgcagaaacagtggggatgaaaccctcactgcctggttggtatcttgggttccatttcttgaccttttaaggtctcagtgaaatgttagtcactgtctgtg

SEQ ID NO: 34577 - DNA, 1573 bp, Bovine  19866880482636
  misc_feature (1)..(1): n is a, c, g, or t
ngattttccgtcttctaccctgccctaactgggagcttgtcttcccacactcagagtgatttatggctactcaagcaaacgtccctcttcagaaaagatggataggcttccctcaagacccactccttagctgccaggggctgtcaagtcatactcagccccggggtgcaataaacgaattaagccgaaacacaagcttctaagcacccctccaactctaaccatctacaattctgctttgaggacttttccctccctcccccaccaaatacttttagaaatttaaatttcttgctctttcccccttttctaagaccacacgtttaaaactgttaacagcaaaagcaataaataaatgaatcaagtcagaaactcctggaatctctaggaatttttcctggaaacactatattcaagtatataatttgtcattatttggaccggtataggttgaatgaactgacatacaaaacagaattcttgtaaattcccagtgacgcaatcgcaatcgtggccacgcccactccggagcagacaaaaggcgaagtagcctgactcagttcaagcctccacgcgaagacgagggagccagtcatctcattgttgctagctcggttcagcaaaggtatcgtccttatcacatgtttggctcttatagtattttttgcttttcctccttggctgtgatctctcaaattgccctctctgaagttgaagcctcttccttcctttgccgtcccactctggtttggcgggtgaattagaatcatagtcagatttcagaaaatgattctctctctgctggtgggaaattgagcaacagaggaactggtttcctatgagagcatgagattacagccaagccttcctttgggggtactctctgctatcaaaaactattcagagaaaactgggaatttctaactctttctctctcttgcaactgtataaattaaatatttcatgcttgttgaggtttttcagttttgattttttacttattcaaattttcatcaaatgcctaccaaatgcaatgcattgggttggatgcctaagagataccgagattctaacagaagtttacagtctagcagaggaggcaaatacatatgcagatcattcaaagggagtgaaaagaagaatgctgggtgtgagctcagtcattcattaagtgtcttagaagggaggtggttccccttgcaggtgtcttattcacacaatggccagactgacagctactggtgttttctgttgcagaagtgaagatggccaaagtccctgacctctttgaagacctgaagaactgttacaggtagaaaagagattctgtctcttgtgacttaatgagggaagcaaggcacattagaatccagctaggagggatttgccagggagtccagtgggtaagactgtgtgctcccaatgcaggggacccagggttccatccctggtcagggaactagatcccacatgctgcaattaagacctggctgagccaagtaaataaaataaatattttttaaaaagaaagaaagaattcagctaggattacagtaactatcaatggggcaag

SEQ ID NO: 34578 - DNA, 1456 bp, Bovine  19866880541691
  misc_feature (1)..(1): n is a, c, g, or t
naggaggacttggttccgttgccaaatatttaagaagtggagcgggctgatcaagagatcaatagttgaaagttacaaagagaggtataccatggtctaacaatcaaagaactgggcttttgtttgttttggtgggttttcatctaacaaagttgctaatgacatattgtattatcagcaaagaggggacctgatgctggcccccaacttctaggctgagagatatctgagggtaaaggcttgagttctttctcttgtgaaagcttcagggtaactgtgacaccccaaggacagccaggtttcagcccagaggaaaattgaaagaacacttagaaaaaagggactttcctagtggtccagtggctaaggctccaaactcctaaagcaagaggcctgggttcgattcctgattgggaaactgaatcccatgtgttgcaagtatcccacatgctgagggaagccaaataaacaaataaatatttaaaaggtatttagtaaagagaatgaaaagatagagtcatccatttaaaaaataactgtggagcatttgctttgtgtatgaacctgttttaagtattgggatgtattaaggaataaattccagtggcaagaaatggagaataaacataaagcaaatatacactgactgtaatttcattagacacaaaatctgagataaaaagtagggctgttagatggagaataaatggtgtgaagaggaaatggggatttattgtcacaaattgttcctccaaaggaaaggagggtacagtggtcgttgtgtcaaactgggtaaacccagatcaattttattggattaatgcttgctagaataagctttagaattagctttgctgaatagcagatggagaaaagcatgttaggacttgcaaaccatcactgtgggatatgggattttgcaaaataactgccagggttttcatagaaattatttcccatattgttgttttagtcactaagttgtatctgactctttcacaatcccgtggactgtagccccatcgggctcctctgtccatggacttttccaggcaagaatattggagtgagttgccatttccttctccaggatatcgtcccaacctagggatcaaacctgcattggcaggtggattctttaccactgagccaccagggaagctatatggccccctggagaacttctgatcggtgtatgacctctcctacttgcttgacctcaaggtcaatgacaaacacttgtaattgctgtctacgggtcccttggttcactgaactgtgtgaggcttggaggcagcttctaggatatctcggtttggatgcagctcaggaagtgatgaagtaaagggaagtggacagcacttcagacgtgacactcgttgaaacttagatgagacatttttagaacaaagaaaaggaagttttactttaccaggggttagtaaatataggagat

SEQ ID NO: 34579 - DNA, 870 bp, Bovine  19866880708873
  misc_feature (1)..(1): n is a, c, g, or t
natgtggcgttctttgagggggccattattctggtcaccctcagtaggatgagcttggtttgggagcaccaggccagaacccagcttcctgcctccctaccgactctgttcaaagtagaattcagtgcgggctgagggctcactctccttggtaagtctcaggggctgctggggttcagaggagccagagaggaaccagccaggccaggcagcagcctcaagcctgaaagcagggcctgagcttctctggaagaaggtgaagcgggtggcctcttctccgcccttgtacaggtcctcgatgttcacatcctgtgggggcaaggcagaggaggctggatgggacagctgactgtcagccctagaggcttctggggcttggccaaagagggaaccaaaaggtgagtctttcgctagggaaattccctctgcaggttctagagggagggatctgggcactgggtgcagagggagatggtagaaatccaaacaagagggacgtgtggaacttgctggaccacaggcaggcagagagatgccagaccaccctggaggtctgtaggggcccccagcacagggtgcgattgctcacctccagctgcagggaaggcccctcccctgtctccacacatgccaggcaacggctacctccctggactcccaagaagatggggaacttggtgcgttccaggcctctgttggggagtatgcagatggtctctgggagggaataagagaagagagccaggtgttgaggggaacccagattgcaagctcttaagcgagcttaagagctcaggtaggaagcttgggtaggaagcttgggtaggaaggaactgggccagggcacagctaccagcccctgcatgcagg

SEQ ID NO: 34580 - DNA, 1449 bp, Bovine  19866880721726
  misc_feature (1)..(1): n is a, c, g, or t
nttatgacacgaagacgttcccctaagggcaagtctggcctgagtgaatcacactttactcccaggaagcccagcgccctaagggcagagctttcccagaagtggttctcaccaggccagtccagcagccaaaacgtccatctgggtcctggctctgaggaggaagctggactgagaggaagaaagttcaggacccattcaaccaccttgtctatgatcctcactagaaatgtaagttgactgagtctctgtctctctctcccactctctttccctctccccacccacagcaccccggcaccttctattgcttctcactgaatgaagggacagaatgacctgaggggtgaggtcacttcttatgaccaacatggcagtcccaccaatcacctgggagagagcaacctgaccgagcagggatagagagtcaagggtcaaaggtggagaccagtctctgtttcctggaggtaagatggcacctcttaggcagaggtgggccaggaactggggagcagagcccaggtctcatgcatctagaattttcttggtttattcccgcccccacccttggtatttagtgttacctcttttaaaatggctcaggtatcttaatcagaacaaaggagggagaaagtgtccaacacgggtctcttcgctgggttccgtcacctttgaaaggagcggcccttcatgtctctaagcaccatgatgggtcaggaagcttaaggaaaacttctgggagaagtggggtggctctttggaatccaagaaaatgctctgagtccagaagccagtgaggggaaggattggggagggagcggaggatgggggagggatgggagagaaagggtgctccactgggcggcccgcagggctcctgtccagagcggagtgaccactgctgggctgagcctgtattagctgattggaggtaaaggacacagaacccgacagctgggggaccaaggggtcataagtcccttctactctcacctaacctctccccccagcttcaaggcaaggttttttccatcttggggaaagaaggagcccagatgtcacctggatcatcctattgagagtgggttctcttttcaccccctgtttgggcacagagcctgtgccctgaggtgttgaaggccacgggaggccaggggagagcctgtccaagggggacagggacagcacgagtgtcacacattcagcccctactcaccataatctggaggctcacagcctagtctcaaatcctaactaccactgaccagccacataactctggtccaaaacttcacctggctccttgcctatgaaagaaggaaataagacggataagttttctcaggaagtttgctagaaaatgggagcaggggcttccccggggctcagggaataacaatccaccgtgcaatgcagaggacaccggttgtttcccggtcccagaagatc

SEQ ID NO: 34581 - DNA, 1139 bp, Bovine  19866880803692
  misc_feature (1)..(1): n is a, c, g, or t
ngaagatcccctggagaagggaatggcaacccactccagtattcttgtctggagaactccatggacagaggatcctggcaggctacagtccacagggttgcaaagagtcagacacgactgaagcaacttaacacacacatatattaacaaaaatcccaagaaaggtattgggattttttaaatatttattcatttatttttggctgtattagttcttggttgtcacatgtgggctctccagttgtggtgtgcaggctcactagctgcaaggcatgtggaatcttagctcccagaccaaggatcaaacccacatatcctacattagaaggcagattcttaaccactggaccaccagggaagtcccagggatattgggactagtactagcatataactttctgcctgtgcacatcatcaattaaccttgatcatttctagaaccaccatgtcaaacatcactctctataaaaacctaatttgaaaaacgggttctctgtgacagttccactgatgctttaaagggagatgttgaaagattttctagccttctaatattagggtgagaaagaaactccacatcagaggttggtgaattctgtaatatctatccactgtattgaagtttgggcagaattgttgtaacacctttatacaatcagacatcctcgttcagtaattaggggagataatcacccggagtttgggtactagacttaagcagtacaaccaataaatcctgagtgaccttgctgagaacttcctctcccagaaaatagaaaactcagttctagccaattcggagaaaatgagtcaagaagtgaaattaagtaagccatagaaggaagtggccaaatcacctttgattatgtaacaaccagcgggtagaatacacaacagaaagtttaggagagatgcattttatcacagattttaggagagaagtattttttagcatcattttttttttaaggcataagattccgggggtagaaaccctaaagggattgttttgacagtgctatagcaaagtcttaaggaaaaaggctaggacagaggaaatcaggcaacacagcagccagagcaggtgagaaagtgaagaggaataaggaagatactcagaaaagagaagagagaactga

SEQ ID NO: 34582 - DNA, 923 bp, Bovine  19866880943152
  misc_feature (1)..(1): n is a, c, g, or t
nttatttactgaccaagaaggttactgagaaccttacaaagagctccagaatcagggtgtagttttctgcagctgctgtaccatccactatcatttccacatccttttagatcttgaagatgctacttagtctactcaggctgtttaaatcctctaatttgtcagtttgaaaactacacattattagattccaataattcatcctgcattgtcagaacccagaatggtaccgagacatcctgctaagaattggcaacggtaaagttgctcttttgagaactaggagggatgtgcttgactcttgttgtctgctgattttgaatatttgatttctcccagtcccattttcagtttctgttccttctaagcattatttggcctcacagatcaagtgagtctgtctatgaggggaggaaagggctggctgcagggattcctgcattttcgttgtggtgatagtctatttctcattgagagttagtctatcagctgcagggttttatagctcagttttatgaatcttgtttttataaatcttagagatggctgcttgcctcacagtgggaacatccacatcctgggtgaagctgggggtcagatcaaggtgagttctccagggtaatgggtgttccctgtgagggctactggtgtttcccagttgatgttgtttagtcactaagttgcgtctgaccgtttgggtccccatggactgtagcctgccaggctccattgtccatgggatttcccaggcaagaatactggagtgagttgccatttcttcctccaggggatcttcttgactcagggatcaaacccaagtctcctacttgtcaggcagattctttaccactgagctacttgggaaaccagtgtttccacagacacacccctaattctctaggccaagctaccatcacagtttt

SEQ ID NO: 34583 - DNA, 744 bp, Bovine  19866880982154
  misc_feature (1)..(1): n is a, c, g, or t
naagacagattaggtaaccgtggatgtagatgtccatcctgtgacctcgaggcgatgggggactgccatttcagacccagaggagctgcttataaagaaaagagtcgctcacccagccgggctgcgggcgcctgtcccacgaaaacgaacggaaacgcctgcacatttccaaaacgagaaaccttgctgttgtcactttcaactctgccgagtgtcgcaatgggatgtcgtaacccattccctccccttttcctctgtgcaatttccccaaaatcgagatttctatttccccttcacccagttcctgggaagaagggcacaatgaaaactcaagcccctcatctgcccgacaggtatcctgaagctttgaaaaactggatgtgagtagaaatgtccccctcttgtaagaagccaagtggcaggattcccagtgcacgtccgagactcaggccactttgtgttctttgaaagaggggcagccttgttggaccttggaccaggggctggcaaatactctgtcagacaaagactagatggcaaacattttaggatttctggggccatacatcattattactcgcctgtcatagttgacaagcaatcttagacaatctgtaatgtgtgcatgtgtgcaggcactaagtcgtgtctgactctttatgaccacacggtctgcagccaaccatgctcctctgtccgggggattctctaggcaagcatactggagcgggttgccatttcttc

SEQ ID NO: 34584 - DNA, 618 bp, Bovine  19866880996285
  misc_feature (1)..(1): n is a, c, g, or t
ncaccccctccctcacccgcttctgccccatccagcccgtccccaaatatctagtcacttttccaaggtctctccacccctccaggctcctcccatagcctggctgaagtcaccagtctccacccactggggaagttccagcacccactggggaggttccgacgggcccactcaggtgaaacgatccttcccatacccttggttcctcctggaggagagaactggacatgggagggacctgcagcaaggtggcctggtctccctgccctagacacagcctccaccagccaggcccatggcactcacctcaccagcacctaacaggtaggtcatgatggcctggcaaggacaaggcaggagttagggcacctagctgggtcggaccaggggcagccaaggccctcagcccacaggacacaccgggcaccacaggagcaagatggaggggaaatggataatttcacagagaccctaggcttccctggtggctcggggtaaagaatctgcctgcagtgcaggagaggcaggtttgatctctgggtcaggaagatcccctggagaaggaaatggcaacccactccagtgttcttgcctggaaatcctgggacagagaagcct

SEQ ID NO: 34585 - DNA, 1024 bp, Bovine  19866881003607
  misc_feature (1)..(1): n is a, c, g, or t
naacaaggtggggaaggcatgaatatttaaaataaaataaacaaaatgttggcatgtgtgtgtgtcttaggctggaaattccttaagggcagggaccatgtctgtttatatagcacccgggcacagtgtcaaattgaggcttaacaaatgaattttgatgaagacgagaaagaagccgcttgcaagaagatacagaggttttagacctcatcctcctagccaaacctcacccaaatcccctttttccagggagtagccttcttcaggctccacccaaatcctcaccccgtttctgatcatccaggctccttcttgtcacccctacctgtccacaccccgcccccgtcaccaaccctgtgtgtgcatgtgtgctgaatcacttcagtcatgtcctactctttgcgaccctatagactgtagccctccaggctcctctgtccttgggattttccaggcatgaatactagagtgggttgccacgccctcctccaggggatcttccagacccggggggctcaaacccacgtcttatatgtttcctgcgttggcaggaggactctttaccactagtgccacctgggaagccctgttctcacccacaaattctccccttcctcacacagagaacctcaacctcacctcactcagggtggcttcaccccaaacacccaggccaccctttcacccagtgtcccagccccgcaggcccatccacggctgggcggcagcacgtggtgctgggaaacaccacctccgaccaagtgtttgaggtgctgtcccctcgcgtgtcttggccccttgggggcctccagccaggcagggacccgacagagggaggggaggggataagctgcttcaaaactccagatgcagcagttaaaaagaggacagaggcaatgatccttcaaattgccacatctgtataatctgccttttattttctgcttcatgaagttttatttcctattatttattcacctccccgccctcccctcccctgcctccgctcttccttagcaggcga

SEQ ID NO: 34586 - DNA, 1580 bp, Bovine  19866881209115
  misc_feature (1)..(1): n is a, c, g, or t
ngaacttgtctgtcttgttaactagatccttaatgtctgaaatagtgtctcacttattttgggaaatagtaaaatttattaaataaacaaaggaatgaatggaatattctatgaataagaggaagactgggaagagagaaagggagagagctgccttggaggggcatctgttgagatgagaggcaagttcctgccccctcatggagaagagtcaggggttgctatcccatagcagaaatagactaccccaagaggatctctcaaacagtagagggagactaggaacttcaccttcagctggatgactgatatacctggagatcctcgggctcaccctggctcctcagccaagacagtgtagggagggagttcttgggaagccttgtatgggttccagccttgaacccaagacactgtacaccccagttggtccaagagcatccagtttatgcccattttcccagggtgatactcgtttgggttttattattttgggtttgggggtgtttttttgcagggggatatttttgttttgttctgggtggggattgttttttgttttgtttgttgtttgttttgttttgactctgctgcatggcttgtgggatcttagttcccctagaccaggagtcaaacccaggctctggcagtgaaagcgctaatcattggacaaccaggggattcctcctgtgtaattcttaatagagctcctttcactctcttaagagttctggccacctcacagctctagggaaattacctacatagggaaaggcagaggagaaataggtctacctttctgtagaaaccatgagaaatgaaagctcagggatttctgtgttgtctatcaccaggaagaaattgaatctctgacatcaacatggccactctaatgctgaaaggcagaagatattaggatgaggtgaggaggtcaaggcaatgcttgtggggcccagaaattcatcaatgtgcttggaaaaatattgtctccataatctttctccaaatctcaggacaagtaaaatcataacagaaagttaaaaaaaaatcacaagatgatatgggttagaaatcaccatattgggcttccttggtggctcagtggataagaatccacctgccagtgcaggggacatgggttcaatccctggtatgggaagatcccacaagccatggagcaactaagcccatgcaccacaactattgagcttgtgctttagggcttggaagatgcaactactgaagcttgtatgccctagagcctgtgctcggcaacaagagaagccactgcaatgagcagtccatgcactgcaactagagaaaagcccacacagctacgaagacccagtgcagccaagattaaataaataaatacatattttaagaaagaaatatccctgtatttacagaggatgctgtttactgacatgatgtgggaagaaatgttatttcataaagggtagaagaaaagataagtctttgttgccactatgctctagatgagtggatgccatgtcagatcatggcctgtgagttgatgggaaaagagcctaagaagctctttccgggataggataggg

SEQ ID NO: 34587 - DNA, 1125 bp, Bovine  19866881284543
  misc_feature (1)..(1): n is a, c, g, or t
ntgatggctgctatggcctatttgttatggtctctggggaggaagagccacagtccttttttaccagtttttttcagctcctaaacttttttcctctgcccccaatctcacactcccacttcaggagggggtgacccttcccaagagtctttttgtgggctgacaaaaacattttaacttttcacattcctgtttttccactgaatgcccagatgcattttattttcccccaatatagggaacccctggctaaagaggttggaatgcagtgatggtccgagacagattgttagatgcaaggtctcacctctgccacttgttctgagccagcttggtcttgtgtgctctgagccatggttcatgatctgcataaagtagaaaggaatagcacccactaggcagggtgatttttctcaggattgagaaaaatcaagtacatcgtacctgagaaggtaattgtgaccatcattgcctcaacctcagtccccctccaccgactataataacatctaccgtgtggcttgcacttcacaactgtccagggactttcatggggactccattcagccccccagtttgcatgatgcttacatatgtgtagctgcgttgaggtcttgtaatacctgtgtgtttggttgctgtagtcctcagtcatgccctaccctttgccacctcatgaactgtagcctgccaggtttgtctgtctatggaattctccagacaaggtcatttgctagttacaggattaactgtctaccagagatggtcaaaggttcattgaatgtagcaactgtgtggactggggtcacatgttaagacatattctgaggccagtgctttgggaaagtgctttgggatccaagagggaaagagacaggtgtttggtatcctggcttttccgtcttgaaggctgcattgcagcatccttcaggtccgctgatcagaaggattcttcagctgttcattgtctcctaagaacacattcatgctgaggttcaggcacttttttcagcggtgaagacctgaggtggagagaggaatgtgtgatctgagcaaagtgctggcacccagactgtctgccacttccttccctgggcaaggagccagaaaagggagcaagttcta

SEQ ID NO: 34588 - DNA, 1302 bp, Bovine  19866881452903
  misc_feature (1)..(1): n is a, c, g, or t
nggttcttttgttaaaaattctttatgaagtacccccgggggttttcattttagacttcactgagcctcccctgacatgagtgggccatcttctccaatgcttcttccaagaagaacttgttcaattaaaggcaagggtacatcacccctcatcatgataccctcccatgaggccacgaaacagcacacacctctgctccccacatgtggatcacacatgtcactaatatgctctgtgaaccggtgtgcaaaaaccaaaatcaaggcttgtgctccgtggttatataacagctctctaaaggcaatcgctttcaacgatttgagctgggttctccaaggagccacagcagtttctggttgcatgccaggcacttatggaagttgcagtcaactctggagaccacaagggcaccattatcctgtagcagcaattactgactaaatggcactctggttctacaccttctgagggagcttcctgcttctagtcagggtagagttacttagagcctggtttcatgaaatttaacaaaatgcctgatttctaggaaatgtaagaaaagtttaaaatgttttgtggacatgttgatctgatataaaacacctcctcaaaatcctggtggtgttagtcatgtccaacattctgcgaccctatggactgtagctcaccaggctctctcagcacggaattctccaggcaagaatactgcagttggttgcccttcccttctccaggggctcttcctgacctagggattgaacccaagtctcctgtattgcagacagattctttgtcatctgagccaccagggaggtgaaagttgcttagttgtgtctgactgtttgtgaccctccaggccagagtactggagtgggtagttgctgctcccttctccaggggatcttcccaacccagggattgaacccaggtctcccgcattgcaggcagattctttaccagctgagccacaagggaagcaagccaccagggaagccccacctcaaaatcctatagctctccaaaatctaacaattcagtgaaaaacaaacaaacctataaatcagacatttcagtaatgttaccccaaatgccttaaacatctcaaggatgattggatttcttattggggtgggatttgaattggggtgcagaggacacaattcctcaggacttggacaagtttgagctcttgttctgcaatcaccagcttagtagctttagtctccttgacctctctgagccttggttttctcacctgtgtaacaggcataatagatcttctttacaaggctgatgcaagg

SEQ ID NO: 34589 - DNA, 795 bp, Bovine  19866882008118
  misc_feature (1)..(1): n is a, c, g, or t
ntttgggggctatgctacatgacatgtgggatcttagttccctgaccagggatcaaacctatgccccctgcagtggaagcatggagtcttcaccactgaatcatcagggaagtcccaggaagagaaatttaagagcgtatagtttctgaggtggcaggaactcagctgatgaggagcagcctgaaggcctggacttttttggtgacgaggtagaaagttccttcctcatacagaaagaccaagtggctgatgagtgggtgggtgtggagggacaggtttgggaaataggttcaggtagagactgcagagttcgtctagatgagtttttgttatcctaatcttagtaaatggaatctaaggcttcctgagagtggagagtggctgggaggaggaagggtctctggggtttaggccctgagaaactagggatcccctgcccaggtgtctctcaggggctctgctagggtcactccaaaggtaagagtctcttagccctgccagacagtatcggctgagagaatcttattatagcatttacttccttttctttcgatgaaagtttaaaggtcaccatttgctcttgcaaaggaagttccacaaatattccatgtgcagctttagaaataaacagcaggacatcaagttcattgcaaactccctgttctgggggaattcccaaggaagtggaggcagagttctgggagagacaagacgaattcagagtgattactcagtagctgcagcagggaccagaatttccctgcacgtttcccaggttctcatttgccaactcag

SEQ ID NO: 34590 - DNA, 1909 bp, Bovine  19866880411335
  misc_feature (1)..(1): n is a, c, g, or t
ntatatatgcacaagcagaaagaacatcaagtctcttactctttgtgaatgctcgtgtctcatattttaataaaatttattttaataaaatgcacacatgtgtacccaagaaaaacagagcagcactctggctttgatagtggaagaggatcgggaatgaagaagcagggggacaagaagccagcagagaactgtcattctctcactccgaggcgccctgaataccacctttagcaaataaacacatgcaggaggtcctaaagtcttggaagaaagaaaacctatgtcggaatttaaatccaacacctactgtatctcaggctctgtgacagtaaaagaaccttacagaaaatatatatactccacccagtaaactaccgtaagatttaattctctgctcttcctatattgaactacattcaaacatgtagaagagatactatgatacatgcataaccatatgtttcatgagtctgattttagctgatgattcactgatataagttccatttttaaaggaattcttaaagggacttttaaacatttttaaagcaatgttttctttctatcctctgatctcatggcaacttatatatctagatgtgatgagagcatctgtgaagcccttttgctattcaaaaacaatggactcactggaattctcattctctcaatttcaagcaaatacagtcctagttatgtctcaatttggttcagatctgaatatgccaaaaaggcctattaattaaggaaactgataatttcatgtttttgtatgtgtcatatacacaaagctgacatgaccagagagttttcctaatcaaaagttatacattttaatgtatgatggggaggggtggggtagaatctttatctttgcaattatagagattattctaaatacaccagaatgatcaaaattaaaaatacaaataagaagttaaaaaaaaaaagacatggttcactttttactagtcaacagatagtgacgctgaaagtactgaagagtttctagtttttaaagcccagagtaagaaaaagaagcaaaggggaaatgtgggtggggtgggggatggtatctccccaatatatgtaaatgcaactcctaaaagaagataaaagtaactcatgaaggatcagccataaatttgactgattttaagtttgtcagctggagggaactattataacaccaataaatagagctgtagacagctggccatgtgtaataccatgcccctttgcctaaatgtttaaaccattgatttacttgggattaaaaaaaaaatgaaatctcaaattcagctatccccaacacacaaagcaaattccagaatcttgaagactttcattgtctctgaaagtcattgtcaccaccctaatcccctcattaaagctaaagaaaggccgagatggcattaaaatgaatgcagaccatttgcagcaatctcctgctcacaccacctccaaatgaaggcaggcacattgcataatccaggcagcaagagctcctgacaggtggatgatttatgctcatagtcagaagaatcggagggcctgcggaggagacagcatgagttaggcggtggcgagacagatgctctcagtgggcttgcgggggctggcaggctccagctagttcaggtgcaacctggacactttaagtgctgaactcctattgcctagattccaacactctgatgtgccatttgcaatatgatacgcaatgtacactgtgaataaactgtcaactgcaggcaagcactgtatacaccgcacgtaccccttccgagcatagatgttatgggacacgtgccccagcacataaaagaacggaaacccatttttttttttttctggtggtattggcaaatgattcttctagtacagatgtacacgttatgaagtg

SEQ ID NO: 34591 - DNA, 1866 bp, Bovine  19866880703366
  misc_feature (1)..(1): n is a, c, g, or t
ncactgaaaatatagtcatgaataaaaaataagcttttctgcccttagaaacttttacattctagtttatattagttgacattctagtgaatggttttagaaaattattaaatttctttcctattcctcagttttctcagctgtaataaaagagaggcaattgcaactactgcttccgggctagttggagagattcagtcagcttatacatatgaagcacttgggcctgacaccataaggtttaactgttcttagtacacagagagcattgcctagataaccacatctgtggacattttactgttgaggttcgaaagggaactaattttgtctcacttttttttttttgctagagcaagtagtgaatgaaaggaattccctgatagagatgagctctttttgtatcagctgttcacagatttattcactcattcatacattaatttgtttattcattctctcacctaagatacatttattgaacaaaatttcaggcgttatgctgagactcactagatagtaaaatctgattcctgcttaaggaagctcagaatctagcaaggacaacagagaagtatatgcactattgtaatattctatgataattgcagtgattttaagaatatagacaagattctattttctctgcaagtgcttatcgaaataaggctgtacccatagttgttctttgcacttctaatactttagcctgtatagtatgtactagagtacttttttttttaaagaaagatttgtttcatttatttaccataattggagaattaactgcttcttgtaaattttccagatgtgatcttttaaaatgaacatgaaaagaagttttcatctgttttttgaagccattctaaaataaaacaaatcacttactttgttctgtcactgacgacaagttgattttggtaacttgtggtcatcataatgaactttagctttcaaagggcattgaatctgttggacttttggatctgttgaactcttccatgagtaacttttgagaagatctcatcccctctcccaccttcccatgccctttatgtatctttgattaagaggacattttctcttccttccttcaaagatacatagtggtcatttgatattgctggataattggctgaagaaatatatagtttgtatagttagatttttgaaaaatgtgactatatgtatcttgtattttttctgtaaattaggatcagatttgaaatactggaaataagacatcaagcttgagactgacaacagtagagttgataaaggtacttttggacctgtggaagatttttgaaagattgtctttgctagtctataatagtaacaaaaaaacactattctagtttaatgatcaagaagagagaaatgtcattgtgtaatattaatacgtaatgtagtaaaataaatttcatcactgttttctatatccaatgatgattctatgatttgtctacctgaatatgtcaatgaacttgactgcaacttagtggaattaactagtagcctttaagaagctatcaaaatgaaagcagttaaatgaatcagttgataaaggtcctcatcctgataagccattgtctaatcttataatttgtacatccagggacatatcagggggaatccagttgttacagaacaaactgaaacataattgaaagtgacaaatgatcagctgcagattgggacattaaatagaaaaccacttggttcagaacctgcgtaaaatatggtatacacctatttctagattttaaatgaaacttcaaaagtcattgatagcaaagatagaagtaatttgaaaattcaaacctttattcataatgcacttaattagtatttcttccatttttt

SEQ ID NO: 34592 - DNA, 2521 bp, Bovine  19866881024733
  misc_feature (1)..(1): n is a, c, g, or t
ntgagtgaatttatctttgatttaattaacagaagtttggaatggttttggataaaatcattattcctgaaatttagaaagtatctggaaatgtagagaaaaagatttgtgctgttgggataaccaaattactaacagaatgtcccccaatgatggacacagagtacaccaaactgtggtaagtactccattctggagtttggggaaattagtttccttcccctgtgatggcaaaattaaccaagcttattctcttgggggccaagagaatgggttttgaccttagcctcctctgtagctaccatcaaatccaagacatgacttgtggattcttcggggcctagaaagattttgtttcctgattatttttatttcttttggccatgcttagcagcatgtaagatcctagttcccccaaccagtgatcaaaattgtgccccctgcggtggaagcacagttgtaaccactggaccgccagggaagtttgtgggggattcatggaccccttagagagactgctgagagtgcctggtctacacagtcactccgttaaactggcctaagtctttagaaggagacactgagtaggcagaagatcctacgtgtgtgcttgatgttggcctccatgacgacctagctttcttgacctcttgcttctcccttacggtttcagtcatgatctgacaactggaagcttatttcttctaacttaaaaccattgaatctcaatttgacttcacacacatggcctcctaagtagcctgggtcacacagccagcacagagttctgggcaaaggacatcagcatgctgtggcccaaagaattgaggaatgctttccagttagacaaaatcactggtgtccatcttaatctcaaggatcccttcctcctcctgagaccacgcgtctatagttttgtgtctctgaagacattgctcctttattaataatttaaatcttctaagagcttacttaaatcttgtcattttccaatccaggactcctttattacagtctctgattggcctattcgagttacccgaggatgataccattcctgacgaagaacattttattgatatagaagataccccaggataccagactgccttctcacagttggcatttgctgggaaaaaggagcacgaccctgttggtcagatggtgaacaaccccaaaatccacctggctcagtcactgcacaagctgtccactgcctgtccaggaagggtaccgtgtgtctgttacctcggagaactctagtcttctctgaatcactctggcttggttcccaggcccccatgggacggcgctgagggtagctgctctggtgcctgtcttccttgctcagcacagtcaccctcaggcagttgcattcaaggtctctttaagtgataagactctttttttcctttatgatgatgttcaagtaactttaggagtaaagacaaaatggaggataaaacccttgactagaaatgtatttatttcccagaatgaaataatcctgccatttttaaaatggaggtattaatgtttttaagtgcaacatattcagaaataacgaaccatagagtaaatctaataataatggctttatattgggttagccagaaacagtcttagaaattttgtcagaaaatctatatttttgattgttttattatggaaaatttagaacataacttagaaactgtaataaatacttatatttattacagacctttactaagtaattggagagcaagccttaggcatcatgtattcaccatgagtacttcattaggtttcggtaaccaacgggacatgatttaagcaaccataacaccactaccacactgaacaatagaacagtaattcctgtgggcccacgttttagacctgtcatctgtttcccatctgtaggtcccctcaatggtgagcaccagcctcaatgcagaagcgctccagtatctccaggggtaccttcaggcggctagtgtgacgctgctttgaactgccttttttgaattgtcttagtccagaatggtttctgaggacatcatgtagacatctgagcacagctgcattaaaacaaaaggtgttcgttttgaacttgtctattaaatgttgttttaagctgaaccttgagcagattagtttgtgtgatcataaatataagtgagtgactttttcagtttgcagctacaaagacaagtattactactagcttagtgtatgacattgattggagcatttgcactgttttggcaattctaaagttttgacggacactgactgtggagacattttttctgttaccaagtccttttgtttcgaggctgctgccgttcgtgtttgtcctgtcctttgtggttttgtccgtttccttaagcttttactggaaatgtgaataagcaaagaaatcacttgtgtaacttgccaagaaatgcacatttcatagttttaaatctgtaatgagcaataaaaaagaaaaagccctaaaatatgtatctaagaacatcttaaggacaggtttttg

SEQ ID NO: 34593 - DNA, 1485 bp, Bovine  19866881106284
  misc_feature (1)..(1): n is a, c, g, or t
nttgggtgggtttgcagggtgtgtatggaaggttagatgatgacagaattatttttaagaaaagatatttctactttctaacctgggttaaataaacataacccttaagctggaggggggaggtggcaggcaaagtgatgagcacaaattccccatccataaaaaacatctggcacaaggaaaacagtagcaagtccagatggtacccggctctgacacaagccaggggatgctctacggacagagacaccatagagattgtgtgtgtgaggaagcacaaaatacagtcttacagaattaaaaccggaaaccttcatggctggtagcaggagagaatgagagcttagtcaatattctaacaatgacgactttgtaaaaccttttcttaatactttatgtctacacctctgctttacactgtactataaggtacatggcagttttacactgggcaatcacactgggagggggcaaatgctgcccagtattgaaaaaaccaattggaaagcgaacatgcatggcacccagttggtgtggatgccgtctaatatggtctcaggtcagcaattggcctcttgttgttatcattccgcatgtatttggtgcacagctttgttaagatcagctgaaccggctatagaaaacaaacatgtttatcaaaggggaaatggtagaggggataaattaggaagttgggatgaacagatatactactgtttataaaatagataaccaacgaggacctattaacatagcagagggaactatatgcactattttgtaataacctataagggaaaagaattctaaaaagagcactgtactgtccaactgaaactaacaacacattataaatcaactatacttcagcagaataaaacaaaatttaagaaaagagatctctgaagcaattgattcctacttgcttcactctctcctcagaaaagctaaaggttattttctcagttcaaatatttctcattccgggaggcatcttcaagtgagagtctggttaagggctctcattccaccctccttagcagccaggactttctgtaagaactcatcgcagtagtggtcattggctcaaagcaggttcctcctctaagcctgaattacacaaatgctgggaatacaaccatttttcccatttagccagttcatgactgactccacatcttcacgtcttgtgtctgtgtaacagtccctgttctaagcacccacacagtgatgaacaaaacagacaaaacccctgtttattggagttcatttctatgaggggagacaagcaacatgcatgaaataaattagcaagactctcaaaagaaaaatgtttgatggtgctgacagctctggaggaaaatccaggaggcaaagagagaaggggagagtgagataggagagggctttttcagttttaaataaagtgactggaaaagcctcactgagactttgagatctaaagaaggtgagggagcaaaagca

SEQ ID NO: 34594 - DNA, 1571 bp, Bovine  19866881187807
  misc_feature (1)..(1): n is a, c, g, or t
ntactgcaggcagattctagagtgggtatcctatcccttctccgggggtcttcctgacccaggaattgaaccagggttgcttgcattgcaggcagattctttaccagctgagctatcagggaagcactttatacatttgtttaaatgttctgtttgaagttgtttctgatacttatgaaaccgctatatctgccttgtaaaattgctttgccgaatttgtaagtactagagaatgtagaacaaaggaactgagtacttgtattgatgtatagaaaaatctcaagagactggactactagacttcgagacaaaaagagtaagtaatttgaagtattgttgtatatttctgtttccagtgaataaaacattgtgtggacttggactatatttattgaagtatttcttcatcttgagaataggtaggaaatctttcttaggtgttttttaaggcatgcatatttccattctcctcagaaagttcaaggaaaattcagcctgagatatcctctgaagtttgtttcctgagttatgatttgatgatataatattacatcattttatgaatacgttgatcttattcacttgcagaagaagaatgtttattcatttttcttcaagggaaatgtacattagtatggtgaatttccaatgacagaactagttcttgtaaatttgagaggcattgctcttgagatgaagcgatgatcttatgtccattaacaatatacgcattcttttagttagtctatatgatccagagatgcctgaatataggatgctgtaacactgaaacactttcttggggagatttatggccactagtctgacaatcatttagatcacttttgtctaaaattctgaaaagcagcattgctaataaagatttcctcagataaacatttcactggacggtcactgctggccctatgccacacatgatgtcaagtgaaaagtatgaatgagatttaaagaagaaggcatgccattctgtgttttaagtgagtgaaaaaggtgcccgcctcctccatttgcccttagaggggtctgagagaagtctgatctctcaacttagacctggtttactctctacttacacctggcttgctgatgttggcctatctgaaatgtctggaaaggcattatgtgggagaatgcttataaatagaatgactgattttgctctgtatcagtatattgcccttaatggaaaaattaaatatatctgcctgaaattggcattcttctttgactcttggcagtggccatatgatctgaagccattgaagcattttagggtgccagaatctgtactggtgagtcacaggaaaccattgacaaatgggtttggccccagtcccttctcctaaaacagcagcagataaaatgattttcttaattctttccatggatgaacgggagaccctatctataactcattgttttcaatacattattgttcactcatagtgatgtcagcttaacaatcttaatgttaatcttaaagttaatgttgcctttcttttaatcaaaaataggcacaataaagtattatattttaacaaatatcttga

SEQ ID NO: 34595 - DNA, 1553 bp, Bovine  19866881206757
  misc_feature (1)..(1): n is a, c, g, or t
ncccaagttcttttggtgaagatttgggggagaagaatccttttatgattccagaagtagatgaggaaatgtaactattttgaaatgcaccagggcatgtcatacttctaacaagaccttccctcaaaagaaactgttttgccagaacctattggagttttattaaagtctagctgaacatggagaaaaagaattacgtctcctctaaacaatcctgtcccacctaatgatggagttggagaagaaaggggcaagtcagggaataaacagagagtacttgtgaagttcacatccccatggtagagactcactgaaagactaaaatctgagcataggaatatatggcgattcctttcccctacacctgaacactgtaactaaaggtctatttactgatttccttttactgagtgcatcatgtctggctttcaacaaaaaattacaaagcacactaaaaggcaaaaatcaaagattaaagagacagtgaaaacattagaaccaaactcagatataacaagtattttaaaattatcagactaaaaatttaaaacaactgttattaatgtgctaaccgtgttctttccatttcttttctaatgggaaagaataaccaacatgcaagaacaaatgggcaacataagcagaaaggcggaaatcctaagaatcaaatagggatgctacagattaaagagaaaagaatacaacaagggttttatataatattgtagtcttaggaatcattaaaacagtgttttttgtaaagcaagttaaaacagcatttcaaagatacattgataagctatgtttgaggacaaagtaccatagatactaattaaacagtttaaataagtgtcaaattaccagattctgagagctatgactgaaacatgcttgaaaatgatggaaagagtagtaatttatgaagttgaaattgctaatacaataacaaatattgaacagtttcaaagtagttgtaaactatgtcataatttttcatttatatatttatcctttcaagattatagatcgtattttcagagtgaatgctaatatgtcagaatatatcagtctttcatatgcagaatttacaacttaaggaaaatataaggttttgtagataaaatagaaggaacaaaaacatgagaacagcatgaaaaacatgaagcaaaaaatatgtaaaagtttgatcaaaattgtttcagtaaaagattttacttcatagaacagaatgtgaggcatgaaataaactcatctctaaaacaataatgatgaagtttctgcccagtgtcattataaggattcctactttaatctaaattaatcttcaccatcacattatgagtaatggctaatggggtgcctactgtaattcattttattttacaaatgagtaaacagaggtttagagagttgatatcctgtctgctgctgctgctaagtcacttcagtagtgtccgactctgtgcgaccccatagacggcagcccaccaggctcccctgtcccggaattctccaggcaagaacacggaatgggtgccatttccttctccaag

SEQ ID NO: 34596 - DNA, 1107 bp, Bovine  19866881299339
  misc_feature (1)..(1): n is a, c, g, or t
nagtagaggaaaaagaaggacaagtaaaagaaaaggcgttttcaaaagatacgcctgtgtatatgtacaaaaatctactttaaaaatgcataaaagggaagatttttttaaattttgttttaattttttcttattatttttctctaattagctttgttgataatttttatactcaggaaaaaaatagaatattcatgaaagatgacatgcagccagagaactacgttataggtgtctgaaggtacatagtgatagaatgctttaatgaatttagaagctccacattgtccatctctaaatcactttcacattttacctaatttttattttgttttctcatgttccgagtacagacacaacgtgtatggattattattacttgtggaaatgcagtgtcgagtacacatttgcctaaatcatcttatgaaagatttctaaaaatgtttaccatcattttcaatgggataaaaaaggatacacactaaaaaaagctgtcaacaatgtcagaattataaactgtaaaattaaattcaaggacgtttttaaaacattcatgcaatttcaatccttaataatattagggagcatacaaggaaattaggcagtagttcaagtctcattttataacttaggaaccaagccagccccaaatggcctgagtgactgtgttgtgtgctttgagttctggaagggaattttttcctttggcagttgtcatttgaaactcaatccaatcttgtaagatatggcatatttgctttattcttccataagaaatgttgtaattcttcctcttgtggatgccaagatcttgaaaatggcatgaagtaatgctctgagtcactagatcctaaaactactgatgctaaaattaagacatatagaccatctaaatgacattgataatattaccattattaggaaaaatggaggagtcattataattgaagaatccttaatatagagtcctgggatccctaagcctactgtagatgatagatgagttttaggacatccatataaagctttcaattgtatatagaaatgtgtctgtgtatttttgtttatgtatcatgaagggggagacgtttcagtacccaaaaagta

SEQ ID NO: 34597 - DNA, 1518 bp, Bovine  19866881340079
  misc_feature (1)..(1): n is a, c, g, or t
naaaaagagcagttctaatctaatacagaggaagggaaaaaaatgcatgggtaaataaagtttcagggatcaatagatgaagaataggagtttcataatcatagtttgttcatgaaatatattcttttgatttatgtattcaatctgaaaaagggaaactattgatggttctggagaaaaataaaatgcaatttaaccaacatttgttagaatagataaaccaactctctcaattaatctctggagtgtatgcccatgtgcacactttataaaggtatttccatgtctctattgattgagggaacataaactgtccttgcaacctcatggaagcttcttcattcatttcaggaagctctgtgtactgggattctcctgggagcaccacctcaactcctaccacaagagaatttcaatccatatggttcctttaatactttttattgctttaaactgtaattatttacatgtatatgaaagccttctgtttgtgtctagtcagtcaaatatcacccaagttaggggaatagtttgtcacttgaaatgaattaaagatcaatagaatttaacaaagcttttcagaatattcagttaaaaatgatgataataaaagctgtgattattgagcctagttagttgtactggattaaaaatgcagccttgccaaggttaaatttcctgcctgaatttaaaatctcaagtttccctgacctttacctaaaaaataataaattgctatgaccctagatcactgtaaagatacaagaagtacttgtatcagaagtacgaggagtatcagaattctctaaatgtccccttgacaaaaaccaagaactgaaaaggcatatttgcaaagtaaatataaattaattttcatacatgtttgtacatatttgtaatgtcagtgtttataatgcttcacatatttacatgatttgcacaaataattaaaatcaatatatttttatgattatactctcagtgatacaggtggcttaatgcataacataaatcattttatgttatgttctcaatatctctatggtttataacagtcaggaaagaccatggtgggcgaaagaaagaatattctacttaaccttccctggttacctgatccatgacatacagaaccaagcccagtaacaatatagtaaaaataagaaggaagaatttttaccacttgattagaaaaaggtaaaacaatccaagtaaaaattaatttttctctttgcatgggactttaaaatatcatatttagtaaaaaggcaaagttcaattcttgatatcttacttaaaaattgtgcaaccctaggaaagtgatgtagctccttgaaatgttagatacccacgacaattgggaacaaagataaacccagcctatttgacttctaccgtaaatgtgacatgtaaagaaaaaaatgtctgatgaagtagtgatactttacagtctgctgtgatggagcttacagtttattagaaagaaaagacaaataatcacgccaatgaaagccaagt

SEQ ID NO: 34598 - DNA, 1533 bp, Bovine  19866881430329
  misc_feature (1)..(1): n is a, c, g, or t
ncaaagactataatttggcatcctgagggccattgattagctaaaaattggtgtgaacatgtaatcattgggtaattttatgtaaagatccagattgctggctgcttttggaattggaaactgataatgctggccttccattcggatgcgcctgcatccccacaaggcaacatcatagaggtgctggcagggactgtgtacatggtgggaccagaggtctctgggtcaccacagcacgtcctccttattttttttaaacacacaatccattttgcttcttcactttacatcaggagtccctgtagttgtttgaatttgcaactcctgatataaacatcaatattaactcatgtaacatgggttttctttgaatggaaaaatcttgcaaataaataaatgccacagtcattagacctgccagatcattatcaagaaggtaaagaaattgaactgtatattattgatttagaatttgtgtatatttacctatttctaggtaggggttcccaggtggctcagtggtaaagaatctgcctgcaatgcaggagatgcaagagacgcaggtttgatccctgggtcgggaagatcccctggaaaaggaaatggcaactcattccatactcttgcctgggaaatcccatggagagaggaggctggtgggctacattccatgaagtcgcaaagaatcagattccactgagcaagcacacacacatctatttctttatgtatttatgtatatatgtagatatccatgatatataactataatttctgtgtatatatgtgtgtgtgtgtgtgtgtgttactcgttcagttgtgtccagttctttgcgaccgcacagattgtagcctgccaggctcctctgttcttggaattttccaggcaagaatactagagtggattaccattcccttctccaagggatcttctcaacccagggatcaaacctgggtctcctgcatcgcaggcaaggtttttactgactgagtcaccagggaagccctaaaaggatgactatagatgtttagatgaaacattactcattgtagcatatttactgaaacctgatcctatttagccaaatgcctttttattttgaaactccagatgaaattcacttaagtaccagaataggtattagctgctcattggtcgttttcttaatctccattattaggtcatattgtcctctccttagcataatctagtctctgtgtagtacagtgctcacaaatctgaagctgtttctaattttccatccttcagtctgcacaggcatatgcaacaggcattgatcttttcctaatgcagtaataagctaggagcgcttttcaaacatgggcacattatttgctgtattattgtcaagaacaaaaggaaatgcatttggccaaggtcagtgaaaggggaaggctgaggcctgtgccagaaaaccttctgctcttctggttcattaatgctatccatttggctctggtcttccgatttaagatagaaggatgttgatgtttcccactgccaaggcagtt

SEQ ID NO: 34599 - DNA, 3906 bp, Bovine  19866880233801
  misc_feature (1)..(1): n is a, c, g, or t
ngagaacaagcatatttgttggtgatgtaggcgggcgtgaaggggagcgttctttgacctccccagcatcttgtgtaggggggaggttgggggcaacagaagaggcagtaggtggggcgcaagcccccgttttttccctcagagaagactctgacctgataccctccgtcacggcccttgtgctcgtttgttaaataggatgaaaatttacatttcttactgctcccgaggttgaaacgcttttgcatgtttgttggccactgtgtttcttcacccataacttgctggcccatatgcattgtccggttgcccactgtggattttgtattctcattacttgaacaagcatttattatattcaagataataaccatgcaagtcacctaatctccctagagcttcaatcccttatcaattaaatgagaaagtgagactagctcatctctaattctgcctccactcttaagattaggttgcacttagatttgaacatctataaatcacattttcataaagtcaggcatgagtaccttgatggttgagtgtagagaaaaaaggcgccctggagaaaggttttttgtgttttgagactatgttaatggataggtttttatgagtcaaacaatacatctaagttgggaaaggtcggtgttttatcgtgaaagaaagtgaagtgctagtcactcagtcgtgtccgactctttgtgaccccatggactgtagcccaccaggctcctctgtctatggaattctccaggcaagaatactggagtgggttgccatccccttctccaggggatcttcctgacccagggatcgaacctgggtctcctgcatggcagacagattctttacccactgagttacgagggaagcctttctttccctatgctgcctgccaagttgcttcagtcgtgtccgactctgtgcaaccccatggactgcagcctaccaggcttctccgtccatgggattctccaggcaagagcactggagtgggttgccatttccttctccaatgcatgaaagtggaaagtgatagtgaagtcactcagtcgtgtctaactcttagcgaccccatggactgcagcctaccaggctcctccatccatgggattttctgggcaacagtactggagtggggtgccattgccttctcccttctttccctataacactgtccatatctgtagcccaaaatgctcagtgtaggatccagcagacaaagttcctatttactgagtgcttgttggagcagcattgtaaccactttacatgcattaactcatctatattcacacctgaatgaggtagggacagtttttattcccattttaaagctaggtagtgaaacagaggtgctgagaaattgacacactttgaaaggtcacacccttggtaaaggctggagctggcactggaaccctgcgtttggatctggaccccagatccttaactattgaactatgtgctaaatgaccgctttaacaagctctgtggggagtggaggaggctcctggctgtagtgacagtcccagtccatttctcccacgagtggtgaagaattgaatggcttcttcatccactgcatcccctggggggcccagtggcattccaggggtccactgtttactctgcttcatgtccgcagttcttagaattcttctaagacctatgactgtctgtttagccagccagcctttaatgagtaattgtgtgtgtgtgtactaagtcacttcaatcggatctgactctgtgaccccatggactatagcccaccaggctcctctgtccatgggattttccaggcaagaatcttggagtgagttgccatgtcctcctccaagggatcttcccaagctagtaatcaaactcccatcttttctgtctcctgtactggtaggcaggtttaccactagctccatgtgggaagtccttgtgctgtgctgtgcttagacgctcagtcgtgtctgactgtttgcaaccccatggactgtacccttccagatcctctttcctggggattctcttccaagcaagaatactggagtgtgtcaccatgccgtcctccagggaaccttcccacccttaccatccaccaaaaaagtaatgctgctgctgcttctgctaagtcgcttcagtcatgtctgactctgtgggaccccatagaaggcagcccaccatgatcccccatccctgggattcttcaggcaagaacactggagtgggttgccatttccttctccaaaaaagtaatccggaaggttgcaaataagaaaagagttaatgggacttccctggcagtccaggggttaagactctgaccagagaacatggatttgaaccctgattgagaaagtaagatcccacatgcctcacagcaaaatattaaaacaaaaaagagagagagagagtttatttggagtcctaagaattgcaatgcaggagacataaaagttgccatgtggttgttaaaagtttcctggtggaatcattatagactccaaagcgactcagaaaatactttttcttaaggaatcacaagttgtttcagcctaaggagtccaaaaagcatcttgaatctctgacaggagttctggatgacttcatcaggtcaaaaggtcaaattcccatccaagctgaaatgtgcatgtcacattattttttttattggcgtagacttatttacaatgttggattagtttcaggtgtacagcaaagtgaaccagttatacatatatccttttttttagactgttttcccatatacgtcattatagagtagtgttccctgtcctatacagtaggtcttcattagttatctgtttcatagacggtgtgtatttgtcaaccccaatctcccagtttatccccccaccctccctttccccctggaaggtcatgctttcttaaaggcctcctgcccagctcccctttggaaagctcacttagtaatactgatgttgcttagttgctaagtcgtgtcctgctctttgtgacaccgtgaactgtagcccactggggtccttggtccatgggtttttccaggcaagaatactggtgtgggttgccatttccttctccagggaatattctcagggccagggatcaaacccacatctcctgcgatggcaggtgattctttaccactgagccacctgggaagccctcgcttggcaacactgactcccttttgattttcctttcacgctgggaaatgccaaacacaaactatggaaacacagtgcctgcctgcaaagagttctcgtcttgtggggaagatcatatgcaaatgcaagcaaaaacaaaactgtagagaattctgtgagtgactaattagcatgtgaatggcaccaaatttttgtctagtcagggaagacttcctggaggaggagagtcttccacttgagccttcaagggtgagtaagacttggagtggggaagaggtcagcgtatagtcttggcctgagtggggagccttaatgggaatagggaggtcggctagactggttgaaagctcctggaagggaacaaaagggaataaagctggaagagtgggttggggacaagttgtggaggtttctgaggacccagaggagagcctttaagtgtactttatgcactggtgtcttatgaaggctcagagctagggtaggggggcaggaaaggagtggcgagacaaagacagctcttagggaagattaacatgaggcagcctgttaagctgcagaaagagtgagagtgaatcgaagggtgccggggaccagccctggctgatccagggtattcgaaggagagatggcataagcgacctatttatttaaatatttatcaaagatataaagagtaatagaatgaggatagctcagtgaggaagttcagggagaaaagaggctaaataaggat

SEQ ID NO: 34600 - DNA, 1686 bp, Bovine  19866880411857
  misc_feature (1)..(1): n is a, c, g, or t
ntgcagcttcccccacccctcttccaatggatagcctgttttctgccacccaggcctggatgtgacctgacaagcagaagagcaggcatggaaaaacccatatgtcaatccatgcccagcctgtcttgcacaatcctaggagcatctttctaaattctgtgccttaggtgactcattcacctctccctagttccagccttgcagtatgagagcacctattagggcatcagctctgtaatagatattggggtacaaaaatcaataaaatgaggccttccttccgtggacagacagctagagagaccaacaggaaacacagtgattttagttggccatgaaattgtttcagtggggacaagggaagtcccctggggcaacaggggaggcatctgatctacctggggaaactggtaagccttccctgaggagaggtggccttggagttgagacttaaaaggttaggggagggagaagtttgaagaggaaaagagaggggaggaaggggcattccatgcagaagagaccgcatggacgcagatacagaggctagagagaatgagtgtttaaaaatccactcatagctcagtaggagcgagatgaaaattacatgggctgggtgctagtggggagggaatgggaagtgaccagagagccaaagcatgacagagcctgtattccatgcaaagtggtaagaatttctgtcctgaaaaccgtggggacctgctgaagaattttgagcaggaaagtgacatgatcagaattgcattgttagaaatagcactctgatagaaatgtggggagtggactgaagggttgggagagcaaggactgagtgagtggctaggagggggttgccagggttcaggtgtgcgtgctgagggcccgcgatgaaaggagtcctgcctcgctgtgctcacttcttcccctggcccctgggaggaaaaatggcttcctgccctccccgcgtctgggcgggcagccagggcgactgcactgattgaggcgagagcgagcgtctccaggagcacaggggtgggaaccagaggggctctaacccgggaccctctggcagaagcagagtctccctgggctgagaacagatccctccttctgagctgggtctggagcggaggaggaacacttggtccacaggaggaggagccccgaggctacactgggaactttttcccagcactgagcccctgtactcacaggtgagaggtaccagatggaaggggtgtgtggggatggctccctttccccctggttccagagccccttctccacatttctgtgacaatatctttacattgctttcttcatccttgcttcccagcacctccaggggggctagagaaggtagctaattaccttgctataaataccagccaggaggagctctgagggccccagacctggcttctctttctcagtgccttgctggtgggttgggcagtcctggatggggacactctacacagtaatccaccatatatttctaggatatgcccaccttcccctaatgaatggaaacaggcagagtgggaagaagttagcaaccacatcacagacatccacaaagtaccaggcacagtgctaggctccaggaatttgggggtgtatcagagcctgtctctgctttcaaggaactcccctgtttagagggaaagataggcctgcaacaaa

SEQ ID NO: 34601 - DNA, 851 bp, Bovine  19866880424291
  misc_feature (1)..(1): n is a, c, g, or t
ntaaaatccctaatgtatgtgtttatttgaacagagaaagccaatgactgcttgatacagatggaatacataagagacaggatgactggggtatgtgatagaaccagcacattcttctcatatgcttggcagtagattctagaggatggtgagcatttggaaagcctgggtatcagtcaactcagaggtttgatactctggacaatttcctttctcttgccaacatgtgccccttttcactactctcttactacccctaattgtgccgggcagaatccaactcaaattcttttctctgcatggcacaaaggcgtgggccatagcagcaccaggaagctgctcctggggactatcaaagtgtgggaagagtaaatatgaggatctggaggactccctgactggggaattgggagactggttattcatatggttaagattgagcctggaggatgcaattggcagaatacagagaggagcaaggagggaacacttcataagtcctcactctcccctgggacctgggcaaaaccggcgtgttgcaaactgaagaagatttcaatacgtggatctaaacctggaggagtgttaagtgttcattgtgaaggaatctaatcccactcattgctgcttgatgctataaactttacatttgggactcttctaaaaaaccaagtgctgagggtggtggaagtgggctgatgacattctaatacggagctatggagatgtatgttacagaaaccagagtgtcagactgggaggagaaggtaagatgattgaagaatacaacagacaattatcgtttgggcaaaggagatggaactgagaaaagctgagaaagctctgggcaa

SEQ ID NO: 34602 - DNA, 1349 bp, Bovine  19866880447689
  misc_feature (1)..(1): n is a, c, g, or t
ntctgatggagcgagcccagtcgtgtttctggagagcaggtaatcaggctttgcaacaggaaaaccagaaagggcacagcccaaaaagccatcagagagaatgctgtcttgctatttacagagggtttaatttgagtgggcagaggtgacagcagatggggccgaggcagtgggagagggctttctaacaagacaaccttcggtatgccagtgactcatagctcccggggagggggtgtgggtggatcatctccatccatagagctgaggttcaaaggggagctctttcagtgtatggctaagcacgtgggtggagaacctaggcactcctgttttatgctgtttccggaacatcagttctgatgccttttcttaggaaataaacagacccacaggtcatctagctgctcagtgacaccctggggaccagatgtgaccacttcaccagggtctcctgcacgtaacagggtaaatgatgagtggtgtcgtccgtctctcttatttcagaaactagctgcctctgtgcttccctctccctacatacagcaacaaatgacatcacacacaagtctcttccattataaaagagaccaagagaatctaaccaatagagcaaagtaggaagaaaaagcgttccactacctaagcattaatttttgggtacattcgcttccattgttttacctgtatgtgattcttttttttttttttcttttcacatagttgagttcatattgactagaccatttcatgccctgatttcattcacactattataaggattttccatggtattacatacacttcataaatgtcattttgaaggtagcaagcttactggaccgacttctgattgctgggtgtttaaactgtttccaatctttcactgttacgcacagtgcctcaaagagcagcttcattgtaggatcactttgaatgtttgggatgattttcttgggctggaattttagggagaattctgcacacaggtgctcccatggtttgctctcccatgggtgacccagccttgggggtcccagacagaaggctaacaggtctcctctcctctctctacagtctttctgaagcctgcattgatttctttttctcattttctcactcaggacctataacttctttcctgagacccctccattaaaacccatcacattcaccaggattctctctctctgttgaagtgagggggtggggggaatcacaccctaaacaatatcatcaaaaatagaacatattgtttcaataaactgaaaagttctggctttaggaatagctggatccaggcactgaggtaatatgatcagagcctgatttttcactgactctaagcc

SEQ ID NO: 34603 - DNA, 1359 bp, Bovine  19866880569599
  misc_feature (1)..(1): n is a, c, g, or t
ncttgcagagaagaaagtgaaaggaagggatcatgtttattgagcaggaattatgccttacctcatttcatccttaatgaggtaaggattttttcatccttagaaaaaatcaagaatataggtaccacaatctccatgtcaaagatgagagcagagctaagccatcctcagagcctctcctcccagctggcaggtggcagaatcagaatgctaatgccatgaccccacactgctgtccccaagtccctctgatggcatgtaaggaacatatgtaagaaaaaacaccccccacgttatccttggtttacatcatccctctctttgccaactctgatttttggatttgctgatttccaacccttaccttcttactcactctgccttcgtgaggccttttcctagcagccccagttaatggggaccttgtctacacttaagattgtacactgctcccagtgtgactgggtgagtcacttaacctcttgacttaacttcagttgagaaagtgacacccccacctcttttctgacctatctgccttccatcctcccctttcccatcactgattcctttctttccctctttctttcaacacatctttgctgaatgcctaccaagcacttaacactgggccagatggtactgggctgcagacagaactaggaattaaagccacggtttctagacgtggagaacctcctttgtacctttttgatctggagcaagtcattcaccatgattacttcttttcaaaaaaaattttggctgccccacacagcgtgcacgatcttagttcccagatcaggatcgaaccagcgcctcctgcagtggaaacgtggagtcttaaccactggaccaccaaggaagtcctgaccattattacttcttgtattgaggtgaaattcacataaatagcacactattatttttctttgtttcttatctcatgctttttaaaactgttagggggatttaagcatgtgggggatttaagcatgtggaggatttaagcattagggggatttaagccagccacctaaaacctggcacaatgaatgacccataatacacactctgtgaatgctaattccatgaatgaataggttttattctcccaaggacagtttcagttcctggacagtctgggccatgtcagtatcggagctggaagggacctcgatgaatttctcagtcagttcattcatgtggctgaacaggggctcaaagatcacgcagtcagtgacaggactggtctccctacagccacagtgtgcacccccttccttgtgtccagcatggggcaagtggttgccacgaccttcaacaacctgtatatgctgttctagaaattaggaccca

SEQ ID NO: 34604 - DNA, 1177 bp, Bovine  19866880580634
  misc_feature (1)..(1): n is a, c, g, or t
nctgggattgaacctgcgtctctaatgtctcctgcatgggcaggtgggttctttaccactagcgccacctgggaagcccagcagggcagggatgcaaactccagaccgaagacagggctggcagggagcgctctaattttcaattactgtgctcacaccaaatggagctcggcggctctccctccactccggggtgtatttgactttacatcacacgacttcctgaacatatagacacagagcgacggttcagccctgctcactcatctgaccaggccgccacggggcgtgagccacagcccagcgtttacacacgggcttactgaaagcaaataggatttggcctcggttgcagacaggccctccttcgggtaagtgcatgtgctgtgatcatgggggcatttcctacagagcccgtgccaccaagatagggccctttgggctgcactgaacttcagcaatagcttgcccgcttccagttcccagagatctacgaatgttcgcttaagacaagggacattttctgtgcaccctcctgccacccggtccagggaaggaaagttctgatttttttccccatcatctcctgcagagactgtgctgcctattaccaagatctgctcactgctctctcaatctccttcctgccttcagttccccatctggaaagtgggcagatttgatccaatgttctcaaaagctcctcctccttagacaccctgtgttccttgaggagcacagggaagcagggagcattctgggttgggagtcaggaaccctgcaatccagtcccaaactttcctcagtcagtgaccttgagcaattcctttccaattcttgagtctcagtatctccaacaacaaaataaagaagaaaatattacttgctcagtcatgtccaactctttgcgaccctatgaatcttagcctaccaggctcctctgtccatgggattctccaggcaagaatactggagtgggtagccattcccttctccagggatgatcgaacctgggtctctcacactgcaggcaaattctttactgtgtgagccaccagaggcttccaactaagccagggggcaaattcaatgatctctgagctttctcgttttgcatgattttctgtgtgtgtatattcgtgtgtgtggagggggtatgtgtaggtgcatataggtg

SEQ ID NO: 34605 - DNA, 1273 bp, Bovine  19866880581634
  misc_feature (1)..(1): n is a, c, g, or t
ngaaatggcaacccactccagggttcttgcctggagaatcccagggacggggagcctggtgggctgccgtctgtggggtcgcacagagtcggacacgacctgaatccgcttagcagcagcggcagtgtgtgggacttccctggtggtccagtggttaagaatccaccttacagtgaaggggatgcagctcagtccctggtcagggaactaagatcccacatgccatggagtagctaagcccaggagccgcaactactgaagcccacgcagcacaactcgagtccacgtgctgcaacgaaagagctcacatgacgcaatgaagaccctgcgtgctgcagctaagactcaacacagccacatagataaatacatttcatttttttaaaaaagaatatattaaaaaaagagtaaacttcatttgatttctctgtggctgggaacagatctcgacgagcccacatcctgggactgagcctgtaggtcccagacaggcacgttctgggctcctggagcagaagatgggctcaggcaagcctctgcttcggtttagctcagccagagccatgagtccattggattgtttccttttccttgccctggccctgaacccttgatgagatgtgggaatctgtttccataaaaccaatttatttttccatttatatgattaattgaaatcactaatactctagcctccaggtcataaacactgggtaataaaatcctctctacatctgtccagtgctttagtgttcgctaagcacttttaccaccattatctgatgtgaccctttagaacggtcctgtgagatacacaggaagggattacaatggtcagtttagagcccgagtgttgccaatggttacaggtagccgggagcagagcgggaactgaagctagttcttatattcttaagtttagttctcttgtcaggtaaacagatgagcaggttgacccaggactcaggggcttcacaggatctgggacttttagctttaaaactgagaatgtccaggcaaagctgagaagaattggccaccccatttgaggaccccagggtgtctctcgtgatggaggcctgtcactcccaccaggttcaactgaggaaaatgtcctatcacctggcacaggtgaggcaaacgctgtgcctggaccatgtaccatgatgtggctggagaagagccacctgcggctgacaggtgatctatccgaggcagacctggctgggggtgtgtatgggcaggtggaagagcctgggcatatgagtgatcc

SEQ ID NO: 34606 - DNA, 1490 bp, Bovine  19866880600292
  misc_feature (1)..(1): n is a, c, g, or t
ntatactgttgaattttttacagtacgtattactttttacacacagaagaaggtgcttctattgtgaaagatgaagaaagcggagccctaattctgccaggttgctgggttggtcagcccaggggaaacggagcagaatgagacttataattcatgtaactgaagctacctacctcctgcagctcctgaccacagcctgctgtcaatgcgcgttctccaacctggggcatcaacatctttaacacatcaccccaggtcccccaactttattcctgttcatcttctcagttgctaggcaatatgtaattaaattttggaaagcctcttccaccctggatatattatcctggaaattggactttgcatctggcagtcttagaaagcaaaattccactcccctcagcacccccaccctctggcttgcaattgactcacaatttaattaaaaagattccagggacatctggtctccttttctaggagtgcatttgcagttggctttcctggcatgtttttgtttgcaagccgtggatttatttacagaggcagagactcattttcctctcttaggtgtatctttgtggtctttattaacgctgtgttttgtaagctgtgatcattcctctgcgttcctctcctaatggtctgttttcccctgtgtttcgctcagtcactgagagacctgatgccactcagatgcctgccaccctgctgaccctgcccagaggacagggtgcctgttcactgctggggggatccagaacatagcccctacccaccacaccccactacccatccccagcccccatgccccttgccatcaaaagatcaacatcaacatctttggttggcattttctttcctaggcacaaaataaatacagaaagaacttttagagagagagatgcatggcagaggagagtggggaagactgaaccagaagctggctgggtgatttctggcaaccacttcccctttctgagcatctgtaaaataggtagttggacttaactagcacagagtcggacacgactgaagcaacttagcagcagcagcatttccaaaaatcaacttcttttatacgtgcatgatttgctctgtatctgcatacctcctatactattattcatacaatatttttctttaaattgactctcttttttccccttcatgtgtgtatttataatgggaaccttaaatcactatataaaaggtaaaatattatcgttcaccatgaatagaaggtaactgtaaaaatgagtataatgaaaacaaaacagcgcttctagcttgtagctcggtgttgttttcttccaaggctctgtgcccgacacttgttctctcttcgttaaaaaggaaaattggcaaatgtttacttgtaagaggcatgttaataccactttgagactttacctgtagataataccggaaggacgaaagagagcgagaaggaaatcagtgcctgattacaggataataaaaaaagaaca

SEQ ID NO: 34607 - DNA, 1225 bp, Bovine  19866880603618
  misc_feature (1)..(1): n is a, c, g, or t
ntgtgagctcgtttctgttttgtagatgttcgtttgtgtcatatttaggtcccacagataagtaacgtcacatggcatctgtccttctctttctgttggaaaagttttcaattagcaatgatcctgcctcagagagaccccactggctatgagactgccactccacaaaacttgcctttctctttctgacttactccacttagtttgaccatctctagttccatccatgttgctgcaaatggcgtttttcattctttttcatggctgagtagtattccactgtgtatacgtaccacatctgctttacccatgcattcagcaatggacatttaggttgttgccatggcatggttcagagctgattttcagtcctacttgttaccctttcagaaccataagcataaaaataaaataaaataaggtgcccaaaatagtaaaaccaagtgcttgtgaaacagtactttcctacatgctagcagtaacataagttgttctgaccctgttgaaaaggaattttccagaaggtaccaaactcacaaaagcatatgtactctgacattctacccatggggttttccaaggagaaaagtggggctaaaaccagttacatacctggcatgggctaggcatgcttacagtcactgtgctactatttctgcacatcaatgttttgacacatacccttactcccatcttatagaagaggaagctagtaaagggctaatgacttatctaaagctgcagcattattacaagggagaaactgcattcaaactccatctgcctgagtccaatcccctgtttcttcctcggtaaaatattgccttgtgaggaggtctatgcatgaacatcttcactgcagcattactcatagtagcaaaatgtgagaaaagaaaaagtggctgataacaggaaaatgtttgggtaaattatgggaaattaaccccatggattattttgcctttttataaatgataattttaaaggttatttagcagtgtcaggaaaagcatatcataaagacgagaattgaacacaaaagtattcctaggtaaccattataactatattaaaatgcatatccatatggaaaaattgttcctgggaacttggaaaatagacgagtttttaaagatattagtaactaaatataatttctcaaaatacccattattgttgtcaagttgtatttcaagacagacacttgtttgggtgggaagaataa

SEQ ID NO: 34608 - DNA, 1972 bp, Bovine  19866880605684
  misc_feature (1)..(1): n is a, c, g, or t
ncccaagctgcttgagtgcttaccctcgaactttggtgtgttcagtgctgtgggcttcacaatattctggcagtgttcaggaagcagccagaggaagtggaaacttgagtatttctaagacagtcagtcctcagcccttggtaatttctcctactgagattgtccttggctctgatgcaaagccccagctgaaactggacaggcactgacctgaagcttgagtcctgaggcttagagctgaatatgggcatagttgtgatgaactggctcccttctttcatactggaaggaagtttgtggtcagggtgtaaaatgaaactccatttgaaagatggacagccaggtgcccacccaaaggaacttgttttctaggtggagagacgccaaagaagcagagaaacagtgcccataacagttctaatataggactgtctattgcatggtaagaaatagggacattcttgcccaaatggacttagacagggtaagtgacaatctcatcaataatttgggagcaaggttttgctgtggacaatttgcaatgcaaagcatctgtccttgtataattaagactagactgtccccagttctggtttgtgagttatggaatttgaggcctgtgaacccaataaagaaaaacaacgacatagcctctcctcccagttcagctaatcaacgagaccatcaaaacaatagctttgcctgggacaggtcaagccagtgctgccctgggccttttcagttagccttgcaaatcagccatgtccccatcctctctctgtctgggaagcagggtgagagccagacaaccttccctccacctctctcatgagtttgtctgctgatgactttgaaaagccagccgtagtgagaaggaagggaatttgcttaaagttaagtgtccaatgttttttaaagtaatagaaggctttcttttatatttatttattatttaactatgctgggtcttagttgtggcaaatgggatcatcaatcttcaatgcagcaggcaggatctttacttgcggcctggggactctagttacctgaccagcaaacaaactcagacccctgcattgggtgagcagagactttgccactggatcaccagggaagtgacagaagttttaaaattgaagactatttttaaggttcacgtcttcattttacaggcttccccggtggctcagtggtagaggatacacctgccagtgcaggtgatacagattcgatccctggattgggaagatcccctggaggaggaaagggcaaccccctccagtattcttgcctggagaattccatggacagaggagcctggtgggctatagtccatggggtcgcaatagagtcagacacgacttagccatgaaacaacaacttcatttctacaaagaagaaaaacaaggcttggagtgtgtatgagggatgcagggcagcgggggcagagctggggtggtggagaagaaacacactgtggagaaaacaaagatgaatttcaaaggatcgtgactctgtctctgtaccaattcaatattcgttgaatatttataatagacaagcttgctatgtattcccttttttaaccccgtgacaatatatgaggctattactctgattatcttcattttgcagataggaaaatcaaggcccagagaggttaagtaacttgcccaaggtcacacagctggcagactaagctgagattagaccccaacttgcttgctcttatgcattcacttagctctccagcctcttggttgtgcacatcctggaacctgtagctttttgaaagttacttgttcatagacggagtctggatcctttgttcattttttaaaaatgcgtccattaattcatttgtctataaatattttttgagcatctactatctaccaggttctgtggactccaaataagtaacacccagtttctgccttccaggagctcaggatcagttgataaccctact

SEQ ID NO: 34609 - DNA, 902 bp, Bovine  19866880645483
  misc_feature (1)..(1): n is a, c, g, or t
ntgtctggcatggggtcaatacccatcgacttgtgaatgaatgactaaattggtatccaacttatcataaaatctcagcaagcattaaactcgaagggaacgctatccagtccatagtctactctttggcaatatccaggaagatatttgaggtgcaagctcatgacgaccatggatatttcatagaaacatttccagaacctaccgtgcccccacatccatcattcacggtggcatcatcttatcccactggtaacccattttgctttgtttggtcaggcccctcttctttgactttatcacaggcaataccactgcagatgtgtttttgtttctttggggccaataccacgaactctgttaccagagaaaggattgccgtgttggagaatataaacagctctcactctgattgcctgattgcttatgtaaattggtccagtctttctcgaaagcgatgctgaaagatgtgttttcacgggctgcccatcttgggtttcatcacattttttttttttggcgactttaatagtcaagtaatgggacctgaaaggtgctcggttctaaattttatttcctagctggcgggatggtacctgtttctacatggtgatttactgtctccatttcttggtgcaattctgttcatctcctttgaccgcttatcagggggagtcacgtcgtggcccgtccattattttttggggcagtaagcaggcttgggaaggggatatgacaaacataatggatgccactgttgtccttttgatatttatttttattacatggtggtgcaaaaatttccattcttatgtgtctgaacccatccatcagagccctgatgttatctgtttcttcaggagctgggaatttatctcctcatcggccacagggatgcttgt

SEQ ID NO: 34610 - DNA, 963 bp, Bovine  19866880648775
  misc_feature (1)..(1): n is a, c, g, or t
nttttaatggccgagtaatatatatgtatcatatcttctttatccattcctctgattttggacatttaggttgcttccatgcctaggctattgtaaacagcctacatttcttagaaccagcagtagacaggagaaacatacccagctcaagccccactcctgagctgagagtccagctttctggccaagtctcatccaccagcagcaggtgtttgggaaattggaatctcacctcatgcccaacctcggctgtagaattcaactgtgttccgaaatgctgtcatttacccaaactggtacctgtagaacactgttgcatagaatcttaatagctgggaagcaaatacaaatctcttccgggtttaaataaactaagaaatcctgggcaaaccaaagtataaatttgcatggttttcttgcccatagaatttatcagaccctttaatatacaaatatttattccaaaatctaaagcagatagtgcttcccaaacttgttttactacaaaatacttgatgtggggggacacctaataacatttcatagacccagtgagctgtaaaacccattctggaaaatgctactttagatttatttctacagacttgagataagcataggatagattagtatggagatctctagttagaattttctatcagcatgcaagaaaggagagccctccatggaccatcataaattgttcatgtgtctgcaaccatgagagagagagacagagccgaagaaaaagatggtcaaaggtgctaatctgccatgattttgagaaataagggggataatttttatggctactggaaaggaataaattgttgctgctgtgtttacggcactgaggagaaaggttgaagctaaaatattcttgcaaagtcaaaggtcttgggagatgggccaagggaagggaggcttccttgtcaaggatatagtttcctctctccctattta

SEQ ID NO: 34611 - DNA, 1554 bp, Bovine  19866880650542
  misc_feature (1)..(1): n is a, c, g, or t
ntgctcaccaaaggttagggctttttaaagtgtgaatcagacagctgggattgggtcttggggctggcctcagagctgatattgtagatgtggaaagctctggactagaagagatggccaaaggacagtggcgatcaggacatcctggtggtccagcagttaaaactgtgctgccagtgcagggggctcaggttcaatccctgatcagagaactaagatcctacatgctgcaaaggaaagccaacttaaaaaaaaaaagttgagatcaattaccttttggataaaaatgtcctatcaaaaatcaacaagtactgaagataaattttaagttagttagctacttccattttcccctgaagaacacaactcaatttagttctataaagtttatgagccaggcacagtggaaaggggagccctgagatggataagactcagttcctgctctggaaggattcacatgttcttggaaggagcagatatataggaaaccaaataaagtgtagtgtgagaagagttatgtgagaggcctgaatcgagagtattgggtataccaaggagggagcaatcgattttatctacaggatttgagaggaaataattggtacactaagatccttcctgaaggattaaatacacatcatcatttttcaaataaattagtgatgaataatgctattcactcccttgtgtctcagatggtaaagaatctgtccacaatgcgggagacccaggtttgatcccttcctgggtcaggaagattccctggagaagggaatgacaactcactccagtattcttgcctggagaattccatggatagaggagcctagtgggctacagtccatggggtcgcaaacagttggacacaactgaatgagtaacacacacacataattatcagttcaaagaccaaaatcctaaccccaaatttctaggtcattatggtaaaaagagtagggaatgaaaaatgtcgttctggaagtctggcattctctagattccaaggcaaacagcttctaagccccatgggtgatctgtgatgtagttaactagggttgaccattataacagaaacgttcttctgtgtttttataagttcacaaagtaaagctagatgttgacataggagaagaaatacattttcatattataataattgaatctcaagtggccactgcaaaaaccagaaagatggagctggcaggaacctcacaggttctgctaatttaagcccctcttctgctttcttgacaaagacatcagaaaggggaaatgattcacaaaaggttgcctagcttggaagagccaggacagggcctcagagttcatcgtgaatcagcaactctagatcctccagtccatacaccaggaactgcatgtatgtacacatttcttgttcagttgctcagctgtgtccaactctttgagaccccatggactgcaacagccaggctacctgcccttcaccatctcctggagtttactcaaactcatgtccatgattaagtgatgctgttcaaccatctcatcttctctcatccccttctcctc

SEQ ID NO: 34612 - DNA, 1878 bp, Bovine  19866880662754
  misc_feature (1)..(1): n is a, c, g, or t
ngacttgctgtcctgtctaaggatggcccttagtcctcccgctggacctcaccaactccctcaaagtgactgacttacttattcagcaaacactcatataaagcttattacacgccaggtaggcatgtaggcatttgttgttctttagtcactaagtcatgtccgactctttgcaaccccatggactgtagcccaccaggctcctctgtccatgggatttcccaggcaagaatactggagtgggttgccatttccttcttaagggaatcttcccaatccagggatcaaacccgcatctcctgaatcggcaggtgggttctttaccactgagccatcagggaagccctagtgtgggcatttgacaaatataaactcattgagtctccatggtttctctaagaagtaatagtcgttgttatcctcattttacagatgtggaaactagatacagtgactcagaagtcaagtgactctttcaagtcacactagtaagggcagtcagtgtgggcacctagggagcctggctccaaagtctaagctcataaacactaagctgtgccccatttttgtggtggctttgtggatgtgggtgggtcctaaactgggagattctactaatcctcgactctccgaacccgccttcactcctggactctgcatcagacttcctgtacagcaactcatacctccaatccttttcttgtttagaaggtggggacaaagaccagatctcatgaacccagacaagatggggctgagatgggaaactggggtgacccgaaagcctacacaggatagactccttttcctggagcaagtccagcggtagtcactgctgacagctggtggtaacacagactccacggggccaggacctgctaatgcattttgtcactttgaagagtgcctccaattacatgtactggtcaagggccacggtttgaaatgtgttgcagtgtaccctgctgatctcttttgtaaactcaggtagtgcatgctggtgaaatgtcagagccaaaagggatccctgagagcctggtctgtgaccctctgcccccttcagcccctggaatcctggatgcgggatgggctgcgtgacttggccaggatgcccccagggagcagcaacagtccaggactattcatttaccaggataaactatgtgctgctagtctccttgttactttaaaggcatccttcttagtccctggaaatctatgaaggctcacctagatctttctgatgattttcagaagtggggataagtgtgtactgatcactatataccctttctcacccaccctgtctctttcttaaccacagcttttggaaactcacttgaatgttcacgttctttggacttttagaaccaagactttagctagtaagcagtgagattcccttgagttaacctcagaagcttccatcttcaaaggtttatcatttagtgtcctggttttagcttcaccttgatgtctacaattcgctgtttttcttctgaaattttttttcctctttaaaaggtcaattgaatcttccattcagggtgagagtggaggagaagcttagtagatttttaaaatagtgacatccagcttcagtgtaagagccaggaaataagcattctcatatactgctgacaccaatgcacatcgtcacaatctatatggaaaaatttatctatgctcatcaaaagctttgaaattacctatattactagatgtatgattcccatggctacaaatggtcaaaaagtttcatgtacaagattgcttattacaatattacttctgacaaaaaagctgcaaaaaaaaaaaaaaaccaatcccgaacattcaacagaagaggatttagataaatgaataatggtacattca

SEQ ID NO: 34613 - DNA, 1666 bp, Bovine  19866880693268
  misc_feature (1)..(1): n is a, c, g, or t
nacttccaacccttctccctgccctgctgtttttttttcttcccccaagcacttatcactttctaactttgtatccacctttcatggtgtattttgcatatgaccagtttctctcaggagtagggaagctccctgttttgttcattgaggcatcccaaggaccagagcttcagaatacggaggcccttgatatgtattcttgcagagaaagcagaagcttggagggcactgaatgtttataagctgtcttcccatgtctgtgctccatcgcccccaccccatccatgcactttgtcaggagcgcagccagagccaaaggcaccaaaccagctcatccatctgagtcccagaggccaagcgcaaacccacttgcttttaccccacgccattcaccatccttgaaatactacagagtgggtgaagagagctggagagggcatatgagggttgcctgagaaggagggagggtggaggaggagggagcaggtggcaagtattacaggcagcccagccagaatctagagtctgagccactttcgtcatccacagaacctcactggaccctaaacatgaacgggacgaggttcacccagtcggtacccactccgagcagttctagaacctggcattgtccacaggctgtgccattgatcctcctgactacatggggatagtaaaagggctgaaccccagttgccaagtaagctgatggagatggctcagctagtaagagaaaggctggaattcagatctgagccaccaggctccagagcctggctctctccctctatcattgctatttagcacatgcacagcttagaaagagctgagtacttttccaggggacagggaggaagccaaggaatccactggatgacactttgctttctctgcctcgaccctctcctggagccacacgacccaagtctgcagtcgggggaccttgggccccgggcatctctcctgtgatccagccctggagggaaacagcttgcgctcgcgttccctgtgctcaagtcacccccagagccaagaggaatgtttgcccacgtcatacccttccccttaggcgcccacggaggctgtgaagcctgtgatgcgatgttttgtctggctaagctttcggactgattgaaagtcttcagaacctgcgctcctcttggcatcgctcttcctggaaacggttgccatggaacacacagagatgcagccttcactgtcagaactaatgaaagtcggagagctattaggggaaggattttttttttttttctgtgcataattccactcttccagtgaggtgtttgcatttcgcttctgtttgtgagatgttaattgtgtcttcattgtaattccttgcccattgccatcacctcttatgagctccagcccctgaaggctgcctttttgagataatgaagctaagtgaccaggggggagggcatctcagcctctctctggagtgatcttccctaagcacacatctgaccaggccacctggctgcccaaaagccttccgtggttcccaacggcgacccaaggagaccggactcaaggactcacagagccagatcccagctgcattttggaacccaaatccttcctccctccaggaagtcctgggccagtggtacagagggccagctcgcttcctcaggacacattc

SEQ ID NO: 34614 - DNA, 1812 bp, Bovine  19866880721418
  misc_feature (1)..(1): n is a, c, g, or t
nggcacaataaatgaaacatgcttgaatcatcctgcaaccatccccctcccccacccccagtctgcagaaaaattgtcttccgtgagaaaccagtccctggtgtcaaaaaggttggggaccgctgtcttaaagcactgaaccagacaatgtgacccaaatttccccagaaagcaatgctgtaatgcagagagatggaccagaaatgagacagggaggcagtgaggcgtggagaggcgatctttggaagcgtggtggggagcagaggtttggcgtcaattcaatccccacttagtagcaaccttaggctagtagtcactggaccatccccgccccccgccccaccccaaccccacaccccaggcatcagctttcttatccgtaaaactgagctcttattacagctgctgcagggaacctgggagggtggagagggctcagacatgcaggctcagtgagcagggtaatgcctggcaccacagtccagacgtgggaacaagtgaagccgaaaggcatttgggagggagggggaggggggttgcagttgaggaaggcttcctgtagggggtggcttaaggtcagcctcaaggaatatattagtttgggttggaagatgtgaaatgacactagtcattttttaccccaaattgttctctcctctttggcccccatccgtgcctctttggaatggagcgtgaatattaagcacatttttcatacactttgaagaaagccagacagggctggcagtgccccggtgaatctcttacatatttaaagagcatcctgttggtttgagggggaggtggctgcgtctcagtttttctctctcagtagcccccagaacaagctgacatgaacgctttattcctgacccaaaaatgatagcagaggatacaccctgtgatctatgcaccctgcaaaatgttgtatggtttacaaggcattaggaaagctaccgaattcactgtggctctgggatcaagaacaaactgagccagcctttgcccctccctagaacatatcccacgcctcacccccaccccatccagctttccatttgaccctttgttcatgggtatttgaacatctactgtgtaccagggggcttcccaggtggcgctaatggtaaaggacctgcctgctaatgcaggagacacaggctcaatccctgggtcgggaagatcccctggaggaaggcatggcaacccactccagtactcttgcctccagaatcctgtggacagaggagactggcggcctaagtccatggggtcacaaacagtcggacacaactgaagtgacttaacacacatgcgctgtacaccaggcactacactccttcaagacgctacttggatgtcacctcctccaggcagccttccttgatatccacccttgtttcttctgggctcaaagtccctccctcatattccccaaacacctcatgtttgttacatatcttgcctgttgtgtttctctccccggtttcttatttgactgccgactcctcgatttctttcaccaacaaacagtaggagcttaataggtgtttgaaaagcacacagaactggttctgtttcccaagttggcttccccttgcctgattctgaccccttctcgggtgtggaggcgggaaagcagatgtggggacagactctgggcctgaggttctgtgactcctccctgtatgaaagggcagcagggggctccccagctccctttgactgaggtttgtcctccctcccaggtatgtcccacaggatcgggagggtgggctttgtgaaattctgctaaggtctgagcactcatca

SEQ ID NO: 34615 - DNA, 1328 bp, Bovine  19866880722134
  misc_feature (1)..(1): n is a, c, g, or t
nacacatggcaggcatagcaagggagccacggtcgaaccctgtgaagcttctccaggtctgtctaggtctccctgaaagtttagcaacaagaagttctctgatcggactcaggctccctgtgaaaaacaaattgatttgccatccagcgatctgctttctttcagcttgggcctcaggcctgaagagcaagcagggagggaaaccctaaagcgggccctggagggtggaattcacgccccacagactgcaaatctcaaagataacaagacaaggagattagaacataaagatccataattagattctaacagggtaatcccactcgtggtacctggaatgcatcccctagcagtgatgatgaaagtcggagatcatcagaccttagcctatgacatgctaccaggcacgggaatcattaactgtgattaaagtgctacctactaagtggtgagtgggaggaaggggccagagcctattactggtgccctcagtctctgcaggtcacagccaggtggatgctcccacctgagctcgtgcacacagacctgtgagattacatagactctcttactgcagacagtcagagggctgctgatgttgccgtctgtctgtctttcgacagaatcttctcttgtcatctcaccatgggtgggagatgatggaacatggggaacgcaaggctggagagaggtcacaggttattcgaagttcaaagtgctccctgccatagtagagatgataaggaatttcccagtagtctattggttaggaccccgcgctttctctacggggtccaatccctggtcggggaacagagatcctgcaagccacacaatgcagccataagtaagtataaaatttaaaaataaatgaaagcttacataaaaatgctaagtagtggtttagtcattaagtcatgtccaactcttgtgaccccatggactgtagcctgccaggctcctctgcccataggattctccaggcaagaatattggagtgggttgccagaagccccaaaatgctaagagatgctagtatttctttgaattctaacaggaacaggaaaccgattcacctggtcttgcatctgacctcttctaaatagatctggacttattacaagcgtgttcaccaacacatactcatttaatcatcggtgtgtctgatatgtgacaggcacagtgctcaatgctatctatgaagtcatataaaagtggacaagatacactcactgacctctaggaaacaacagtctagtggggtcactagcaaggaagtgagtgagaagagctggagaaggaccacccctccggtgagtgtaaatgaa

SEQ ID NO: 34616 - DNA, 1982 bp, Bovine  19866880747568
  misc_feature (1)..(1): n is a, c, g, or t
ntttccctatcccttctccaggggatcttccctgacccaggaattgaaccagggtctcctgcattgcaggcggattctttagcagctgagctaccagggaagtccaccatggtttgaagcagaatttcctggctgaactgagtccagctaagtttccactgacctgaatatctttgagaatagatattcattatcatataccactgagatttttgtggttgtttgttacgcctcataactaactgatagacaaggtatcaacaccatgtgcttggacaactctagttcctatttaaaaatctcttttccccctcaatttattaaaaataaaaatcattaagcactcacaacatgtccattctcaaatttggtgtgatgtgtttataagtttgggttactgtttttgaggagctcggcatgggggaggtaaaaagatgatcacaaaatatgatgtcaaggaacgcttcctttgggtagggagtaatgatctctgagtgaagtcttgggggaggaaaaagaagggaaggatgctcaatgcagaaaggagcgaagcaagcttgttcgttggtggaacacaagccctctttgtgctggggctgttacccttagcatagacaggcagcccgagtgcaggtttgattgtggcattttacaagtccctgaccaaatgtttatacgaaaaaaaaaaaaaaaagacatcaatgacagcaatttattaccagatgatgaagttcagggaaactctattaaataaaaaagtggcacaagagatgataaaactcaaagaaactcaaaggggataaaagactcagggtagcgttgcggatgcaataaacaacagcataatctaggaaagccagcggcgcagaggtaattacacgctgacacctgctcctgggaagtcgggctggggtccaggcggctgctgacacgggagtgcccagcactgccctcaccccaccttacccaaagcttgcctttcccctgggcttctcccggtgtccctttccctaggatttttctcagtggcgcttgcttcctgccggggcgggaggtggctggggtcggcggggagggaaggtgggcagcctttcggaccccacgcaataaacacggcctctccctcgagcccatcccctgcttccaatgctccccctccctccagcccaagtgtgtgtgatttccgagttaatctgtctgcactaattaaatattgacggctgttaaatattcatggggcgttttagctggcaggtttgatgtctccaggccctgctggctgcagctccgctgacgggccattttgactgggcactttgcgctcctgaccgcccctctgtcatccagctgttcccagcttctctgggcgaccccacctgctagggatggctcagaccccacacagacacgcccatgagcctgctcctgtgggaggtggtgccggcagctttggccctgggggcttgtcccgtgtcacagaaggactctggcctggggtgtgtgtgtgtggacagggaaggggtggaacccaggggtcgctgagaggccaggtggtctgtcctccagtggggactcctggaagtccttccttccattgactcttgctggcagctctggttctgggctgcatggggtgtgctggggagagcggtggccaaggacagcctttcggatccctgcgggaggtcagactgagtggcgtggtcctgcaaagggcggttgtgatccccagggagagtgtcgtggagctgaggagtctcaggagacgccagtcagactggggagggggaggtcagggcaggctttgaaggctgagaccacagacagaattctgggagacaagcaggaaccagaccagctgggaggagagggttattgtggaaggtctcccatcaggggaagggcacagacagtgagggcccgggcaagtgcgagagagaggagccctgtgagtgggcatggaggcgttctggaggctgggt

SEQ ID NO: 34617 - DNA, 3366 bp, Bovine  19866880776003
  misc_feature (1)..(1): n is a, c, g, or t
ncattatgtcttttgggtaagactttaatcaaatcgcttatgattatacagtagaaatgacaaacggattcaagggattagatctgatagacagagtgcctgaaaaactatggatggaggttagtggcattgtacaggatggacattgtaccatccccaagggaaaaaaatgcaggaaagcaaaatagttgtttgaggaggctttacatactactgagaaaaggagggaagcaaaaaggcaaaggagaaaaggaaagatatacccacctgaatgcaaagttccaaagaataacaaggagagataagaaagccttcctcagtgatcagtgcaaagaaatagaagaaaacaatagaatgggaaagactagagatctcttcaagaaaattagagataccaaaggaacattccatgcaaagatgagctcaataaaggacagaaatggtatggacctaacagaagcagaagacattaagaagaggtggcaagaatacacagaagaactgtataaaaaagactttaatgacccagataaccacaatggtgtgatcactcacctagagccagacattctggaatgtgaagtcaagtgggcctcaggagatatcactatcaatgaaactagtggaggtgatagaatttcagctgagctatttataaaactaaaagatgatgctgtgaaagtgctgcactcaatatgccagaaaatttggaaaactcagcagtggccacaggacaggaaaaggtcagttttcattccaattctaaggaaaggcgatgtcaaagactgttcaaattattgcacaattgcactcatttcatatgctaacaaaataacgctcaaaattctccaagtcaggtttcaacagtacatgagctgagaactttcagatgttcaagctggatttagaaaaggcagaagaaccagaaatcaaattgcccacattgctgaatcataggcaaagcaatagaattccagtaatacatctacttctgcttcattgactatgctaaagcctttgactgtgtggatcacagtaaactgtggaaaattcttaaagagatgggaatacaagccaccttacctgccttctgaaaaatctgtatgccagacaagaagcaacacttagaactggacatggaacaatggactgttttcaaattgggaaaggaatattgttgactgcttgtttaacttaaatgcagagtagatcatgtgaaatgccaggctggatgaagcacaagctggaatcaagactgcatggaaaactatcagtaacctcagatatgcagatgacaccattcttgtgaaagaaagtgaagaggaacaaaagagcctcttgatgaaggttaaagaggagagtgaaaaagctggtttagaactcaatattcaaaaaactaagatcatggcatctggtcccatcacttcatggcagatacatggggaaacaatggaaacagagacagacttaattttcttgggcaccaaaatcactgcagatggtgactgcagccatgtagttaaaagatgcttggtccttggaagaaaagctatgataaaccttgacagtctgttaaggagagacattactttgccaacaaagttctgtctagtcagtgctatggtttttccattagtcatgtatggatgtgagagttggaccataaagaaggctgagcactgaagaattgatgcttttgaactgtggtgttgaaggagactcttgagagtcccttgaactgcaaagagatccaaccagtcaatcctaaaggaaatcagtcctgaatatgcattggaaggactgatgctgaagctgaagctccagtagtctggccacctgatgcaaagaactcactcattggaaaagaccctgatgctgggaaagattgaaggcaggaggagaaggggatgacagaggatgagatggttggatggcatcactgactcaatcaatggacatgagtttgagcaagctctggaagatgttgaaggacagggaggcctggcgtgctgcagtccatggggtcacaaagagtgggacacgactgagcgactgaacaacaatgggataactcaggagcttgaacctatgcaaaaccaagagtttgtccaaacaagccttctgggagctgatgtaccaatattagcaagacccgtggcctcctcctcagacagcttctgggttgtcaatggagacagataaagcctcttctgattggatttccaaagcagcctgtccgttccagtgacctcattagtttattcatcagtttgggattttttttgtgtgtgtgatgacccagggacttccattatgcaagcgttttgatcaagatactattttgccttcaccaagtttcttgcctgctcagtggctgcagggtcagatgtgagagtgattcttcacctgctatctgtccacatcctcagcggtccctgccctcctccagtaccctgcgtgtttgccgggaggttgagtggttcccatacgctggctgggtcagaggccgcctcctgggagacgcatgcaggatcagtgcctctcattcagcccgcggatatttagctcattaaacagcaatagattcaaacagaaaaatgaaacggcgcacatccttagcgctaaagacgtttcgtccctttgtcttagttcaatttttctgaagggaaatgtgaggagctccgcataccgagaggctgaaggcatccaggcagagagatgagaggagattggctccaagcaatatcctgcctagcaggaagtgagtggtgatgaatccatatttctccataataagctgagccatgggggcagagcaccccttccccagtgcagggagagagtgtcaggcagggctggctgtgcctgtgggggatgtggtcacagtccctgctcgtctcaggggcagcagctgtcctgccaacttggttcctccaagccgtttcccttcatgtcttccagccttgggagggcacctgtgggttgccacctcaaagtggcctaagagctgggaagtgaccttcccatggtgaatggagcgtttcatcttttttttaaagatttttttgtttaatgtggaccatgttttaaagtctttattgaatttgttacaatattgcttctgttttatgctctggttttttcacctcctggcatgtggggtcttagctcctccaccagggatgaaacctgcgccccccgcggtggaaggcgagtcttaatcccttggctgccagggaagtatcaagcctctattctttagagcagtaaggatgttagatggcaccgagttcatttaggccttggtttgtggttagattccttttggattaatttttattggtgcagagtgctttccaatattac

SEQ ID NO: 34618 - DNA, 829 bp, Bovine  19866880778584
  misc_feature (1)..(1): n is a, c, g, or t
ncaggcaaaaatactggagtgggttgccatgccctcctcctccagagggtcttcccccacccagggatccaacctgcgtctcttgtgtctcctgcattggcaggcagcttctttaccactagcgccacttgggaagccccatttgtaagcttgtttataaatgtagaaaccaattcttagtgaagtggattaacttctggaaggccactaggctggcaaggagaagagctggggtggaaaattcagcaggtctgattctaatgcctacttcccagaaactgacagctctgtgccccgaagagaacctcataatggtcctggaacctgaatatttaatgttgtcgctctggcttttcttccttttaattgaggcctttaccaaaatgacattttccctctcctccacatatggtcccgggctccctaatgatgtgtttgttccaggcagggcacggaatctttttgttctgaccaccgtcccccgtgaaggcagctgggccccccatgtgggaggatgtggggagcagagatcatcaacccaaagccgaaagcagaggcatgggggagcaggaggaaggccctgtgtgtgccaaacccggcgaccccaggacagaggaaagacccagaagggatgctgtgacaagcacagagtgccagttcgccttcaaatctcagccatgttttccaggcccagcagctgatacgttcagtccagaaaaaaaaaaaaaaaaaatgagagtgagggtgattatggctgaaacagatcaaaggcacctttaagactccacttcttccttctgtaggaagaaagcaaagggggaggagtgtg

SEQ ID NO: 34619 - DNA, 3157 bp, Bovine  19866880825508
  misc_feature (1)..(1): n is a, c, g, or t
ngggagggggagaaagacgagggggcattacccccagcctctctccttgaacctgatggtgtgagatagtggaaggaactggagctttagcgggtacccttaggagaaacaaaagcagagaggccatgggagggagaagagtaccctggcacccagaaaagggcagaaagtcagagcgaagtacggaagaaggtgatgacaagccagcaggagctgtgctgataggatgacaatgacgggagcagtgggcagagcaggtaagtggggtggcagggtcggagaaggctccttgtggacttgttaggagccttggaagatggggggaggtgtgacacccaggcagcagaggatcagtgttcccgggggagagctctgcttgaaaatggcgctgaggatggagcccacggcccctgaaccgtggctttagccggctggtgtggaggagggctgccttgaatggcagacggagatgaggtggaaaaaaaaacccataaaaagtacctgcctggggtggccacaaccccggcaacctctgctttcacatcagcaacatggggagaacaatccctgctccgtggtgatgccgggagtattggaagatatatacaaagtaggtcaagggccaggcccgctgctcggcatcaaagaaacgctctgtgaagggccactgcgtgtgctattcacccaaaggggcagaaagtgaatagccctcatgtatactaagtggggattaagaggagcttcagggcccctctcagatgcctcttctttccggagagtcaggcagggattctccgggcaacacacgtggcttgggcttccctccttgccatagcttgtagcctagacgagcctggggcctggaatggggggcaggccagctgggggcgggcctcctgcctgtccctgtgtgtgtggtttgtgttgcacacacgccacggggaccacctgtgcttgtgtattcatgctcgtgtgtatcagtgtgtaccctctaaagcctggaagacgacaaacagagaagaggtgaaattaaagcagaggtgtaattgtcgttgatcgatctgcttaatggcctggaaatgcccaattagagccgtgtgtgtggctggctgctgacccggagggctgaggggacgcctcactcttatccaggcgccccatggccagccagggtgtgttgccatggacccccttcctgattctgcccctgctggatttctggcgccggggccaggcgtgcccctgccacatcctgcagccagtagagcccttgcagtttcacctctgggctcgacgagacatcactcaccacagcggatcatgaagtgctctacttctgactgccccgccggcgcctttttgcccacgactgaaggtggggcggggtataatgttaccaggatgagcctggggcgagtggctccctctagtggcagccacatgcaggggcgggaaccagacttgagaatccgacccatcgctgcttgtttcccctgctctcccagctgtgtgactttgtgcagttcactcagtctctctgagcagaggctgcgctatgaaaagatctaaccacttcctgcctgctccactgctttattttggccagagccagcatcatcgccagcctgcgttgaaagatggctataccattgttcactgcggtatccccattgcctccaggagtccctagtgcataggagaagctcagtactatcaatatatactgaataaagaagtgaatagcatgagacagggcactcagggcctgtgcactgggacgaccctgaggcatggtatggggagggaggtgggagggggattcaggatgggggacacatgtatactcatggctgattcatgtcaatgtatggcaaaaaccactacaatattgtaaagtaattagcttccaattaaaatgcataaattcattttataaaaagtgaatagcaagccaggtgacttcttggggtctcaaatctgcaaaagccttatgggaatgagggattttctacaccaggtttgcccagtgaacccaaagtgaacatcctaccatatgggcagcctgcattgcacagctccaggggtcctatttacgagaatacaatgggccctgtgcctctgagactgcaatgtgggggactaaccagacgtctgcagaatggagaattctccatttctacgcgtaagtgtattcttgattcgtttacacaactgtgatctgtgtcaactattcagtacagatgtgcacttttaggggaaggcgtgtttgaaggaatttcatctttagacactgtgaaactgtatcattgaatttcttttaagaacacattcacgataaaaactcccataaaaatagaaatagagggaagtttccttaacatgataaagagcatgtaatataaaatctgcatctaacatgcttattggtaaaagactgaatgcttccccgtaacatctagaacaaagcaaggacgtccacggtcactacccttatgcaacatgtgctataagtcgccagtgttacaaggcaaggcaaggaaacaaaaggcacacagatgaggaaggaagaagtataattgcccttatttgcaactgacatgaatgtttacatatttccaaggaatctacaaaaaacctcctaggactaaaaagtgagtacagcaatgttgcaggatacaagatcaatatacaaaaaatcaactgtatttctatagagtagcaataaatctgtggacactgaaattaaacataaagtacatttacaattgttcagaaatgaagtattatattcaaaatatgtatagggcttgtatgtttaaaactacctgtgctgaagaaagaaatcaaagaagatctaagtaaatggagagacatagtatgcccaggaattagaagattcaatatatcagttcttcccaaactaacatacaatttctatccaaattaaaacaagatgttttttgaaagtatagatatgatcatccgtaaatgaaaaggcaaggggacagttttgaaaagaagaataaagtggcagagatcaatctacttgatttcaagacattatatgtgtgtgtgctcagccatgtccaactctttgcaaccccatggactgctgtccctcaggctcctctgtccatgggatttcccaggcaagaat

SEQ ID NO: 34620 - DNA, 1185 bp, Bovine  19866880870776
  misc_feature (1)..(1): n is a, c, g, or t
nttgtgtctgactatgacctattgacagtaccccgccgggctcctttgtccatgggattctccaggcaagaatattagagtgggttgccatgccctcctccagggtatcttcctgccccagggatcgaacctgggtctcctgtgtttcctgcatcggcaggcgggtttctttaccactagcgcctgtgaccatcatcctttgcttccaagtcagtctgacctcccgccttgtccatcccctccatcagtcttttcacagtcaaacagaatccaaatggctgtcaggggagccctaaagttaaagactcacttcagtaggctttctattagcatgtcttggttcaggcgggtgttatgaactgttcccactggcttgtgccaaattggtcaatcaatcaccactcaggtaccgagcaccctctataataagccctagtatttgtaaaactttgtagctaacaaagcacttttatatagcctctcgtgggactgtgcaaccaacctctgaattgacagggcaggtctccagatattaaattcccatttcatttcaacttctggaactttgtaaccaaaggtcttcactaagacggctccctcttgctcttctttttggcctgggaaacttccacctgagcttccagaatcatctttaaataacaataccttccccaaccctcaggcggaggtaatcaatccactcttcttcctctgtgttccttgggtcatgtgccttttttttagttgttttgctgtaatgtgtagctgtacaccacatgaaatgtatagggtacttataagcatctatctccctaatagataatattctccttgagggaaaggaatgtatctcatttgtcttagggtcccaatgcctgatatatcctcccacatataataagcagtcaataaatgaagggccatatggatattttgaaagctggaggtcacaaagtgggggactgcgcctattttgctaaggaatatggacctcagactgtaggcataacggatccaagggagtcttgatttatatcacaaaaggcagatggcaggctcatttcatagaatttatttccctgaaagttgatgaggtctgatttatgtcttcccttgaaggtcaggttatggactgttcaactcactccttctctctaacaagggctttcatggggatggtgggga

SEQ ID NO: 34621 - DNA, 1495 bp, Bovine  19866880888088
  misc_feature (1)..(1): n is a, c, g, or t
ngttctgccctgaacgtgctgtgccacttgaaggtctccttgttcctctcctcctgtctcatctagacctgggcaggatcgccaccaatccttggacattatgccaaggtcaccccatggttttctgaggattgttctttgagatacgcctcccatgggttccctgtcctcttgggttaaactcccaagggctgtcccattggtatgaatttccttatagtgaatatctattaaagactgctaatgaattaggagctgtatagtcattgaagttaataccatcgtacccaagacaaactgaatttgccagattatcagatggctggcttggctggaaggaaccatggaggtatccagcccagggatggtgcaggtggcggactctcttggcttcccacccaacacccggtttctacttgtcttcaacacagttctaatgtttttgcagagaagtaatggatccaggcaaaatgcttactcttccaagctcccactcagctagtgtctccatgtcacacaattttgtttaatgagatgtcaacagaggtctgcaaggtattcctggaaaatgttctgctttaccaatatgggtatgctccctgcccctattctttttccttcttcttcttcttttttttttccttgcttaaaaataaaggtgggatgtgtgagaaggagcagtcatcttgcaatgagctatggagacaaaaaaataacaatcacagcactttggtgaaacattcccagccatccacagatgtgcccgaggcagacatcacaaatcaatcacagcactgttcctaatgagcccagacagggctgcctcagaatctcattcgaccagagcatcaaggagccactaccaattgatcacagttggcctctgtgtgaaatccattagccatatctaacctaacttaaactttccttttacccatcattttgaataaaaatgagcctgcagagaaaaaaagagagcttctgagagagatgctccctgagagcactgcttcaaggaggtaaggggggacctcggatatgtaggagttttgcagcaaagggcaggaagtccaggacataaaaataattagtgttgaccaaagaaagccaggtgagtcaagttaaagaatttagcacttttctgtgtatgggaagacgcaagagtctgggctcactgaaatcattcctctgatacacacctcagccatcaggaccagaatcctgtgttttcacatcctgagtcccctcagggctcaccatggggagtggctgcagtctgatagctgctagatggcaggtattctttccttcctgagttccctcagggctcaccagctcaccatctacggtggctgcaactgctgatgactctgacacctttgtttacggatatggcaggaagcattccatttctcacaagtgtcatggccagaactggagccagttccctcactcctgataggcctgatgcagtggcaggaatgtgagtttgggg

SEQ ID NO: 34622 - DNA, 733 bp, Bovine  19866880938378
  misc_feature (1)..(1): n is a, c, g, or t
ncttcccatgtgatgtttaattgctctagcaatctgttccgtttctcccttgcagtgaatggaggagcagcagccacagcctgtggtgaaaggctgcgtttagagatgggaacagcttttaagacggggaaggaggcttctgtagggctctgaacacagtgcagccagggctttatttttagaggtctgcttggagcctctgccccctgttcagtgcctgcctgttgctggaacaggctctgaaatgacaggaccaccctttttattctgaacgacacagtaggaagggccctgggcttgaagtcaggcagacttagagtgcaatcctggctctgtcacttaaatactttgtgattacaagaaagtcaggaagcgccacatgctactgtaaggggtgggggggggcagggtgaagatgaagtgagaggacttgaatgcatgacacacgataagcacttagtgtgggccggtcacatagtaggtcctcaatacaaagggtctgttggaaagtccctgggtttattaactgcatgaccttgtttttcacatctgtaaaatggacctataacagcttctgctttcagaaccagtttcacaatttacaagtctcagggcacaatgaaaatgtgaggttctctattcaaaaatcagtaaaaatttcaacacagtgagagcatagcattaaacaaggcaggggacccttctaatccagggacctgcgcgactatacagg

SEQ ID NO: 34623 - DNA, 1588 bp, Bovine  19866880992556
  misc_feature (1)..(1): n is a, c, g, or t
ntgagaggatggggagggataaattggaagactgggatcaacatacgcacactgctatctataaaatagataattattaaggacctactgtgtagcacgggagactctcctcagtactctgtaatgggcacttccctggtagtccagtgattaaggctccatgctcccatgcaggcggcctgggtctgatccctggtcagggagctggatcccacatgccgcaactaaaggtcctgtgtgttacaactaagacccatcacaaccaaaacaaacaaacaaaaacactctgtaatggcctatatggagaaaaaatgtttaaaaagagtggataatgcatatgtctaactgactcactttgctgtacaactgaaacaatttagcattgtaaatcagctatactccaataaaattttttttagaaaaaagaagggtacatttcccagggcacagagtttcagggttccactgagaccctgctccaagccccagctccttcccactgtgatctgtctgctcaggaagcaggctgatgatgtctacggaacccacagcccagggcaggtttgcccacagcagacagcggagagggctggtggccaggctgtccaatcccttttgtaaggagcactgctggtttgctgccgaaatgagctctctgtgtaattgctgaaaaccggagatgtgatgacctttaagcagagcccacagcacattcctgaagacggttgcctccaccgccaacggagcacacagacaaacaagtgaataagcaaacaaaccaatgcctgttgggatgccaggtgctggatgcgtgttaattgcatgaacagtctcatccgcctgctggctttgatttgtgctttggggtgttccatcaagattttttaaacacaaattgatctctgttaattcatgcgtcagcgctgaatattttgacatgcgatatctcctccctttggaaaagctgtgcacgctggcaggccaatggagctcagataatctccccgctttcttctctgcaatgttccctgagcccagaattcctgcctggacttctcctctcgagattcttcctacactccttagcctgtttttctcagctgcttattcctctttctgccccaactgtcttgcctgcttcaagttttttttcttttctctagctttggggcgcaggcttagtcgcccggtgacacgtggggtcttagttcctgcgtcccctgtactagcaggttgatcttaaccattagactgccagagaagtcccttgccctcttcaatttttgttccaagagctagttctttctcctacctcctcagcccaaatccgttcatccctctcatcccttccctgctccagtttcctctctcctgcatcaataaaacccacatcgtgtctccacactctgctaccccctccgccttgcagtcctgtgcccctctcctcagctgccaccttctagcgttacctctgcttcttctgctcctgtgcaatttcctcttcttttaacttctctctctctccctggcctctatgctcctgctcagccagcctgtgggtaagagatgctcccactcagagcgctcg

SEQ ID NO: 34624 - DNA, 862 bp, Bovine  19866881062788
  misc_feature (1)..(1): n is a, c, g, or t
naagtgacttcgcacgcatgcacataccactccttgtagtcattattttacatccatgagaccatccaagcttacaaacagggaggcagggattactattgtattccacttttcagatgaaaaaaacgaagcttggaggtgagttaacacaacctgaaaataataaagcagagtcactgatgctgaatttggtgtgcctgtgggtgttacctttcaaaatggaagaaagagaaattcaaaggaataaagccgcaatggtagaatccattattctctggcatcagaagaggagatattttcggttgagagaacccccttgggcacaggtgtgtatggccccctccacctccacggggctgatgctgaaccctgagcattatcagcaggactggagactctcctccacacctcaaatcaagagcatccccttcttttcctttgcaatcctgatcgatgccacttagtgaaattatatctttcagcaaatgtgttttcagaacctatactgtctagttagtagctgtggttgactcaaacaggagccctgcttccggtcctgttggagtgtgaaggtgctgtgttgcatgaaccttgcttcacacacattcgcttccagctatgaatttactcttttaataatgcatggatgctatctcatttacatatgcaactaggaacgtttttctgtcagtagccattaaccacagcttcacagggggagatgtctggggtcccagaaatactggaaggagttttggagcagatgacaaccaactcccacaggcattcctggagacgagcctagatcttcagggaataaaggaaatattcccctgctcctttgagatgtttccttgctcct

SEQ ID NO: 34625 - DNA, 524 bp, Bovine  19866881085926
  misc_feature (1)..(1): n is a, c, g, or t
ncacacatgcgcacacacagcctttacacatccttctgcatcttgggctttgacccctctgagcccacagggaaacccacagaagatgtgtgccaagtgggcagatctccagaagggccatcatcacgtggcaagccagccctgcatgctgcacagggacagacctcaaagcgagggacagcccacttcaccctggagctcacctgcccagcagaaaccctgagggtgagccctcggccacgtggttttacacacacaggtaccaggctcgcccagttgctcacagctatctcatgcctactttggggagtgtgacagattgaatgaagatggttccagctaagagagtcctataattatcaactgcggattattttaattaaaaagctttgcatcctcagctcttaatttctaaaatgattataaatgttattattaaagaaaaatccttgaagtgagatccataaatctcagcccaggctgagatgggtgagctggcacagcagaggaggccccgtgcaggg

SEQ ID NO: 34626 - DNA, 2450 bp, Bovine  19866881128921
  misc_feature (1)..(1): n is a, c, g, or t
ncagtatgggagcacccagccccaagcactgttgacattcgaggctagatcgtatttgactgtggggatctgtcctgtgcattatatgatgtttagcagcattcctggatctaaccagtgggtatcattagcacccatcccaagttgcaataacccaaagccctccagaccttgtcaaatgttccctaaggcaagttcaccccagtcaggaaccactgacatagggggtcctcagtaaatggtccctgtcatctcaatccaaaaaccacacaaaatgccataaagaaggcttatccattttcatgcccagccccctcttcctgttgcctcatgggaaattggcagcaatgatacccacaagatctctcggtgaccctcttgagactgggaggtgccttggtggcaaagctcagatacctccctgctctcctgctgcttttttggccccatttctggtctcagaagtccaaacacaatcagaacaggtgccagcctggctcaccgggactctcgctgattgaaaactttcctgggcatttttggctgttggaacattccatttcacattgatttattattatatttttaaagatgttgagatttaagactcatcaaggagtctgtgcttgccaagacataattaggagaaaatgacagaggtagtaaatatataattaactcttttcctaatgccttttgctggcattcttcatctagccacacagcctgagaaactagttctctggaatctccaggcaactagaaaccaattaccatcgtgtttgcatattgtgtttttgagtaacgtgtacacatgtttgtgtgtgggaagtgaagtggggaaccacaaagacaaacatggacacacacgtagtcttaggtcctaattggcttttggttgattgattgatttgttcattaattgattcattccttgagtcaacaaagatttagcatttgcctattgtgtgtcaggcaccatgctatttccatcctgccaaaatctgtcctttactgtaagccatcaagtttccacatatctagacacaaagtacatatgcatgtgatgtcgggtggagttctacacattacgtacatatgtaatggggttcagagagatcaagtaacttgtcaaaagtcacatagctattaagtaataaaagtggtatttgatccaggtctgtctgattttcactaccctatacaaccttctttcaaaaaatacttgcccaaagaggtgatatttgagctgactttgagaggtaagtataggtatttactggataaacatggaaggaaacagtttatccaaaggctggtggggtgatgatttaggaattccaagaatgaagtaaatagggagatgactaggtgttttgagaggaactggaggagacaagctgggcagggctcaactcaaggagggtcttgtattgccaggcctctcacacagtccacagcagtttgggtcatacctgacctgaatgtgagcgccttccttcagcaccctggacagctcccatcagagcctctgcctccagccaggcccaacaggacaagttacaaggtgacccccaggcccattaagaaaccaggcagcacttgatatcacccagtgactgtccccagccttctcttgcccaggaagcaggggaccagttaattgcagggtgatcgccatgttcttgcggagcatttaatgtagcatgtaattgcagggtaaataaatacagagctatttccagctctcagcccagtgctgtgagcatggttgtaattacggctgaggattggcttggtgcaatttctaagcaatggctccaggcctgaactgggtcagccctcatgcaggccctatctgctcccaggagaaccagggtgctgatctagccaagcttctcctttgctcaggtgaccagggccttgatcggctgctctggactcctcaggactctaacccgcccttgcatcttggggtccctcagccttctgattggtgctaactctgggtttgtatcaaagttctgccacttactggctatgtgactatggacaatttgttgcacccttctgagccacacttttcatctgtaaaaagtagataaaattaatatatattgtgggacttccctggtggtccagtggttaagaatttgccttgcagtgtaggggaggtgggtttgatccctggttggggaactaagaaagatcccacatgcctcagggcaactaagcccatgctccacagctggagaccctgtgtgctgccactgctaagtccgcatgctcaggggcccatgagccacaactagagagaagcctgtgaactgcaacaaagatctggtgtgtcacaactaagacccgatacagtcaaataaataaatattaaaatgatgataataatacatgttgtgaagttggaaggattcaatgagataatgcatgtaaaa

SEQ ID NO: 34627 - DNA, 582 bp, Bovine  19866881207582
  misc_feature (1)..(1): n is a, c, g, or t
nctacttctgactttaatgaggccagtttttagcaaaatgaatgcagaagtcatccaggaatcaaccagtgagcagatctcctgagatgcattacttcagcaaatgagttagcatctcttggtgccgggtttccttgctgcagaatcagaatcgtgtctacctgtgcgtacaatgtccttaacaaatattatttccccaccaccccaccccttcccggtgctttcctgttttgcttggcagacccccaagctgtgtgtcacatgtgataacgccatggacctgggactagagcctggtctgccttcctgggctctctgcatcccacccagctgctgcccggaatgccctggggagggggaattggaaatacgtacttgaagtgctgacattgttatttctgctcttttatacaagcatgaggcaagttggctctgcagaatgttgtataaatacccagataagaagattagtgagaaaaccctgagagcatcatagcttctaaagcctgctttcaggccgggaagcggatggtggcacagtgccagcctctgtaggttacatgttctaacatgcctctttca

SEQ ID NO: 34628 - DNA, 2932 bp, Bovine  19866881282932
  misc_feature (1)..(1): n is a, c, g, or t
ncaacagatagcaagtaatgttgactttaaatgtctaacagttataaaatgtttcctttcaaagtgaatttaagttaaaaaattgagttatctcgaagaaaatcaccaagcaaatgaaagaatggtgttacgaagacttgtgaaaatcacaaagatagaatcccagaactgggaatgtactttagctgaaagacacacggtgtagcagtgagaattctagacccttcagaccaggtgatggggaaagtgtctggttcccagactttcttaacatgccctccagtctcagctctgagggtgagtttcacgtatccttaggatgaatgccacctatttccccctgtctatttagtcattcagcaagtagatatgttaaaaaaaaaaaaaaagactaaaagacccaaatttgctgagcagagagtcccatccagcaccaagtctgagctctgggaggtgaggttaggaagagaggagatggggttggcaggcaaagtctctggcattacaggttgcccagagagttctgagttcatcaatcaggtgagaccaagtctgagtggaggtgagctctgggtgacagtggtcagctgcttctgatgtacatgtgacccgtctgagtcagagcattgcaccgagacaggtctacaccagtgctggaggccagacagtgaggtcaccggtgtgacttattcaaatgatgtcatagagagaccacaagaataggagtcaggagccctgaactctgacttcagttctgatttctgttaattttaagaccttgggcaagtcactttatacccccagacctcaactttctcatttgcagaagggcagggatgggtactacctcttagctcattgggctatcgtgagcattagaagtgagatttaaataaacaacaaggacttactggatagcacaggaaactgttttcaatatcttgtgataatctgtaacagaaaagaatctgaaaaagaatatatatatatatcccaattattttgccatacacctgaaatgaacacaatagtgtcaatcaaccataggtcagtggttaagaatcctgcaaaagcagggggtacagatttgatccctagtctggaaactaagatcccacatgtgcagggcagctaagcctgcacaacaagtactgagcccatgctctagagccccaactactgaaacctgtgagccctacagcccatgtttcacatcaagagaagctatttcaatgagacgcctgtgcaccacacctagagaataggctgcaactagagaaagcccttgtgcagcaatgaagacccagtgcagccaaataagtaaataaataataaaattattaaaaagaataacaagcaaacaaaaaaaagttatccctgagcttcgccagggtaggaaccatgcctgcttaatgagctcatgtagacccagtgtctgtccctggtggctcagacagtaaagaatctgcctgcagtgcaggagacatgggttcagtctctgggctgggaagatacgctggagaagaaaatggcaacccactccaatattcttgcctggagagttctatggacagaggctatagtccatggagttgcaaagagccggacatgactgagccactaacagcatctgttagttctaatcctgttaagttctaatcatcttcatgaattaatatgtaagctgtcgagcagaaatgtcctacccattgaagggtcttgaaaatggtaggtctgatgatgcaatcattctctctagcaccagccattttctgcattgaggatgaatccatggcagaacaacaaatgaaggaagccagttgagttaagtggttccccatggattccaagagactcaaatatggacagatgcctgggtcccagttctgaggtgctgcaaagcacctgtgtcctgagctcctccaagctccagctttgccagtttgcccctgagttaagaagagcagaaatgttctgggctgaatctctgaccatgaagcagagagaaatggcaactggcaagagagaaaggtcaaacagtttattattctctggaaacctgcccaaggacctgtactagaggcaaaagctacaggaaaacatgtggactttcccagttacaatgactaagctgctcttgcttttctgcagcatctgtgggcttgaaagagacccatttgttctccagaaaaacagaccccagacacattcctgccttctgagctccagccacccacgagggtggaccaagtggactgcattttgcaagctgctttggagcagaaaggataaatagcttctttctttgaaatgtctcctgtgttcatttaatagaacatgattaagcatcttcttggtctaggtgaatagggatccaggatctcagagataaatgagggagacaggtgagatcaataatgcaatagcgtacatgaacccttgtgtggcgtgaacagcgatgctgtagaaatgtagaagaaaggcctcttttccagccttggcttccaggaggaaagagcctctgagctgggttttgcaggatgagtgatgtccaaaactcagcctctgtacacccacactgaatggaatcttgaagacagagtttggggcaaagtagaaaagaatagctttattgctttgcctggaaaagagggacacagtgcacttatacccctcaaaactgtgagtcccagcctggagggattttgtgaggagttttatagcaatggctcaagggaagggttgctagtaagtagcagggtgtgttgaagcctctactcctttcatctggcctcaggtgttctcttgaagagtttctctagtccctttagtctggaatgaagaatgctagatcttcagtttgttgtgggtattacttttctggggctcagaggtaaagattccggctgcaatgcaggagatcgggttctat

SEQ ID NO: 34629 - DNA, 1381 bp, Bovine  19866881365188
  misc_feature (1)..(1): n is a, c, g, or t
ntctgcagaccccagatgtgtctgatctactgtctccccggatgtccaggcagacccagggattccacttactaactaatgaatcacctttcgtctcctggactgggcttcctcatctaccaaatgatcagtttgtactaaatgatttgtgattccttgctgatctgatctgaccatctaagctaatttcagagtagcaggaggagggagatgtttttggctggattttttttttttaatttttgaaataacctgtcttctctcttcccaggagaggagcagtaactatacagatagacaaagcacaaaagaacctacaaagcctgtaaaatgaaatcacatggcaaaacgtggtcattctgaggaaaagaatgaaacagtcccacgggaagttttctgagagttttcactcaactgtcaatcagaggtacagcctggcatcctttcagaagagctgctctattcaacctaataatctgagcagacagtttgaactcagcccagtgatatcccatggcctgcgtccagatgtccaggatgggcctccctcccacctgtgtgcaccccatcaatcaccaggtcacactgatttcgtctctggaataactgcaatcaccatctgatatccagtacctttatccaaagtcttattaactctttcctggatgagtgtggtagcttcccaaggactcaaggtacatacaagtcaccttcctcaatgttagtagagcagtatttttcaaacacaaatgtgatcatgacactcgtgtattagccatcttaaatatgtattagaaggccagtcacagtctgtccaagcctacatatccacattcacctctctctcaatccattcccttatgcctcagctacactggaccactcatgcttctcagacatgggatgcgtcccatgctctctcatctttttccctcacgcccagaatgctccctaacatctctgccacccctggactctgctgcctggagaactcctattcatgcttcaaggcccagctcagtcaccagcttcactaggatatgcccacttcaccgtgctttctcagctcgagttaatcactcccgtagctctgaaactctaaccccaaagagacaacactttcggtagttggttttgaaaattctctggtggcccagtgcttaggacttggcgctttcagtgtggtgggccaggttcagtccctagttatggaactaagatcccacgagtttcagggcatagcagggggaaaaaagattcttggttttgtctttattgtcttctgggttgaaagcttcccaggggaaaggaagatgcctaaatcctgaacagatggcacaactcagagagtgtgtcaatacctatttaagactagactatg

SEQ ID NO: 34630 - DNA, 1354 bp, Bovine  19866881395734
  misc_feature (1)..(1): n is a, c, g, or t
naactggaggggtgtatttcatatttcaacttcagaatctgacctgtgatgaaacagctggctggtggctgaacagagctaggactgaggcagagaccttctgccttgaggtttgggactctcccactctgctcttgacaggctcctggggcagtagaaaagggaggatttgggatccttcccatgtcatcacttaatactgggtgaccttggacaggtttccttgcttctctaagcttcagatccttatccgtaaagtggggtattagaatcaatttcagtcttacaaaggattgctgtaaagattaaaaggagaaatgccatatgcaaaaatatctgaggctgtttttgaagcctcaagcagagttgaggttcaaacccaggaacgagtgcctcccaaggctgagaattctgtgtgtctatgaccgcatctggaagcagatgacccaaactcctcttttgggaaagtgtagtctggggctctgatccccttccgcaagcctccagcctccggcacgtggaagagatagcctcagatctatatcttagctgggcagctggatggcctgactctgaccggtttttgccttcctctttcaagatggtcctggtttcaatctttctcacctcacatgatttcccagtcactgatctggagaccagggctttagccccatgtctttgggtttggcatcatctaggctgtaacctcaatcaccttgcacttgactttgctcctccccctaggatttgactgacagaagcatctagagatgcccagatgataggagaaaacgctgtgtctgccagagttggctggaccctacttatttcaaaacccctcacaatgtacactatacccttctgaccacatgaggaggaggaatggaaggatctttaatctcttatttcagatagagttgccagatgaaatactggacactgttaaatctgaatttcacagaagcaacacattttcagcaaaagtgtatcccaaatattgcagggaatataaaaactaaaagtcagtctgttgtttatctgaaatttaattgggtgttctctaatttcatttgctaaaccaagtggccttagtttgcaatcaaccatccttcccaccatgggcccctgaccttgagcctcagttctgaaaatggcttaacctggtctgggactcggccttgaaccccttgtacccagacaccgctgatagatgtgtccccattctcctgtggctgaccctcatcatgacaacctccttcctagtgtcccaggctccctgacttcctaactctcctgctgtttcacgggcacagtcttcctccactctttgcggccacagactttcctcagg

SEQ ID NO: 34631 - DNA, 1307 bp, Bovine  19866881507183
  misc_feature (1)..(1): n is a, c, g, or t
naagaaagtgacagtttccgaattctactatggattactttctgcacacctgactccatttcttctatgatttgcagtgaacagagacatttctaaccttttacaataactgagggtagatctaatcaatgctcctcttaccctcacatcccatccttttcttgaccaggtagagtctccttgtcaggggaaagcccttccctttaatgcattgtcctgaagccacaggcagggtcaaggtctcagtggaagctggtggtcattgtagctcatccttgtttcaactacctcgttcccatctcagaaaactccagtctagggaagagaatgctcatgtttcttaatgtaactactgcatttcaagctctaagacacacattctatatccgtatttcatttagccctcacaatgaccctaaaactaggtgctttctccactagaatatttgtcctttaattttagtagccaaagccccctgagatccctgagtgctgagataagcccaagactgatttgattattaggatctacggaatctttatcttcattgtgttcacttacatcatggggatggacaatgaaatatcacaagtaggattaaaatgaatattcatcaatgtataaataagtcacactatcatggtgtgccccctgttccagtttctactctgatggcgtcatttcacagtacatgccaaggtcacctcgacgttcacctcccctgctaagaggcagctggagagaaggaaggacggaggctgccaggcagcctttattggtcattcatatattcttattacctagtcctttggaactaaagtaaaatagatcctagccacatgttcaatcactgggtccctcgcctatgttccttatgacatgaactcagtctagctcctccaattgtgattatctgctttttgacaaacccacacccccaaaatagcattttattcctaccttatagaaaagaaaactgagacttctagagttgcagtaagttcatcgtgacggtgtgactctgggatcacattattgtgatcacaaattattgatgatgcacagaaaagaccacccttcccttcaataatgtacatgctgtcaagatccaaagacacttacgcatccaaccccctccacaaagacttccaggctcctgcaatacgtaaagctttctccattctgtgtgccacataatttagtacctaattagatattgtcttacagtattctcctaattgcctcaagtgtatttattctgcttctccattaagtttatcacagagatccttgagggtagaatttt

SEQ ID NO: 34632 - DNA, 1782 bp, Bovine  19866881612720
  misc_feature (1)..(1): n is a, c, g, or t
nggtagaaggggagagatggaacatgggtgatggggggcagggagattattctgtatgctactgtaatggtggattagtctttacacatttgtcaaaacccatgaagtgtactgtacaagagtgaaccctatggaccctagttaattacaatgtctcagagctgaatatatttaccatgtgaggtctcccacccgactcgacccattctaagaggcaattcactctctgttcttgcatctcctctgccacttcctctactggtgggattgtttctcgcgtacattgaactcattttaactacccactccagtattctggcctggagagctccatggactactatcagtccatggagtcgcaaagagtcagacacgaccgagtgacttccacttcacttcattctatacagtaaccaggaaaactaatcaaacgaaatcagaagctgaatccttaataaataaatgcaaacattatacaaaagagtgaaaaaacagaaaggatgaaggggtaagaagtggagtaatatgtatgttttatattttagcagaatcaatggatttcaaaacactaatcccagcccaaaattctgtccttgggcaaagtaccctctgggatctcagatgcatcatcagtaaagaagagcagaccttccctttctttgtaggttaagtaggaggatagtatgtttttacatagcagatccattgtgagaattacatgagttaatatatgtatagaaattaaaagaatgcctggtgcattgtcaggactcaataaatgctaactactgtagttgctgctgctgctaattttattactggagaatattcagtccaccaatgactctggtgttaaaacacaagacattcatatttcaatcaagagaagatgttattaaaaacgtgtgtgtgcgtgtgtgtgcacgcgtgtgttaatctctcagtcgtgtccagctctctgcgacccccatggactataaccccccaagctcctctgtccatggaattttccaggcaagattactggagtggattgccattcacctctccaggggatcttcctcacggaagaatcgaacctgagcctcccgcattgcagacagcttctttactgtctgagcgaccagggaagccttatggaaaacgtatgactgccctaatgagagcaatatatatagtctacctaccataatatacattgagtctaaattgactactctgtggttatgaaaataaatttattacaatccttaacaataaaagggggagggaaacaggctggccacttgattttcaaagacctttccatatcttaccttttcagaaacaatttttgctccttcagtttttgctccttctagagggcggctgcatgatctcaaaagaaatcccagtgctttgctttttttccccccgttcccccaggcaattcctggagttgccactagatggcggaaggcgatcacgatggtgctgtgtcaaaggggctgcccatctgtctgcggccaaggtagcggcaagctagcgagccacctcctgcaggcatctgattgataacagggctgtaattatctttacacaatcccgattgcagctctattgtagcctctctgttaaattaaactgcacaaataaatattctaggcaacacagcctccccaccagtccccaccctggtggcttccaatctcattaacatatcaaaacacaaactcagccctcccacttccctttattttcataacaaaagggccccgcctttcatctccccagcaacccagt

SEQ ID NO: 34633 - DNA, 715 bp, Bovine  19866880353182
  misc_feature (1)..(1): n is a, c, g, or t
nacaaatagagggaggcgcccagaccattactgtgaactgggcctctgatgtgtttaaggggctgccaagtcacccagctccaaacacaacctgactgcaaggaacacggtgatacggctcctcctgaagaggatgagaaagtgacaagaagattctcgtcagtgagtagatcactctgagaacactgtcccccacccaaccttggagattaaggaagcagggagggagaaaccacatgagctcttcaccacccagctaaaggcctactgctttacagaacatcaatattaaaacgctcactcggctggtctggacaaaaaaaagcagcacgtgggactgactagtgaggctgaacttctataacgattaactgaggcaagaaactattcacccacccattttttcctcaccaaaagtgagtgcaaatacaataaagagagtcacatcttaatttttattctctccaactacttctgcagtcagttttatacattcaaggtattttctgaccattaaaaaatatcatgtggacacacccctatattttaaattaaaaaagaaaacaagaaaaaaataaacagtgataataatgaattataattcattggacagaaacaacaacaacaaaaagatatgaaccctacgtgttctcctaaaaagtttagaagttgtgcctcatacagccaggtccataatccacgaagcactggttta

SEQ ID NO: 34634 - DNA, 924 bp, Bovine  19866880363075
  misc_feature (1)..(1): n is a, c, g, or t
nactcacgtccatgagtcagtgatgccatccagccatctcatcctctgtcgttcccttctcctcctgtcccctatccctcccagcatcagggtcttttccaatgagtcaactcttcacatgaggtggccaaagtactggagttttagctttagcatcagtccttccaatgaacacccagaactgatctcctttaggatggactggttggatctccttgcagtccaagggactctcaagagtcttctccagcaacacagttcaaaagcatcaattcttcagtgctcagctgtcttcacagtccaactctcacatccatacatgaccacaggaaaaaccatagccttgactagacggacctttgttggcaaagtaatgtctctgcttttccatatgctatctaggttggtcataacttttctttgtggggatatttggtgaatagtactaactgctatcacacaaggacaaggggtcttattcttgtttaattacctcttggcattactgtagccatagaagtattttgcattttttcttttctaccagtgttccttattggtgaaactgaacttgataaaaatagtgtatacaaggttatacttgactaaagtctcaactatttggaaaataatgataataaagataattatgtatctatttggagaaggaaatggcaacacactccagtattcttgcctggagaatcctgtggatggaggaccctggtgggctgtcgtctatgggattgcacagagtcggacacgactgaagcgacagcatgcatgcatgtatctattatgtgccagactgctcacatagattatctctaattgttataagaatcctttgatgttggtaatattagtgcaagattgactaatattaaggttggtaatattgactctaaatctcatgttttttgt

SEQ ID NO: 34635 - DNA, 1048 bp, Bovine  19866880388567
  misc_feature (1)..(1): n is a, c, g, or t
ntaatggtctgggcgcctccctctatttgtcctgccttgctggctgagtttaggcttaagtcctttattttatctcagtttgcttccggctttctgaaaaggagtgtaataaaaacctcatgcttgaaaagcacttaagacatactgagtaggaggtgctactggattacaaagcactacattttgtatttaggtttcagttaaacactttcccctgttcttcctcccagatttgagttggtgtagttccttggacaagggcatgccttcaggggaatctgcatttatcatatggtcaagtggaagagtgtaggcagatggaggcaagtgttgcattaagatgaggtcttctgggatgtacgtaggtttttctgagaatttgcctgcacctcgcatttcattgtaaggcttttgtgttcttggagtggggaaatctgcttgtaatacataccttccttgtctccgctcatcctatgtttgagaaatgagctgagaaaaaacaatcccttgtgattttgggatctgggttgctttgttattcctcagtattgtatttatgggagatgatgccaggctttttgccaattttttttaattggaagaaaagaacacatttttctaatgatacgatggtgagaaagatagaacaaatgaaaagggaacaaatgaaaagggaaatgaaaccccggcttgagtgaagttttcagtacctgctacatgtagatatgagttggttctgtattgggtttaagtgaggaggctcatgacgagggtggggtatataaccggttacagagctcttgccaccaccgggtactgtggcagtgattggagtctgtaattaggaaagcaatcaagactacaggattagaccttccactttagaaaagaaaaggacctggttttatttaccatgagctcagcttgcagatgatcattttgctgtggtttttcaagaagaccaccttgggagaaaggcatgtaaatcgcatttcattgcggttaaacaaatcagtgaaagttgcagggacaatccctccccggagta

SEQ ID NO: 34636 - DNA, 1131 bp, Bovine  19866880449454
  misc_feature (1)..(1): n is a, c, g, or t
ntccatttcaggaagtaggaatttaaaagaaaacatggcctgttattgtctcagagtttgattgtgtaattcagctcgggcacttttcagcagttctgtgccataagacactcccctttaggaattgctttagtgaaaggtattctgggagttgtattgctacagagaatttccttcgtcttaagaaagtgtaagaaaactccttatttggattgagtcagaatggagagccagtccactgagagaatgtcagttagaagaaatgagcatgacattgtttttgatctattatcaaaagaaattcttgttaaggctccagtcagtactctattttagaattagtgtgtacagctgagcttgtcacagggatacctatattaccaagtttttggggggttgaaaattgaggttggaatttatctcatagaaaatctcgtcgggctgcttgatttaacagtgaggactgtctaattgcatcacatagtggacatcatccttcagtacaaatctgcgctccaaattctgacaaaaaataacaaaagtacgtgaaaaggttggtaaatgcttaacattttattgaaaaaattattgatatcaataacttttaattttctcagtcctttctgagcctgctgggttaaagaagtgtcctctcaagtgaaggaataaaagatttcattagtagtaatttgataaatcttggtagagcccttttgatgtatttccccaaaactgagaaagtaaatgactaacaaaaagaaaaaaaaaagttttaattgttagtcatgtccgactctttgcggccccatgaccaggctcctctgtccatgggattctccagggaagagtactggagtgggttgccattcccttctccaggggatcttcccgatccaggcattgaatctgggtctcctgcattgcaggcagattctttacagtctgagccaccagggaagccctggtagaacaattcactctcccaaactggcccttttcttcctgcttccatagcctctggctctcataataagtgattggggattccaggatcagatcaactggggatctcataatccactgggctcctctaaccaaaaaaaccatattagtgttctattgttacctaaa

SEQ ID NO: 34637 - DNA, 4087 bp, Bovine  19866880455721
  misc_feature (1)..(1): n is a, c, g, or t
nctcccgttgcccttttcccttaaatctttccgcactgatctgtcccctccgaccccagttctacgcggttggagccactgggggtggtgatccgccagccatctgtgtccctccctctatcactgaagcaccgctccactgccctccccaaaatcgaatcttatttgacggccatttgctcttttatctcacagaagaatattttaaataaaaaaggacactttctttgataggaaatacctggagggtttgataaaaatatagatcgccggcttcatcccagaatcacaccactgatgggtagagagagatttgcattttaaatctgagaacttccgttattacttttatgccattgtaagagtggggaaaatatgttcagaaggacatgcttcttttcataacaatccacaaatcttttaaaagtatgtattgctgaatagacaaatgagaagcagaaatatccaacctcaagcagaagttagaattttaagagctatataatgtgtcatcagtaaattttcaaaagacagaaaagaaaaatagaaaacgcagcttttgtttcattacctgaataggaagagtcatgtagcaacactgttggagtctgaaggccacacagcatcgtgtgaattgatatgtgaccttaattctcagataaaagaaattaaaatacagtttaggtaaagaacttgctgtccacttttaaaccttttgttggttcattgtcacttaacctaggcctcatttacctggggatttgcacagaattctgctggagggcctcagagttgttcaataacaatttaaaagccaatttaggattaggcagtgtaaccaggtgagcggagggtttcacttcgcgaaagaaagccgcagctttgccaggaagtccttactgtgaggcccagggcttgattagcccgggtttggaggagctcgcactcagcgcggggattaatcacggttcaagctacaccgtcccgttcatacaggcagcggtccgtgaggacaggcacgcgggtgccacaagattcaatacttcatgcctcttccgcgtatgaattagcacttaggggatcactgaatattaagacagtcactcccgactcatgctgaagaagtgcacacgttcagaagagtcatagcggaaatcaggaaccagtggggatgcgctgccttgaataacttgatgtgtctatcctgagactgcagtgttttccttagtagagaaaggcacacttatgaaacatttctcagtcaatatttttatttctctcaaccaaaggctatatcccctacctatgcttgttccaacagtgagcacactgtgtctgtgcggtgtggccacattcaaagagacatggagtccttctgtgtgctcagaattcttgccagtgaaaaaggcgggattcagagaaacgtgtggtgctcagcaagttgtggagagcaagggattctccttcaagggcactgagatgtagattttaagagagtagcactgccgataaaaattattaggttcatttacatttctgcagataaaaccagtctctgagaagaaaggaatatgtgcaagagaatagacagagacaaacgggcaaaaaaatcaaaggctggtaaaagggatgatgagtagaacaaatggctgattgttcatgtaacaaggttctagaagagagtggttccagtccagagtggttcagggatcagcatcagcagcatcacttggaagcacgtgagagcggcagcactctccctagacctactgaataggactctgtattttaaccaggtctctaagctgtgcatacccacatgaatgtttaaggttccctgttctaaaacctatagccagagagaatgacgagtagagatatgggctttgagctccagaacacgtttcaagttttatttttagatgaaggaaggtagagtaagagtttgagtctgggagttattttagcaagaggaatatgctactgtgtatcagaatatttggatatattaccattacgatgctggagaagactcttgagacaccctttggctgcaaggagatcaaaccattcaatcctaaaggaaatcaactctgaatattcattggaatgactgttgctgaagctgaaattccaatactttggtcagctgatgtgagcagctgactcattagaaaagaccctgatgctgggaaagactgaaggcaaaagaaggaggtggcagaggatgagatggctaaatagcatcaccaactcactggacatgaatttgagcaaactccaggagatggtgaagaacagagaaacctggtgtgctgcagtccctgggatctcaaacagtcacatgctacactccatgaaaccgcaaagagacatgactttgcaaatgaacaacaacaacacatatacatatgtataaaagaaaaacaattagaatttaattgaggtagttgagttgacaaccatgtaggataagtactttaagagatatttaaatgcattatgctaagtcacttcagtcgtgtctgactctgtgcgaccccagagatggcagcccaccaggctcccccgtccctgggattctccagacaagaacactggagtgggttgccatttccttctccaatgcgtgaaagtgaagtcgctcagtcgtgttcaactctttgggaccccatggactgcagcctaccaggctcctccatccatgggattttccaggcaagagtactggagtagggtgccatcattctatattttcttttatactaattcctaaaatgtatcagaactcctaactcctccattcccaaatactaaatgttcccaagaatgtcattctcaggcaacattttatcaactagcaattcaaaaaaggctcactctctacatgataagctcacaaaacatacatcaacctagtcagcacctaaagaaacctaatgcaaaattgtgattaacaccatgaaaagtaagggtcaagatgaaaagacggcaaagactaatttgtgtgagagaacagatcaagaaatatataggtcctctgatatccaaatccagggatttgatgaattctaatagcaggggatgactgtactgtcagagaacactgggtaagagacagatagtggtggactgaatgtaaccagtgtcatttacctagaagttcattgatagagaattgatacaatgtcaggaaaagatttaacccaggtgtccttcctattaaagaatcatgatgataatttatgttgcagcactgagcatgatccacactcaagagtatgaagttgtgagctttttatctgtggcttcttttcctctgggcctctaagtcattttgccatgaataagttctctcttaaaggcatacacagcagggttgcccagtatatataagaatcttctgcaattacagacgagtccgtgtgggaaaccatctgttgaagactgttatctatgctaaccatactgtactcagacactaaaacaactgtcctgcctcaatgatgtgtcacactaattctttcgatttgacttgctcatatgcaaagttggtaccgcctgtggacaatgatagcagctagtctaacttgaagctaacagccagttaatgactaagtttgctatcatagttccataagctttattttaatcgttgttaaagacacatttccttggtgtaatattctacaagaggcagtttagtaagccacttaagaagctgagatgtctagacaaaactactcaacacctctttgggccccagttcccttgtgtctaatatgaggataatattaatgcctacttcatagagttgttgtgaggattaagttgcatgtgtgtgtgtgtgtgtgcgtgtgcaggcacatgtgcatatggcactcagctcataacaagtgctatgtaaatattggttattattatcaaatgctagctctctaaatattactaatacaacctgtcaataagatagagctgactttattacttaacctcagtgaaggaaaagacaacctcttcaaagctttgattgtgttcttgagagagaaaatttgaccttgccttcaaaatttattagaattaaaag

SEQ ID NO: 34638 - DNA, 1975 bp, Bovine  19866880503197
  misc_feature (1)..(1): n is a, c, g, or t
naggaggacagtggttcacccgcggtcacacagctgcaggggcggtggggcaagaatgtgactccattcgcttgggcttcaaagtctgtgctcttttgctattctgactctagcataacaaaacagagacatttctaggggaaactgttctagatctaattctgaacagaaagaaactggtcagtaaagggaaagtagcaaaaatcttggaaggaaaaaaacatcattttggcagaacgaagagagggaggacagaaaagagccttgatctgcatgtgtgggatccacactgggaacagaattaaaatcaaggaagagagcataagagagtaatccctagacacattcagcaattttgtttcccaagcttaaagaatccaatcctacaataacaataatttaaaaaaatatttaatctatcactgttacgactcccccaaatcagagactcaacctagcaaactacatcatctttgtagacatgataaaaatgggagctgggaactaacataattttgaggatttgtctttaattgaataatactatgtctaacggaagctgaattgtacatcataaggtttctagtgagttctgtcctctatgaagtctagtttaataattctattataatgacttgaataataaataaccttgaaagtcatgttatctaaaaatttaattagcatacagcgaggatgacagaatcagcaattaaaagacctgaaaagtctttagatcaaattgaacaagttgttaaaataaaattaagtttaaaattttctaattgggatctaaataataagaaaaatatagggctggagaaatggtgtttagttgagaagaagacttaatgcaatctttgctaaagttattcagtttctctattgataaaactaaatggcttgtctaaaggatatctaaggtctactccatctcaaaattctacgaaatatttaatgtttatgatttttcttaaagtcctatattttgcaattggttcttcctttttggattacctatttcttaaaatcggagacggaaactgcaacccactccagtattcttgcctggagaatcccatggacataggaacttggggggctacagtccatggggtagcaaagagtcggacaggactgagcgactaacacacacacacacattttcattattattatgtttggtgatctgtggtcttttactactgtaactgccactccaggcttctgactaaggaactgtgaggttatgaatgggtaatgttttaagccactaaatttgtgttaacttgttacagagcaatagaaagttaacataattagcaacctggaaacattgaggaatagctttaagtgtcaccacacagaaaccactagagcaggtgagcgcttctgtgaaaagtatataaaagagtgaagaatatatgagaaaagccttgaggatgtctataagtagagtgctttaaaaaaagaagacgttagtagtagtacatgatttaaggtatttttgctaagtcacttgagtcgtgtccgactctgtgcgaccccatagacggcagcccaccaggctcccccgtccctgggattctccaggcaagaacactggagtgggttgccatttccttctccgatgaatgaaagtgaaaagtgaaagggaagtcgctcagtcgtgtctgactcttcatgaccccatggactgcagcctaccaggctcctccgtccatgggattttccaggcaagagtactggagtggggtgccatcgccttctccagattcaaggtatacttcagaattaaaaatatgaaggaaatactctactgataacatggaaataaccaaaagcaaacatttatgtctacctgttctctcactgacccatttccaccaggcactctgacgtgcactctctttttggtgagctgctatttcaaaaaatatgaaccaaaattttgcattaacccatccaaatacaa

SEQ ID NO: 34639 - DNA, 3160 bp, Bovine  19866880550234
  misc_feature (1)..(1): n is a, c, g, or t
ntgaacagttgggcttaacagtgattgacctttgctgggtgatacggtgaaggcagagaacaatgaaggggttctggaattttaaaagagtatcattactaactgcagtttcaagctgggcaaggagagaggagagggcataagggaattattgatagtgaaaagtcaactagttcaaggtcccctgagagagcacaaatgctggagtgggaatggaagagtatctgagctgatcagagcatgaaatgctaaagtggataatttagaagtaaagcaactatggagataacattttggagtagtcttttccatagattgctacgatatgttgaattattttgatggagaccagccaagagctaacatacaaatcacaaaacatagacaaaaaatgactatggatatttagcattgctgccatttataagctaataagtgatcatttaatgttttgttcaaatctcaagtgtcaactctgaaaaaccaagggttacaaaggtaaactatatgatcctaatatctaaaaacgagtgcagctttctcaaaaggcacaagctcaaaataaggggaaaaacatgtctgatgtaaccagcatgtctctgtgatttcctcccctgtctttgtgctttgatgcagacagagcagggctgagtgaaagcccattaaaggacaggtgtgcatgaagctggcctgactctgtaactgacagagcagaatgaaacaaaccacttctcacactcaccttgatgttaagtttcccatttctatttctggtccagatttcatgacatgggctcaattactggcctcatgaatccattcccttcctcagttaaaagtgtaagtaaaattaacatctttttctttgttaaggtgtagaatttattccaaatgggtaatttaagactttctaaggcaattcagaggccacgagaaggagacagtctgggtcaaggaaaatgtggcacctttatttctcaaaggatccagaaagagaaagtctctaagaacaaggaaactgggggctaaatactgcctatattttgcaacatcatcatcaagaagggaaagtggttgagtcctcaccaaccattcacttcatctcagtggtgagataaaggtgtcaatgcaaagacaagaccatgtgtttcacttttatcctaatatctctacaaaatgcggtttagtcactgctgctgctgctgctgctgctaagttgcttcagtcatgtctgactctgcgaccccatagacagcagcccaccaggctccccagtccctgagattctccaggcaagaagactggagtgggttgccatttccttctctaatgcatgaaagtgaaaagtgaaagtgacgtcgctcagtcgtgtccgtctcttcgcaaccccatggactgcagcctaccagactcctccgtccacgggattttccatgcaagagtactggagtggggtgccattgccttctctgccttgtttaaaccgctgttacagtgtctgcctcattttactttctatttttgttctttatgtaaataacctctgaatggagtggtagccagcctgagtagatgccaagtcttcatcagttttgtgctccttggaggactacataatatactttatatttcatagacaatcaatggatgtttttggagttaaattcagttactctaaactgtttgacctctgaaaatattttattatccatgttgaagtaaaacgttagaattttaagatgattatggtaatttttgttttaaagatagacagtttcactcaatagtgtgttcacaaggtggttgatgatgcaagtgccatagaggactcaacagttctgttctagtttcaatagtccatatttcaacaattacgttcttcatgctaaactagactataatgttagatggtaagttctgagaggcagaaacatgcttgtcttaattactaagaattctcaattcttagtacagtgcctggatgcagtcagctctcaattcgtatttatgtgattgacattagttaaatgttgagccaacttaaagcttttgagaagcaaataggctatcagtaaatcagatgatgagtcaaataaggatataattccaaagactccatcgcttcagatgtgccatttaatgggcaccatttctctctttttatattgtgcattccaaggtggcatgtcagatggttataatgcacaaggtatatattcagctttgtttctgtgctattgtcacatgtacagcaaactgaaatggaatatattcatttatctgtaagattgcaatgactctacttttgtgactgtacctttctctttgcccgtctcctggctgtaatcttttgcgtagtttctggagctggcctctcggtgtaaatccttatctgaagcctacacttcaccaccactttttttggagtgagcgtggcagcaccgtttctagctgtggaactgacagaatcctgagagataaccagatgcataagttacttcccatcatttttaaaaataggcgttggggcagaactttgccaggggctcaaaactacagtgtgagggtacaagagtactgggtcattttactgtatttcctgatgggaaacacttttgctgcctttatgagtagcatggtttgctctctgacaaaacaataaggctgtgattccaggtaataagcctcctgatgggataaccactattatctgctagctggggaagttttcatcatccgtctcaagtgaaagtgggaggagaaagatgggaggatagtgaattaaaaaagagccagaaaagatgaatttctggtccaagaattcctgcttttttcccccctcgttatcttgaggtttttgtgaatgttcataaataagtacctttactaaaagatttcacaaggaagattaatgcaacaagttctttgaaaactccaggaaatatgaaacagtaaaaggatttctctcctcgcccttataactgggtatgtgcttccctggcaggtggccacatcctgccagagcacaccctccttgaaactgtcttgttggagcttatgtgtcttcagttatttgctggacattgtcagaggagccagaagaaatgaaaaaagaaccccttccaagtcactggaagccccccaggagtccttggtagta

SEQ ID NO: 34640 - DNA, 929 bp, Bovine  19866880582073
  misc_feature (1)..(1): n is a, c, g, or t
nacagaagaatgtaactgattcttgtaatcagtaagtaattgattcttgactgtgattcctaatatgtttgattatatcttatagtagtttttcctggatttttaaattgatttttgttgttttcatttctttttgtggattggtcttctctataccatacatataatcgacatttaaacagtctttgtctatatattgtgttcctacttacacgtttaactgagcaatgttcaaaattaatcagtacttcaatcttcaggctgattttattactttatttatttaagcaatttaatatatttttattttaatatcattttcagattttcctacaattttgagtgggagatttcttgtgtgtgtgtgtttttttttaatctgttgccaccctcatggatatatttccgtctcttgtcatttaaaaattttacttgtatattcttcagtgaaacttgtcaactgatgagagccttatgcctgatataggttgtagaggcagcagttttccccccaagtttatctgtcttttccctgcaggtttaattgtttcttgaccaatttgtttgtttgtttcttgacacaggttcctctaccctgagtacctatgaattcatattctatactttttgtttagggtatattctttttcaactgatggcccagagtatgtggcctacatctgtttgcatttccatgccaaggtggaatttttttctttccctagttcactaattctggttctgttttcatagaagagacagctcccttctggttcctgggtttgtggataaactctggcttctaagttctggcttcttaccttggataagatctgtagtagtgttagctcttattcttccttattcatgaaacccccagcctctacttgtatatgtgatacggaatcctgtttacttaacctttgtag

SEQ ID NO: 34641 - DNA, 1415 bp, Bovine  19866880658518
  misc_feature (1)..(1): n is a, c, g, or t
ntgggtcgtgaagttgactagatctataattccaacattatgaaataatctttagaacatagttgcacaaaatttataaggtttgggggtcgatgcattgacatctttctgttctctggtctaaaaggacagcagagggagccccctgcatgacttaaggaaaccaaaggcaggctggagaagaaaggtttcatggtcggaaattatgcatggtgccctctgctggaatcactgattgaaagcttggatttcaaaaagaaatttgcaagcacagaacccccaaaactttatgttaatgtgtgttatcaccagacatcataaagggcatagcagaattttctaaataaaactaataatttctttgaattaaaaaaataaatatatgctttacagtttttacatgaaatttgaggttgaaaaatgaaacaaatgtctgtataaaatctcacttctctaaaatttgtaacattactaagtagtcataatagtttctccataagtctgtaactcttatattctagaatcttaacatgaagtgtataaactatgacattcatatgacaataatgcaggtataacatcctaatgtaaaatagttttacagtgggtgaaataatccattcaaaaggttttagatttgggtttgtaccgactgaacaatatgattaataaatgtttttccttatgatagctcaccaatgatcccacttagagaaaaccattttaattctgcttactttttaattcctttgaggaatactccaaaaaaggtatcttttaatttagagtgattggtaataaaattactttcaattttattgtaaataaataaatattaattataaatcagaaattcatttctatcgagaaccaacaaatctctcaaattttccatacaatatcatgttatagtattatgtacgataatactatgtaatcacttgcaaataagacatttatgaagtccactgtggaaaccacttcttacttaactctcctattatatttaaatcccatgtagaaaagcactattgaactataatttgaaagtaacagaaatttgaaaactatttctttcattaatgtttgttacgatcaaatgactactgaaagggtccatctataggaaataaaccagatactgaatgggaaagagtttatttgatgttctgcttctattttacactgactaggctagttaatttactattaagcgcttttagtctatgacattactttgaaactgtgcttagaagatactcagaatgttgaactctaatggtgttcagttgctgtcatgtccaactctctgcgaccccatgactgtagcctaccagcctccactatccaagggattttccaagcaagaatactggagtgggttgccatttccttctccaggggatattcttgac

SEQ ID NO: 34642 - DNA, 746 bp, Bovine  19866880703814
  misc_feature (1)..(1): n is a, c, g, or t
nttttttattttagtgggtgtctagatatttgccagtatttctattttttggctatggtttcattgaaatgttagactcctaaaaaggtataaataacagtaagtagcttaaaattttcatttatgatgtgtattgtgttctattaaatcacctataaatttgcctgtcatcacctcatgataactgacaataattaggattgtctaaacactttgaaagtgattgttttttctaaatcatttttaataatcttcttggttagcattctcacatatactgaaggacatggttccagaattaggtaatctgcattagtatttgctttggaatattaaatcattcaaaacatttgctctgatctgccttctttcttcacccaattatctgtgtctttttcttttaacctttaacttgaaaggtattatttcatgaaaaacataaaaatacatttcacattcaattattatcattagaaacagtacataaaacattcaataaccacatgtcaacagtagcaccattattcttcagatcctttctttatgtcttcggattgtttaaaaaaccaataaggggttttttgactaatatttcctggctttcagcaaacacatatgtattctctttaaaaacagcaggtcccaccatacagaatccataatcctgagcagctgtccagctaggacagcactgtctttgccagccctactcagatgtgttgatagatgtacaccaagtctgctag

SEQ ID NO: 34643 - DNA, 1328 bp, Bovine  19866880714104
  misc_feature (1)..(1): n is a, c, g, or t
naaacctaaagctacgttctcctgttttagaataataaaggttgctcttttacatctgtctttcagtaggttctgaacacaggagaagatgaatgttatttattgtgacttagtattttcaaattctatctaattctctgcctaacctgggcttctacccaagctaatgaatgtggctggagaaaaacacacaactgtaacactttaaacttatgaccataacctgaagcttgccctcagcaccttttacacctttgctctcctctaaaactgccacagcccctttatcctcctctactcaactgatgacctggcttctgaattcactaggataatagtcagtgaggtgagagcttccttattctctttcccaaatctgccaaccctcttataactcatgtgtcctccctactcctactggcatgtttaagaccagttgccactctatactcaaatctatcccgcctgctttactctaggacatgatgcctgtaaacacttcctttcacttctgcatcattcatttcctcatctctgctggatcattctcatcagcacacaaacattgtatcttccaccttacaaagtccttccttaaccatatatctcttagtcctttcaggatgatgtaacaataatgtcataaactgggtattattaagcaatagaagcttatttctcatagttctggggattgggaagtccaggattaaggaatcagcagatctgatgctgggtgagggccttcttcctggtttacaggtggcatcttttctctgtgtctctctggaacctctttttaagggcagtaatcccattcatgaggactctgtcctcaaggcctaatcacttcgccaaagcacctcctccaaagccatcaccttgaagggtaggatttcaacctatgaatgtgggaggtgagggtacatacaaatggccagtccccagcattctccttctagcccctgtcccatttctctgtccctccttacagtccatctcaaaagagttgtctaaactcactgtcatgctttctcacctcccactttttcttaaatctatagctttcatccccaacactccactgaacccattcttttaaaggttgcgaacaacctccaaatccaatgatcgtttattaatcctcatcttattcaaactcctagaagcatttggctgtgacgatcaatccctccttttttattcatgtgacttctggcatttcacactctcctggatttctttctccttcattgactgctcactctactttgctggcacatccttttccagcctctgaatgttgacggcccaaggagtcagtccta

SEQ ID NO: 34644 - DNA, 1148 bp, Bovine  19866880722506
  misc_feature (1)..(1): n is a, c, g, or t
nttttattttttacatttaattctttgacttgagtttgatagcggtgatgaagaaaggagtaccaaaagctttgctctttgaggacaatgaagtcatcatacaaaagagtagaacttccaattttcctttggcaggcaaaaatctaaatttaccttttgggaattctttttcattacctgttgttgctcagtcatgtccaacactttgcgaccctgtggactgcaacacagcaggctcctctgtccttcactatgtccctgagtttaatcaaactcatgtccattgagttggtgatgccatccaatcttcatcctctgtagccaccttcttctcttgccctaaatctttcccagcctcagggtcttttccaatgagtcagctcttcacatcaggtggtctaagataggcttttaattttcttctatttctcactctcattatcttttgtttctcttctttctggaaaacatctgctcttgggactctgtgaaagtttaacagagtttcttaccagcagccagttattcccaccatatcaggatttcacatcgagataactgattttaaatgttgatttttaaaaataagattaaaatagtttcacataacagttcctactgtgagcattatttggacaacacctctaaaatagttgtcactcaggataatggcttttttactactgattcaagatctctttgtaattttgacttgtactgtgcactggccagagtgatgattacataagttaatcaaaatatttaacagtgcccacaaatataaaagtatccatgacaattagcttgaatgacccatttattaggaacataacacaaattctatatacacatgtcttggacatctctatgtaccactgcggatccacttggccttatccttcctcgcagttgtggttgcagggaacaggttggcacagaggttgccctgcttttttatgtgtaaccagaagtgcctcaccttcgtccttgtgcgcctcctctgacacccgcagcatgggatgcttgaacacacatgagcaatctgaaagtgtgggagatcttgcaacccatggggaaaccttgaccaatggggaatgtgagttaatggatacatgtttcaccttttcatccttccagcagagcttcca

SEQ ID NO: 34645 - DNA, 1095 bp, Bovine  19866880731375
  misc_feature (1)..(1): n is a, c, g, or t
nactataaggcagaaaatgaatcagcccagtactaacgattacagtatgagacagtgattcatatgaaaggcagcataattactgtggatatcagattggatttcaaaatgaggaaagaacgttttagtactttctggtctaaggataaacataattgatttatgaataacatgagagtccagcttctctggcaaatatattgtatttcatgtagcaatgagcttaaaggcatttttcacatttctatgtgaaactcaatattcgcatgccagggaagtgaggagcaggagtggctggagtccctgagagatggcaggtcagcatcagacatgccagagcaagcccatctgctgcatggcagcagcaggatcaatgatacagcccagcttgaaaaaatgataggtgatggtttatttattcatttatttagttgtttaaaatgcaaatgtgatttactagaaagaatgaacacccttcttccccagaggctattctaaggaagtttttttcagtcctgattcttagggaagctgtgcagcccatctagtctagagcatggcacaggtacccttctgaagtccctgttgcactctgagcttctcaccaatactgtgtttaaagggctgggagaaatcacatgtggaaatatttcataaatgaaactttcaagtcctgttaggttctttgaaccatttttactggcatgacttggttaagtggggctatttatttgagttaggctgggatagtggttaagatcagagacccatgagacttcctgggtttgaacccaggttctgccgagtataagctgtgtgactttgggcaagttgagtggcacctactcttttggtgattaatattgctaagtgcctggcacagtgttatgtgtttgctaaataataatcatatatttgatctttttgataattctgtgaaaaaaacaaaacatacaggataagagaagttcttgcagttaaaagggaccttgttattgtcgtttagtcgttcagcgtccgactctttttgtgaccccatggactgtagccctccaggctcctctgtttatgggattttccacgcaaggatactgg

SEQ ID NO: 34646 - DNA, 1509 bp, Bovine  19866880756382
  misc_feature (1)..(1): n is a, c, g, or t
ntgctgggtatgatttttccatgcaaagaattatccaacaaaagcctttcccataaaccccctctgctctgcacagggggttctacctgctcaatttttctataaatctaaaatatccagtttattaattaaaaaaaaaagcctttcaccatagagattaaatcagaagctatgctctctcatgtgctatcctcccaaatggcacacacatgtgaacacatacacacacacacacacacattttccccaattttcattaatattagtttggtgactgatacaactaactagatttctctcacatataatatatatacaagtggtgtatatttgcaatgcacatgccaatataaatacacgcacatatgactgagaaaggatatcaaactagagtaaaacatgcaattatgaatcataactgacattgagtctgttatcatattatgatttgtaaggtgttctgtgcacacagctgatgatggaagagatgcagacccagtgagctgagaaaagtcagagatatcttttgtatatttcccccacactgtgtaatctatgtttacataattcattttcatttgagaggggcagcgactcccatcctttctcctttttttctcattggtttaacaaattctcaaggtcttttaaattaactagaaatttcatctcaattgaatttacaattgtatctattaacataatctattaaatgataataaaggtaacaataaaagataaaatagagacaatgatcttaaatgtttatttttgcttggttacaaaataataaagcaaaaatgttaattcttcacataataaatgttttgtctggtttatcttctacaataaagaattattaataatctctctgtgggtggaagaaaacactgaaatgtagtttccaaatcttgctaatatagttagtcatttattttgggaaggttgttcttaaccaagttagcatgatcattaaggaatatttggattgttctgttttgttagcatagtagatgaatggttatgatgggtaatataatttattatataacttattctatgtgattagtatattacttaaatttattttaaatgtatctttatataaaaatatacatattacaggtataagtacttcaattaaaattagtttccctaatattataattcatagtatcatacaagaaagtaatttaaataattctatttgtatatattatataaatatctgtgtatgtgtatatatataaatatatattgcaacagtcacaggtcaaagacaaatctcatgaacataagttataattttgtacaagtatagctgtattatgaagggaaaatacagattttacttgtatattatttatcacatatgtattaaatattatttgacaatgaagtagtcatataaacatacaaatatgccaatagcatttgtaaattacttcagaaattaccatctgcagatatgtttttacagttataaatatgttacttatacaaatggat

SEQ ID NO: 34647 - DNA, 797 bp, Bovine  19866880758777
  misc_feature (1)..(1): n is a, c, g, or t
ncttattttaaatatgaaatgtatctctaaaatactaacaaaatcaattctttttggggagtcttgcaaggtttggggatttctgtatgaaagttatcctttccaaatgactgcagtatttaaaatgcagagtcttacttatttttcctcttctcagattactctatgaccctctttctatttcagtacatcactgctaaagcagtaaactggaactaacgggagaaagaaaagctgaaactgcagtgttctagttaaaggtgggtaaacaacaaggctttcactggatggagcttcagaagtacagtctttaaaccaggctgccaagtgatcccctctcagtatatccctcagcttatcttcagctcttcaagcactagccggtatttatgggcaaaccaaaacaaaatgagtgtccttgatttttcaagtacggatacatttagatgattctttgaaatttgttcttatcagtctctattgataaaaaatttttaagagaaaaagcaacttgagtaaagattttggtatcagcctttttctgagtgtagcctttatgtcagtctaaagggaagaaattgttcggaggcttgtcttaaaaggctagataggaacacggtgccatttggtgctaggccccactgacagatttactgcctgcttggagccgaggccgcagcgtgatggaagtggcaggtgagggcttgcaaagaagattcccatgctccatgcatatgtgtaactggcaacatccagggtcatggaggggcaggcctgtgtttacagtcaggatttgt

SEQ ID NO: 34648 - DNA, 1248 bp, Bovine  19866880784500
  misc_feature (1)..(1): n is a, c, g, or t
naacatctttgcaaatttctcatggtctaagtattttgtaagaagggaaatctctgacttattctcttgtatttttagtagagaaggtcagatcgggttgtgtctagcagaggaataaatgaggtactttggaatttctgtagaattcaaactgtgaagggactgataatttctgagcattgccaaacccatagggtgaatcatatgattaaagaaatgtatagtattaaggaaatgtatcctaaaagcagaggtgttttaaaatgcattttgatattgctaatacttttttttttccgaatagctaataattcagagctctgagcatgaaaaagcataagatttagccagatctctagaatatgggtaaaagagatgcagaatcacaaaattcatgtttgcctggggccctaaacatatcaagtcatccacactactcaaatgatctggattgctttaacttctcgtcctggatctttcagtgtcacagcagactactgtgagggccagcgacccagtatccatggccaatttctttatttagagccccatctggttataaaacctatcttattccttggagatagaccagaaccacgggtccaatttacatgggttaggcagtacaagtgcctcttcagttgcaatattcttcataagctgcaatccattaattatggtttatttagttcgcaatgacttagtaacagcagcagcacgtggtctcctgaccacatggcttgatggccatcatggcctcccaacagggctcccagcagggcttgtgcagtgctcccagcctgtgtagaatgcagcagcacagccccttagtggtgcgagtaaccgaaattggatttgattgtctctcctctgtagtttggtttgggctacttttgtggtggactgactctcagttggctttgcagatttttaatgaggagcaaacattgttttggagtggcacagctgaggagcaggggcctggtgaaagctgttgtttttggcagaaatgatggcagaatcaggaataacagctgggaagagtgcacttaactgtgaaaaaaatagagggtatactaactggtaaactcaattgttggtgaagcttcagtcaatagctctgaattgaaagtcataggtttttgcaaaatactgaatttggaattatggtttcaaagaatctaaaagaatcatgtgtaggaacaaaccatggtattagtgttcccttagcatctctattggatttgg

SEQ ID NO: 34649 - DNA, 1138 bp, Bovine  19866880930563
  misc_feature (1)..(1): n is a, c, g, or t
ntattagagcttaaattctatgatgacaaacacctatgaacccttgggctatttcatggtcaaactctgccttttttgtttcctcagatccttataaactatttccccatttctctttttctttgtttactcatcttcttgttttgttttttttttcatttatagttgccatatcattgtcttttgcatttaaatctttatgattttgtcccatgtcatgatctaacaagttatatacatttaatgaccaaataattgcctattaatttagctgtactcactgagaaaggttttctgaaacaaaattataagagtttaaagttatttaagttcaaattttgcatatatgaaagccatcttgtttttacaaaatgaattaggaaatttaaaatgtggtaatcatattttaattattaagaatattgtttattgtaatgtagaacaaagatgtaaaaataatgacatcgtaattctgaacaaatttttctcaagtaaagtcatagagagataatgaaaaaacagtgaagttttaaaaatctaagtagacattttctttggacactatttaggattttctttgagattgcaaatactttccaacttccaaagactgataagacagcttcttgaggctctaaaaaaatgggtaagttttattacccttcagggtcttttcatcctttcatcttcttaaggtgaataaattgttttctatgcagcattcaatctatagaacttttctctggagactcaaatcttcgtttgctctttgtagccatattttaaaaatcctataatattttccggaggagtaggctttgaatatagcctcaatggactcaaatgttaggaatcttaagtaaaaatcagcaaagttaagaatgttgtcttatctcattggtgaatggttgttttgtggctattaatttactcccttgaacttataaagtcctttatattcttaaagggaattttagatcaatcatcttataagaatctgtccttatgcccagggcataactagttttaaagaaagaaaatgttgtgtttacgaaggttacctccattcatggaaaagatcacaagagaatcacagccagaatccgtgtcttgaaaggagcttttttgtattcagatg

SEQ ID NO: 34650 - DNA, 1497 bp, Bovine  19866880943348
  misc_feature (1)..(1): n is a, c, g, or t
ncttacatggtgcttacacttgagagaaacatttttccttgcctaaagttgaagatgatctaaaaaaggtaagatgtagctacaaaataaagtgttgaggaggtagaggttgggagaagttgggacttatgcttaactttctgcttgactggtttgatctcctttcagtccaagggactctcaagagtcttctccagtaccacatttggaaagcatgagttctttggcgctcagcctcctttatgttccaactctcacatccatacatgactactggaaaaaccataactttgtctatacagacctttgttggcaaagtaatgtctcttctacttaaaacactgtctagatttgacatagctgttcttccaaggagcaagtgtcttttaattttgtggctacagtcaccatccacattgattttggagttcaagaaaatgaaatctgacaccgtttccacattttctccatttattaccatgaagtgataggatcggatgctgtaatcttagttttttgaatgctgagttttaagccaactagtttttattatattggcttccctggtggctcatttgttaaagagtctgcccgttttcattattatagtttattttattattatagtttttattcctagttcataataaatacaaataatttttaaaaccagctgtggaatttgaatgcaagggttttctgtgactctaaatacagatatgtaatcattacagtagaattgatccttcctagaattttaaccttttcaattagctctgatatgcatgtaaataggtttacaggaagcctgaaaacactgggctctccttctagggtggaatcttcttgagctattttaatatgattcacttgatctttaatttataaagaatcttcagaaaggcctgcagaaccaaatttaaggcttaaaatgctacccacacatattcagagtattaggaagctcaatacttatcattgtggtagagcatattccaactcttctttcttgacaaatgcagtgacataatctaatggaatgttgagagtccccattttgtgaaataactacaaggcaacaatcctgtgttgaaataatgtagcaaactttctgtactgatcaacagtatttgtaatctgtaattttaggctctttattcaagaattaaaaacaaaatgtgaatagtctgtctggtttgcttaaccaaccatggggttttaaaatttaatacttaagcaacatgcaaattagaaaataacattttaggaactggtcaatcagaaaatcctatgattaaactatttgtttgataagcattcaaaaagaccccccatattcttcctcttttggcacagttgttttcctgcttctctggccttagggttttcatttgcattttatttgcattttgttcttaatgggggaaataaagagaaacgaaggagataagagaaagaaaaaagttccagatatctagcagtaaccaattccttggt

SEQ ID NO: 34651 - DNA, 3342 bp, Bovine  19866880984599
  misc_feature (1)..(1): n is a, c, g, or t
naggatgagatggctggatggcatcatcgactccatggacgtgagtctgggtgaactccgggagttgttgatggacagggaggcctggcgtgcttagattcatggggtcgcaaaagagttggacgtgactgagcgactgaactgaactgaatgtatgtatatatccatccaaaaagaaagagcagcaaatctgtgccaggtgtctatgttgagtctgaatttacccacaattaccccagcaagtaattaagagaaaactaattcagtactgaaatttctggggcctctcagatcaagtacaaacctatgctccagagaaacagccacactccagaggtgtctcttaatgtcccgaccagaaagatacacagtgtcacttctgccacgtcttttgtccacagtaggtcacagggccagttcaggctcaggggaaggaaaataaattctagattccacttcttgttggaggagtggcagggtcacattgcaaaagaacatgtgggttggaagagattgttgtgaccgcctctggatcacactctgccacaatcaggcatatggctgtgtgtgcactttgaaatagggtggtcagggaaggccttatgagacagcgaagtgacatctgagcaaagacctgaaggagaagggagcaagccttgtagatatctgagataaaagcattccaaactaaaataagtaaatacaaagaccctgacgtgggaacaagcctgacaggttcaaggaatagtcgggaagccactatcaccaaactaagagtgaggatgagggaaagaatggtagagatgaggtcaaagaagtcccaggggccagaccatgtagggctttgagggacctggaagcggaaatggacaaaaggataaatgattgagattcctacttacattcataggttaggcctatgaattagattgggcttatgaattcataggttaggcccctcctatgtggtgttgatgaagtcagtgaaaagtttacaaagaacttcttctctaccaaccccctaaaaaattccctcctgataattctgttatggtctagtcactaagctgtgtccaactctttgcaactccatggactgtagcacaccaggctcctctgtccatggggtttcccaggcaagaatactggagtgggttttttgtctccttctccaggggatcttcctgacccagtgattaaacctcggtctcctacattgcaggccgtctcccgcattgctggcggattctttaccaattgagccaccagggaagccctaataattctgtaaatagtcttattcacttcacaggcaactcaactctacttttggagtagagtcctggcagagtttgcacaagaaggagatgcagcctctgagaaagatttgcctgtacttctcaagccttactctgtatgaacggattatttattcatataaatgaacacgtgtgtacacatatacacatgtgtatatacttgggaatctaattgcagtttcagttactacataacttcccatcttaccagttcctgaaaactgcatcttctttttttacttttgtgtgtgatgtagttactgattttaaattttaaaatatgatgtttccctgttataatgtgtttaccttggagcatgaacagcagtagtatttaaagcacgtgttcagaactaattatgtggcatttggttgcttcttttcagggaaacttttaaaagcagagtatatcctgggcagtctaataagcaacaatggagcaacgggtaaggtgctgtcatatcgtcaccataaccgtcacgcactgtccctaccagaattccagttcagaaacaactcaatgacctcgtagttactgtgcactgaatattcccgaaatccctggaactggctctgccccagtgaaagaagtggctttggttgagcagtttacttctctgtgtttccattttctcttattaaaaaggaaaacaaaacaaccaagtcttctaatattgccctgctctattgtggagggtgttacctaatcagcgttagttgtggaagtaggtaactccctgggcttcagaaaaggctcagctgaagctttgtaaagaattgtgaatggaaattgagcctgtaagttcaggagaatacacttacagctttatgtatttcagtgatctgaaaaataaactgtatttggctatagagaaaatgtaataaaaacttattttgaaatggatttcttagaatattttaacatacatgaaaggaaggaagtcctaatagttgagtaacaagtaatttaagcctcagatatcttgtctgaatttctaggcattcaacaagtttcccagcaagttgaacacaattcccagtcaactttttttattcctattttttggctgtgccatgcatggcatgtgggatcttagttcctggaccagggattgaactcatgccccctgcgtggaagtgcggtgtcttaaccactgaagctagggaagtgccctagttgacttttaagctcaatatacttggatataaggtcccaaactccttgaaacttgtagacctttccagtgggaagccaattggaaataaaaatattgacgataatacctcttttctgtggccaccatcactaacctacaatatgcattatttcccatcttctgcactccccaacacacacacatatagattaaaagccagggagaaagtaagggggtcaatgtggtagagaatattgagagattatgataaagagcctgactatttttgatgtttggccactggcagttatcaggtcccagcttcttgcccttgtgccccacatctggacaggctgagttttttttaaagctcatttatcagtaaaccttggcctagcttgtgggaacctttaccccagccccacaccctaatcaaaataaaaagagaagccatccaccactcccttcacttaagtcaaacagaccagcttaggtgccttccctgccctcctcagaaaggctcattatgtgagcactaaatctttttatatcctccctgtgcatgtgtgggatcatcagtttcaacatccaaaccaattttgggtgaatggaatggatcccgccctcctctcaggaaccacaagacagtggaagtgacactgtagttaattaacctgggaagccttggaggcaagaccactgaggatgagccctggagtagaaggaggagggagcagaatcccaagtagtgggaatgacaagtgcagataccatgaagcaagtaagtgtgtgtgtgtgtgcgtgcacgcatgcaggtgttcagtcatgtcgactgttcatgaccctgggactgagctcaccaggct

SEQ ID NO: 34652 - DNA, 786 bp, Bovine  19866881002035
  misc_feature (1)..(1): n is a, c, g, or t
ncgtcttgactgttgtttaaagagaacaagcaatccatcattgaaccagggagtcactttctcatagaaaagtaaaatcagcatgtgacactactcagccctagtgttttgcagattaaaatgatacatggcgactcacgtgttcctaggaagattaagtcagttatcttgttccgctgcccagacaaaagaattcccctcaagcagtgagtggaagctttacagaaacgaaaaagttgggctcaattgtacagtggtaaaacaaaatttagcaagaagatagaaacaagaatgttacttcacatgtaggcaacctccctgcaaaagatggtacaaagaagaatccatcctgaacaggggagctattaaatctttgtacaagcctctgctgtttgaggtgccaattttattaccagaaatagatacacaatttattgtctgactgccttagcaattgatttaaatacagagaaataaatgagcagccgctggccctggggcagttagcttcctaagagtaggttacaatcctgtagctacagtatccagttattaacagtgtttttccattgtgtgatctacacagtgataaaatttttactgaatctcacacagaagtgagttcacaatggaaggctgggattgcagcctttggttcaccacgctaaggccagtatttattgtattacagaaagcagatttttaaatatttgaatctataacggttatatttgtttttaaaagtaattttcaaaaggaagaaaactagagtaagtatcaaactgt

SEQ ID NO: 34653 - DNA, 1023 bp, Bovine  19866881020844
  misc_feature (1)..(1): n is a, c, g, or t
naaactgcctatggatgtcttaatcatacacacacacacaaattttgattccacattgtgataagatttgtttaaacaatactccctgtattcaactgctgtgcatatattttccatttcttctatttcagtatattatcttcatcatatcttgaaaaattcagtttttgtttaataattaaacaataatttgaaccaaataatagattattggaagtaacacattgaaagtatttttagtttaactgaggtagttttatactccagcacaactggatcatggacttgccccaggggctcagtggtaaagaatctgtaggcaacgcagaagatccaggttcagtccctgggttgggaagatcctctgcaggagggcgtggcaacccactccgatattcttgcctagaaattcccatggactgaggagcctggccggctacagtccacagggttgcaaagagtcagacacaactgagcactgagcacacacacaactaggtcatcatataatctactaaacagttttactttagagcaaaattattgtttgaatgttgtaaaatttgatcccaaggctagaaagaaatgataatacacaacttaaccttataatctttttctgattctgcctctcatgtaaaaactgggagttgggttgatattaacaactttcacatttaaaatgttgacttggactccaataaagaaaaaaaatgtgaaaattattgtgtgagctttaaaaagatttgacttgatttttaatttacagataatagagtagtattagcgtaggttcttttccaagttgagtgttactataagtgaggaaaataacatgctgtcagataggaaataatgacttgcaagcattatgactacatctagattcataaagtgctctgaaaaaaaaatgctgctccacaaatagctatttggtgagattatcattagacatctgaccaaatttaaacatttttacgaaggaaacagttttccttaattgttttgtattttttaataaag

SEQ ID NO: 34654 - DNA, 4775 bp, Bovine  19866881027518
  misc_feature (1)..(1): n is a, c, g, or t
naccgatctgcttagatctctgctgctgtttttccaatttcctaccaagagtaaattggttttgctcccattattgctctttctcacgtttcagttggtcttacgagagaaaatggctcaatgctgcaacaatgatttggagaataccaatcccttgatttagacaacagttttttggttttttaaaaaaatttcttctcatctgttgttctggatgctttttctcattttttataaacagagtagaacaaaggactattgttcttaacgtgcactgcatgtgcttgtaacatatatgggaaagcataacaggaagggttttcttttccagttacatattatgctcctgcctaacaaaagtgctagcggcatgaaatgatgcaataaacctctctaacagtagctgatttgtatgcaacaatgaccataagggtaactcttcagcaaacctgaatctcatatataatgcatagcagttaataaatcatagtaaaatcaaatggctgagagccagcaatacctaactagtaatggaaaggagtggaaagatttatggagagacagattctgtctggattttgcttttaagatgcttaccaactgcagtggagtatcttacatggcttctaactagatgagtattctgttgattcattccatcctcccccccaccccgccccaacccccgtccccagggtctctggctaccctttaccttctaccaccaggtggagtgttttccactaaccatttaaggtttaatacttcagaaccaatacaaatcctatgggttgaaagtgttccttttgaacatctagttatgtaaataagtttttagcaaggtgtttccctccatcaaatgcatacagataaatacactttgaaacctttgctcaaaagtatttttctttaaataccatttcacatacatcaacagagaagcaaggctggagttttgttttatagttttaaacaaagtgttctttagatgtgctcattgtatcttactgccagtgttcttctggctgtagtttgtgaatcttagaaatgcagaatttgaaaatttgtcacatgtcaagacgaggaatattgaagacaacatgtgccatacagatctgagagaagcattcacttcaaatctgtttctggttattagtaggtcttggccaatttccggtgctgacatgggctattgagatgtgtggcaaacatgtcaccttagagttagaaatatttgaacttgaattatgacctttaacaaattcttaacattaaaaaaaatgaagataaattgctgacagagtggcctgtagatagtattaatgcctctgtttgattgcctacataattttcatcctgtgcgaactcaagtttttattttagattgctttacatttaccgctggactttgctggttgtggaaaagaaatcatcttcccaaatattacgatactaacataaatacttttactattcagcaatgtatattgatgtctattggaggtaaaaatggatgaaagggcatataagaacccagttttctttttttgttgtttttctccccagtgtcttagaattatttgccttcaattatggtagccacaagatggcagtaattcctcattaaatggtcaattgccactgccctggattacagggtagtgactgacgccaggttagacagaggtaggataattaggagaagtatctccttgagttaagggttaaaataaaacggtgcaagtgttagagatcatgggagtggtctgaagtaagtgaaattagttttatcctgatgtctttcgatttcccggtggcagaaatttcaggatttcaggtggaattcgagtgaaatgatttggcatccatcagaatagtactcttgaaggttatattataaaatgactgcattggaataatctgaggatgtgactagtttcatttctctctacagtaattaatttcctagtgactgtagagaattaggcttgttttggcagctaaatatgcagtgacgctcagcagtacatagagatgtttcactgtaaaaatatccacatgtccctgagataaaatcctaattcaaaataaaataactggagacaaaaatacataaagtgcctgatgcctgcccagcacactccgtacttcaagaatttggaacagcctatatttcaaagtagtactggggtgagcaggagtgtagacagtatagcaaatctgaaaatagtgcatttttctgtttattctctacaaatggctccagttgatgaagatggtgagctttatttttgttaatgttagccagcaggggtaaggtatttagaaattgcagattcggaaaaatattgtccataagaatattttttaaattatgtaaaacagatataactgcataatagcaaaaaagctagcagaagcaatgtgtcagaaaattattcgtcacagagatctaaaaggctaaatatggcaaatttctgaaaaatacaacataggattactatttttaatatccaatgaattggattagttttacatatttaatggaaaggaattttattcatttttgttggtggtgtgcaaagcttatttcaactctattttgtgtaaatagtctctgattttctgctctatattataatcctgattgtagtgtttcaggattgtgatgggttttctttgtgtctctgcatgaaaagagaagagttaaaagagttatatggctacttcaaccttaaagtgttattactggtaataacatgattagaacaaaagcgtgtttagaaaaataacatttactattttgactcaattattcatattgtatattttgctagcagagatccattgacttagaaaaatacttctatctttccctatgctgacgtctaaaacagccatttttaagagcagttcaatgaatttagttctatttcttattttaaacttataggcagaagctaaatttagtaactataaatatatgacatttaatatacttttacaactatctctgtgcatatcaaagccattagagtcatgctcatttaagccggggttgaagcagatgtacagttatcatagcaggaggactggggattagggtcattttcttcatgtagataaactgtgtttgaagtatggagaccacatttaaagaaagagaggaagagggtggttgagcaaacctatgttcttttatctgtctgtttataagccttgatttattcatgatataacgatattgtagaacatagctttgaaaattctgtactagaaaaatgaatttttcctgggaagtggacacttctgaagctgtgaaaatatttaagaggagagaataaagacttataatctagattttttttctcaaaaaatccttctaagttatatttatcaaaacctttaaactatgattagatacaacttggcagactatggatacttcccagtcaactgataaattatgttcaaaattattacttattatgacataatgaggggtgtgggagggaggttcaagagagaggggatatatgtatacatatagctgattcacttcatcgtacagcagaaactaacacacactgtaaagcaattctaataaaaaataaaatttaatagcatgtatattgcatagccaacactttacactggagtattagtaacaaaacaatagttcagtaatcattttttaaaataaaacaggcaggattatgactaaatgaggcatctcttgattgagtctcctctctcaacaataatttggcatccacctatagacaacagagctttttcgggagctgtagaatccaacatcatatggcaaggagtctgtgcctacccatgtatctgtaacaggtatggagaccttggtcccagctgtgggccctgcagtgactcatcaactagctccatcctctccaggcagcaatctggaaggcactggaaatgattgtcttagacaaccacctacagatgacagagcctttgttgaagttcaggtttccagcacagaagttacagcacagtattggagcaagaaagagaatataagtttaaatgcataggaaggatagttagtaaagactggaggagatgactatgatttcaaatataaggaagcaacacaaaacttcaaagaacatgaaaaatcaaggaaacacaaaactgtcaggggatcacagaaccttccagtaactgattcaaaagacatggagacctgtgatttcgtgttagagaatccgaaacagttgttttatgaatattcagagagctacaggaaaatatagaaatctcatccctcaaaagcactaaatatgtgacatgctggatattatgtaaatatataacatgctgtattaattagctagatagggagttatttctcaatgtacgtatgtattaactcaccatgatgtacactttaaatattttacatcttcatatgtcaattatacctcaataaagctgactttttaaaataaaaaaaatcaagatgctgaaaaaattcaacaaaatcaggaaaacaatacacaggtaaaatgagaagcttaacaaagagaaatcaaaaaagaaattgaacaaaaattctagcactgaagaacacagtgaatgaaatgaaaaatacaatggagggcatcaaagacagaatgagtcaatcagaagaaagagtcctttagttagaacacaggaactttgagattatccagtcagagaacaaagaaaaagaatgtaaaataatcaaaaaagactatatgagccacataatacta

SEQ ID NO: 34655 - DNA, 1860 bp, Bovine  19866881068244
  misc_feature (1)..(1): n is a, c, g, or t
nccatggaagccgcattctcgtggacaagaacctaaccaggctctttttggatctgcacactctgggttctgcccacacagacccccacctgtgtgacttgctggagagccacatcctagatgagcaggtgaaactcattaaaaagatgggcgcccacctgaccaggcctctgcaggctggctgatcccccggctgggctgggcggtctctctttgaaaggctcacagtcaaacacaactaggaccctccaaagctccaaggcctttgaggagccctcaggtgtcagggcggagaaggcaatggcaccccacttcagtactcttgcctggaaaatcccatggatggaggagcctggtgggttgcagtccatggggtcgctgagggtcggacacaactgagcgacttcactttcacttttcactttcatgcattggagaaggaaatggcagtccactccagtgttcttgcctggagaatcccagggacaggggagcctggtgggctgccgtctatggggttgcacagagtcggacacaactgaagcgacttagcggcagcagtagcagcaggtgtcagggcttctacctgaaacccctctctgtggccacttaggcagttttttaaccatcctggagccctctcacaaatcttggaccaaatggaagcaataaagatttttgcagacaaaaatttccaattcaattcaatcaggggaatattaaaattatacattacaattagcaagtcaatccttgattatgcctctgatctgaaacattgtcttgaaaacagagaaggacaatgaagctagaagaaaagaacacatagagagggaaggttctatctaggtgggtcatatcttaaattaataatagtataaataaaacaataactataacataccacttataggtctgcttagtcttttattagcctttagttaagattctgattctacatccaatattggcaattaaaaaatgaataatttagtaggtgcttttagaaataatattttttcatgaaaaaaatcttccattaatagtgattacagagcagtagaagttaagacaggtagattttggatcgagagagacagatgatagacaatcatacctaggtagctattcagataaactgtaagctttctgatatggtgttaaaaataacactaattttcctgggcagagtttccactatataaacattagtaaaacttgagttatgtttcaatacatgatttctgcaatttatttcaaggcaacagaaaaccactaaatggtcccccagtgtaaggagaatttaaatcatgtcatttcttattaaggttgtataaagcacctgtcagcaacattcatacacctacactagtaattactggtattgatttgcaacactccaggatttctcaactaatcttaaaggatgtcaggaaattatcaaaacaaaattaacatccttaatttttagaaaaatatgtctgaagactgcaagagaaatcagggaacatagccaagataaaatattacactttgaaattgcaggaaatcaacaattattacctattgtaagtaagcaaacgggtggctacaagtcaggaaaattactccttcaagctatagaaagatcatttgcctgatacaacagctccctccagtggcagttaatggtaacctgaccggctggctgctgctactaagtcacttcagtcgtgtccgactctgtgcgaccccatagactcccccgtccctggggttctccaggcaagagtactggagtgggatgccactgccttctccgactcaggtgcaaatatgagcaaaggaaagaacaaagacgctcacacggggaaggggctt

SEQ ID NO: 34656 - DNA, 2881 bp, Bovine  19866881092492
  misc_feature (1)..(1): n is a, c, g, or t
nttgttaatgatgctgctgtgaacaaggagtgcatgtaacttttcaaattagtgtttttgtttttttcagacatatttccaggaatgaaattgctaggtcatatggtagttctctttttagttttttgaggagtttccatactgttctccacagtggctacaccaatttacatttccaccaacagtgtacgagggttccctttttctccacatcctcatcattctttgttattcatgtcttttgatgacagccattctgacaggtgtgaagtgatatctcacactttgcttttggtttgcatttccctgatgattcatgatgctgagcatttattcctgtgcctattggccatctgtgtttcctctttggaaaaatgtctcttcaattcttctgtccattttttaattgggttgtttgcttttttggatgccaaggtgtatgagctgtttatttatgttagatattatccccttattggtcatatcatttgcaaatatcttttcccacttcagtagggttgtcttttcatttgtcaatggcttttttttgctatgcaaaagcttttacatttaattaggtcctggttttttttgtttgtttgttttgtttttgtttcctttacattaggagatggatccaaaaaaatactgctccagtttatgtcaaagagtgttctgcctacatggtcctctaggaattttatagtatcctgtcttacatttcaatctttaatccattttgagtttattttttatgtggtgttagagaatgttctaatttgattcttttacatgtatctaggacaccttgtatttttaagattagaaaaatgattaaattgctaacattaataaataaagtgtttctctcttcattcaagcagacttctcactctcctccttgacaaagtgcactgaatagtacagagcatggtgccctaataaaggccacacagaaacatgagctcagtcagtagaacccacttccagagaatacatttacttatattcttgtctcacaggcggcaattccctttctgaccaattttctagagaaaacttttctttttgcgaagcactaattagctaacctgaagattctcatcagttgagatcaatatcaatcaacatcaaatacttgatgagacacatggggaagatcaggtctatttggtttattttcaaagtctttatcatcgacatcactgcccgctttcttatataaatatatacagcttgaacaagagactgtgcagaagtatgtaagttaacttctgtatatctagagattctaggacatttaccactaccactttttattctaaatactttatatttctgagcatgacacacattctttcaagttgagttcataatatgatttccagtgtacagataaggaaactgaggcattaaaacagtggttagagcactaattgtccttcacagttaggagactgctgttgacagtattaagagagacaacaaggcaagtcagttactgagctggattaaaccttcaacttctcctaggtttacgcttgatcagggaaccaccttgtcactcccacaaggtcatggaggtgggtaaactttttacaatgttgctgactttaaaggagtcctatctttatttagttaaccctttatcttggcccttcctatttgagatcagctgtctacatatttccatgtttcgagtatactcaagagcaagactgtaaagaatacaaaaataaatcaggacataaagattatcagcctgaaagccactaggagacaaaagaaactgccccaaagaacaagggaaattaacattctttcctatccacctggcaagaactaagatcaaaatgaactgttggcaagctctgttaacatggaagcattaggactgtagggatcctataaaatattctagcactattaatattaaggtttctaaggacccttttatcaatgatcattcttccccgttaatacaatgttttgtaagagtctccttatcaaactgccttgaattctttctggaaaaaagaatatggaatgaatgaatagttggataaagaatagaatatgtgcaagctttataattagacagaccatggcattgaataccacctttgacatttgttgctgctgctactgctgctaagtcacttcagttgtgtccgaccctgtgcgaccccatagacggcagcccaccaggctccgccgtccctgggattctccaggcaagaacactggagtgggttgccatttccttctccaatgcatggaagggaaaagtgaaagtgaagtcgctcggttgtgtccgactcttcacaaccccatggactgcagcctaccaggctcctctgtccatgggattttccaggcaagagtactggagtgggtgccattgccttctccgtgacacttgttaggtcatgtttatctgacactgagaagttacttagcctctctgagccatttaacttctatgagccaaaagttctcatatgtttaaaaaataaataataatatctcctcttatggtgattaaatgagactacatataaagcacttgacacattgtagacattcaataatcaagagctattaattaaagcttctcaccaacctagattaccagtaaaaccattcagtatcaaggggaggtgggaggaaataaagcctgactatctttatcacatataaataaaacattctattaaagcattttgaaaatagtttgcatttattacttctatgatttagtgggccaccaatagattaaatacatgttactattccttacctctttgtacaaagaacaattcattttacaaatgtgttgaaaagaaataataaagtttaaaatttcttatctattctcaga

SEQ ID NO: 34657 - DNA, 2212 bp, Bovine  19866881094142
  misc_feature (1)..(1): n is a, c, g, or t
nacagtttatgagatgctttatgaaaagaacataaatgaagtaaatttagttacttctgtcttccttattttatacgtgctcctggatttctggattccatgggaaccacagaaaagagatatgttggaatatgtttagtttttttttttaaggaaaaaaacactattcccattcatcattatttttcttctgtcaacgtgaatttagaaaaccttgctactaattttgcaaaattgtgattttaaagattctaaaaacctgagtgctttctattttacctagaatttttagttaccatgttacatttggtgtgcttcaaacttcattgactaaataggaattatctgttatcattcattatgtaggttagtaacaatatgagacatatgcctttagtaaaaatgcagcaggaagggctacataatttatgagacccagtgcaaaataaaaatgtgaggcctcttctttaaaaaggatgaaaactttctggacagttacaatggagccttaaaccaagtttaagacccttctaagtgtgactctatgtattacttgtccggacatttaaataattcactttgtaagaatgaagagtgcatactgagacagcaatgcccaaatcaattcacttagatattcccccaaacatttctagtacaggtttcccctgatatccaaaaaaagacattaccatgcaaactttcatgagccaaaacggagcaaagcaaagaagcagtaccttagaatacatctcgctaacagatgcacacaataaattgagaaaaattatggatgctcacagacacaggtccgtggcttgatgtagaaatgttgagtataaatcctggggaaggcgctcagtggtgccctctcactgcaaggggaacccagtgcgtctccaacactatttttactttttttcataaaagtaaaaattctcttccattctggaaaagagacactgatgaagatcttcgataaacaaagtggcagaaaacaaactttcaaaaagcaggggatgcctgtaaatattattggcatacattgcctagaatcactgggaaacaaaatgttatttaacgaatgtcttacatcattttaaatctaagcagtataaactgaagtaggttccacagttcttttttttattattattcagttgttagtacttggttctatgaaaagttttgaaatttaatgtagcactgtaaatttgaaacttttctgagctatatatttatatgagatatattttgataatatgtttatagtatgcatatataagaatgttttatatatatatatatatatacttggtatacttaaaatcataaaaataaacaaattgaaattgctgtttaaatttctttaaatagaaggtctcatgcttcttgcctaataagagataattgactgagtaaggttaaagcattgttcattcatttagcaacacttattaagtacctacaatatcccaggcaatattacaagtgctgataatgctgcagagaacaaacgtggtgcacagctgcatgaaggccagtgtctataaagagatgaatggatgaataatatgtggtatacacagacaatagaacattattcacctagtatatatataaaaagaaatggcaaaggaaaaaactattgtttaattccactgtgtgagatgcttagaataagcaaatttatagatacagaaagtagagtagaacttattaggatctaagaataaaggagtgaatttattgtttaaacagactttctgtttgggatgatgaaaaattatagaaatagtggtaaaagtacttaatgtgttaatacacttaaaaatggctataataggacattttatgtacgtatatttaccatgatttaaaaaaaaaaaaacttcacaataatagagttgtatgcatctcaagaacactggaaaccagaaagggcaggcaagtgatcagaaaaggaagatggaaatataagactattttaaataaagaagcaaacaaatacatgtttgcctatttctaaatttaaataaggtgttcccctaaatatacagtttaaaataaatttcttttcctcaccataatttatgatccataaatgtcagaaaaatatatcccccttagcagcagaagtcagacaagatcaaacagaatgcatttggggtgatggtttatattaggatattagtctttgagttatttgttt

SEQ ID NO: 34658 - DNA, 1259 bp, Bovine  19866881138562
  misc_feature (1)..(1): n is a, c, g, or t
nggcctgcaaagcctaaaatgtgtattagttggccctttacagaaaaagtttgcagaccctaatacacagtagacttaagtctgtaggaaatactatttcctcagggagataatattgtttcaggggtttagagcaggtttcatagggaaggtaacattgaaggataagtaaaagctcaccaagaacaggaaaagaagaaaaatatcacatacagaaaggcacaagaagagagaacactgcatgttaggaaaatagaaacaggcagagtccatttggtatacagggtacttggcatacgccaagcgaaagaatggtagagaatcctttcactgacttcccctgcctatgctgccctgttcatgtcaacaaggaataaaacctacaattttaatgctgtactctaagggaactataaatagaaaatgtaattaggctggtaaaatagatgaaggttatcttgtcaggtgtctgaacttcatcctactctgaattggaaggttatcatttatcataaaaagttaaaatactaaggtttatgaatgagttaaagttttctgagattagaatagtcaatgttttccttttaatgttattttgatttgtattctgacaagactttctgaatgagagaacaaagagtgagatcacactctttacccaaatgcagacctgcatataatcctacatattcagatggacattatgttgtatgtttgaatgccatgcaactaatcatctgtcacagaagaaaaaaaaggctgggcaacttagctgtaggaaatagtttgcagatggaaattgttaagccagggaaagccaagtatgggttttagaaagtttaagtccactgacaggaaaggaagatggcccaaagcacagagatacaacagggagagcagtctagaggtcactgagcaggttatttgaaagacaaagtttaaggaagaagcacagaggaaggacacaggttcagtatatattaagaacacactgactagcaacttatagtggtgtgtgcaggctcagtcgggcccgatcctttgcaaccccatgcactgtagcccgccaggctcctctgtccatggacttttccaggcaagaatactggagtgggttgccatttcctactccaagggatcttcccaacccagggattgaacctgaatctcctgcactacaggtggattcttcacccctctcccgctagaggaccacaaagtttgtagcatagagactgtgaatgtgagctgttaaggga

SEQ ID NO: 34659 - DNA, 674 bp, Bovine  19866881254364
  misc_feature (1)..(1): n is a, c, g, or t
ntgttcgggcccagcgcacattctccttggagtaagatctttgcatgcaaacgtttttcattaatgacatatttttatgtagttatttactacatagaatataagcaactctttaattcagaggatgagtagttttttccctatttcatcaaataggcactgaacactcctgataatatactgtgctcattaaggtttatttgggggcttgctgagtttgccgttggttaactgcactgtttggcttaactgtcaggctgtggagcaaggggtcatccctttaatctctcccctgttgctcttcttagcaatatgctacctgtaatggtactgggctccatgtgccttgttctggtccaagagttagttctagttagcattctttttcttgcaaagaccagaaatgtattcaaaccagtgcaagtattaaaaggcttcatgagagaatataatgacttctcttggacataaaatataggaagtacgaatcatctcagaagaaccagaaaattgtcatttagttactcctattgtccccgtgaaggtgtcatatctttgtgaatggaggtgtaatctgttctgcttttcctgtaggctctttctgtgtgtacttagaatgcacatatgcacgctcagtcacttcagtcatgtccaactctttgcaaccgtatgga

SEQ ID NO: 34660 - DNA, 843 bp, Bovine  19866881420223
  misc_feature (1)..(1): n is a, c, g, or t
ntatatcactaacattagaaaatatagtacatttctttaaaaatttttatatcttgttgaagtcatcacagagaaaatttacttagtgtatttataattatacaattttgaatatctatgatatttgtttctactgagcttttcttcttttccaaaacattatatattttaaatttaaagaaaatgtgcctgcttttattattattttgagacatttttctccatagtaatctttcttattcccattgctccattgtgaaacttttttttaaccttaattccatctgtagtgcctttagttccttctatttttgtatttttaaattcttcggggcctccataattttcaactaatcttcttgcataagattaaatttaaactcctccttgtaatgatataagatctttaataaatgatcttatagcttctaatgtattatgttgataattatcagcggcactttaatttttgtggaatttccctctcctctctaaaaactaagaaactaaaatgagctcaggggtttagatgacttgttcagagtcacagatcaaggaacaaagatctcctgatactcagaaccttaccccatgaatcaaacacatagagagggctgtaccccaaatctcccagccccattcctaaagacctcagtctacttaaggttaatttttaaaatctatctaggatggcatttgtaaattgtcagaagcttgagtagccgctgtacaaaaagccttcatgtataaacatctccgaaacaggcaaatgatagataacacatgagcattttttatcttcccagcttcagccttttgctagcttataaattttttagaggg

SEQ ID NO: 34661 - DNA, 437 bp, Bovine  19866881820724
  misc_feature (1)..(1): n is a, c, g, or t
ntagaaatgacccttgtcatcactctgaggatgtggggcagaagaaacaaatgaaaagacacacccagaagatggtttctagaacaggccccttggataagagatgagcccctgcgactgtgggccacatgggcgcccagggcattgttcccactgtgtgtgtgagggcgcagggtggcttcaggataacagggctgcagagaacggcagcagctcagctggcccaccatcccgaagtgacgagagcattgcctaaagtttcctggctaagcacactccctcagtaacatgtttcagattttgatgttgcatttttgtgactataaagtccttcctgtgcacatattatagggaataaatcaagaaaaatgttttcagtatacgatgtccacacagtttcttcgcccgctgtttagctgttgttgggaaagacttca

SEQ ID NO: 34662 - DNA, 892 bp, Bovine  19866882264666
  misc_feature (1)..(1): n is a, c, g, or t
nataaagcatgagaaatatgcacttactgtaactattgaaactagagaactggtattgatttgatttccccagagaaattgtattctttcgcaaatagtaggtttttatttaattttactgaggaacaaaacattatcatctttacatggtgggagaagtcattaagctcaaaacatgcagaataacctctcctggctacaaatattcagtgggctgcacagaagtgtccgtttccgttttaccactgataaatgatattctcccctgataggaatctcagcaacatagctcctttggttcaaaaagaaagaaaggatatgaaagcaggtcatggtcacaagacctgtgtttatcttatgaagagtaaatcagtaaacaggagaggaaagctttgtttatgcttgaggccatgaagattgggaaatagtagcatgcaaggccaaagatgacagttgggaaagtgtgggtgtgtctgcaacacaattcacatgtgaattcgtgcacattcatgcagcgttatgttcatgaatatgaaaaggcatgataatatatgaatatatgtaaacactcagagacacactccatctgattgtgttatgtgtgtatgagggagtgaatacacaggcataaatgggaatatcttaaccatattctaggcctggaaaatatcctaaaaatgaaaacattaaagtttatatgaattcacagatgggagaataacaaaagcttagtcatagaaaccagggtgtctttttcctatttctacattttgtgattgacgttaagaaagataaaaagtcttttgctctatgcagtgctctcctttcattgggaaaaaaatggggctggtaggctttcaatgacagctcttacatggatctaaagtaccat

SEQ ID NO: 34663 - DNA, 1838 bp, Bovine  19866880415157
  misc_feature (1)..(1): n is a, c, g, or t
ntcattaaaaaaaattctttccttatttcatccccaacatctaatccattagtgagacccattggctttaattcaggatacatcccttaggtattggcatcttttatttccactgctgtcacccccggctaagccactctaacagctcttatggatctctctttgggtacttgagaccagtactgctttacagacactatttggggaagatatttgtattcgcagaagaatgcaattctcatggatccaccttctggaaaacatagaagccatctgatctatgctgagagcagtaccaaccacatggagggcatccacaaggattttgtgaatgaattacacttattaatgttttctaataacaactccatggggcaggtattattaatacattttacaaataagaaatccaagtatctttatgtaaaggatttgtctttacacaagagagtggagattggttggatcagtgcattttgaggaatttcatgaagcagagctatacttaaaaagaacaataaatcaaacaaatagggctccactctgccctcaatggcaacactgccattcccaaattctcttccttttacatctcactgaaaatgtctactggattttctcttaaatattttttatcttacttttcctctactaaatttcagtggtgatggatggaatttttattttgtataaatataaaaaataattaattaaattatttattttcaaaattctaaaagaccagtgtatttcccactctgctaatattctgaagataaacccaaacaggttgttatgtgattttaaatgcagagatttgttttataagcctttaaacatgagtgacattatattagcaatttttatttccattgtcagtgttctcaatagcagcaacaattttcatttgcacctactttacattaacattgcattacattaacacggtatttatcgtatcagagtatgtatttagaagctgaacagacattcaagtagggtacttcaaatagatggcagattttgtaaccattaaaacattttagaaaatcaaatatttgtgtctgaactctccaattattattttctctgtcatccaaatgattagcataaatgaccattaggacacatgaatcaaaatcaatgcaacattaactcgctagagcagagtactactcaaaccgagtagctgatgtggtaggtaaatgggaaatgggtgagaagtcacccagatacagtgaggttatcctccaccctcaccctcattccccagatgctcaagatgataactcaaggtttttttcttatgtggaagaagaactggtaactctaagacctatcaaacctggattgttgggaaaatttgaaatttagctaaggctcattggatcagattgcaaacaataaaatgatcatgaatgcccttgacgagaaggtcacagtggagtggcttaaattcagtttcctagtagaccatttgcagcaatgtggagaggtactgatgtgtgaaagggatgctcatgtttgaatacacatgactacccactacccatgcctgcaagacggcagtgatatggctttgctaatattctcatctgtaattttctgctttaatagaacatagatgtttgtttataccaaagaccgtgactgtgagatcattagctgttctatgtttttaagtttacacaatgagcatgaattacactaattgaaaagcaaaacaacgtattatttaacattttaaaactagtttttgtatgtcttagccataaattatttcaataaacttgtttccatcaagaatccaagaagcacaatgataacaggagtaaaca

SEQ ID NO: 34664 - DNA, 1620 bp, Bovine  19866880473529
  misc_feature (1)..(1): n is a, c, g, or t
ngagttagcaacacaatatcccttcataaatgcctttatgcgtcatgaacttagtgatatttggtctctgttgttgcaacccaaagccttgacctttacaagactgattcaaatataacatttgatttctatctagggacaacgagccacaaaaaatctgcagtggaaaacactgcagattcttaaaaatttttgtatgattattttctttactcacctactttttcacgtaacaaagtaaaaagtagaaaaaagtgtagaataacttccactcatggaaaattaaaccctttgcagggacataaatttttatctacagagaagaatactgttgaatttctcttgtgtttagtggcagcagagttctgcgtttatgccttccatctgggttagtcacccttttcttcatctagttagttccactgctggatggagctaacctgcaggcgcaggagaaggtgaagagggtactttaggtcctgcaggtaaagtgagcagagagaataggacttcattattgtctggccttcaggaggagtattgcaaagatcagcactttccacactgtgaagtttcactgtcccccagcatacctcttatatattaatatgctaaaatagtttctaacacccttttaaagtcgaattttggaaggcttccattttattattcaaacttccaaagtctccagatttctcaaaatggtccttattaaaaaacaaacaagccaccctctgtaagtctgagagaaaggagtatacctctctcttatccttatgctttctagcgtcacaaggaaaggagctgtcttttaagttgacaaaatacagtgaatgctctcatgtcagagtagctaaatacctggagtttggttcttaaaagtatactcaaatattttggcctctattttgattttggtgaaaatgtcctcagcgaatccagcaagttaaaagcaattaacagcccaatttcagtcgaaaattcctttgcacagggctagtgaaggttaatgcatcgcctggctgttcccctcagcccactttcagcaccaggtgcctgggtggacttatgtattctgaagaagataaacatagataaaatggtgggattcctttaatccatttaatctcttatgtattgagaatagagagtggtacaaagatctattttgttcaaaaagccaagtcatacaacatctcgaagatggcaaagtaagaaagagctgacatcatgtttctcaatttaaaacattgtgcaacaactactggagcaaaagcagaaaggttttcaaggccaaataatgacttttagttgctggaaggcatccacgctcaacagtctgtcaggaagagacaggtggggctggctcaccacctggggtgcaggctggtacagggcttttattaacattactgcacaggagcggagaagataaacactcagtgggtgtagtgaaaccaccaggccatatgtttggcctgaatggaaagtctccttctccaaaataaacctacctaaggcaggcaccatctttaaaaaagaaaatcttgggtaccaggcaaatgcattccaggatttagaaatataatttgtatgctgctgtgtcttcagtgccaatgt

SEQ ID NO: 34665 - DNA, 831 bp, Bovine  19866880543219
  misc_feature (1)..(1): n is a, c, g, or t
nccagggatcaaacccagggtctcccacattgcaggtggattctttacgagctgagccacaaaagcctttgcaaaaaacctgaacattttttttgacacactgataaaaaattgtttactgagttcttttgtttgttctacaactgtttgcacccaaatagaaggtgtttttcctttgaaactgtgtatgtagtccttgtgattactgccagagatattcttttttgttatttttaagtttcaattcttagaaatgcctcttttcctccattgcattttttctatttttaaaatgtctttgtgaatgactttagatgtgtattacaaattggacttcagaggtctgtgctggcgtacctgactgaaagtcttgattgcctcttccagtgtatcaagtttaattaatagccatgaaaacttcagactgctctttattttaaattctcctaaatgagttgcttttcagtggtgctagctaatcccttgtaatccaaagtcatcaaaaaatcatatgataatgcttttcgtataatacagaaataatttacagcattagtcaaacagtttcaaaggtgtcattatttgataattaccccaccccagggccattattgtactacataatgtgactaatgctctgtcatttttttctgctgaaactacagccgcaaattgaagagtaacacattctggcctttggttttctcagtcagcctgaaaaaattggttgtctttttcaactttagcagcttaatatctcacttcaggttttgttgttgttttcttttttaattcataaatatgtgatggtaacagtggagataacatttc

SEQ ID NO: 34666 - DNA, 3634 bp, Bovine  19866880611844
  misc_feature (1)..(1): n is a, c, g, or t
naaaatattccctcagccctttgtacctttcaaaaatatcattactgtacctggcatctgactggatgtacccaacaagctttatgcaccacagtctctgaacacatttaacaaagttctctttgaaatagctgcaggtctttatgaacctgatgaaatatgacaaatacggaggccagcaggtttggggtgaccagtttgctaaaagtaaatctgatacctgtttggattgccacttccaaacatccataaaaaggaattctgcctaaaaccatttattgctgaataggaaaaaagtttacactttgatgaagctgagtaatacacacacagagctactattctattcatgttttgtaattgctttaagtccacaagttatttttaaatacatatggcagaatccatccccagtgatccatacctttatatgatcccctgcctttgggagggacaggtgaatgtgagctagcactcctgtgattaggctatgctatgtggacagttgactttaatgggagactattctcagtggacatgatttaatcaggcgagcccttgaaaggattaggacactataaaagagttatggggatgtaatgtacagcacagcgaccataattaatggtcttaaaacttctcatcagggacttccctggtggtccagtggttaagactctgaactcccaatggagggggcatgggtttgatccctggttggggaactaagatcccacatgctatgtgtccaataaataaataaaaacattttaaaaaaaagaaaactcatcacaagcaaaaaacaattctgtacaagtaatggatgttaactggacatccaggtatggtgactatttcacaatgcatacaaatatcaaatcatttgttgtacacctgaaactaacataatgttatatgccaattatatcttaattttaaaaataaaattttttaagaattaggtgtttgggttcttctggaggaaataagaagtgtggcaaggatttgctggtgaaatttttctgttccagctgttccagctttcaaaatggagaagaccacgtggcaaggaatgcagatggtctgtgtttgctgaagcagcccctagctgatggccggcaaagaaatatcagtagaaaccactgtcttacaactaaaggaaactgaattctgctacaaccatatgtgcctagaagaagaccccaagcctaagatgaagacacagttcgcctgacatcctaatttcaccactgtgagaatcttaagagagcccaggtacctagtgcttggacttctgaccgacagacctgtgaaataagtaagtattgttttaagccactaaatttgtggtaatttgttatgcagcaatagaaaattaaaaatatcacacatacataaccacagcaagaagctgaaaaacatgacaaacatatgccctgtttatttacacttttattaataaagacaatcaaaaaaggataaggtttcaatattttattcaagttttattttaagtgatgttaattacagcatttgaagggggagaatctaattccacacaaaatggaactctaaaatgtacccattaaactgctaaaaaataaactttagtggtgagaatacaacagaagtccaatttagattctgagtgttgtcaccatgtgattacagtcacagagactcttcccagcttgcagctggggctcttagaagctatttcatactctggtgcaagggcaaaaaaaccacaacgtgagagggaattaagtcctgaattattggcttcatcacaacttctccaccccaaaatggcacaaaagaaacagctaccacatcctgcagactactttttgtgtaaaagaggtgatggatggaggtggaaaaagtccctgcctaaaaaagtccctttcagataagtttgtacacaccatcaaacaaagagcctctcctcaatcaattaggggaggaaaccagggttcaattctcaggaagttacaatttcattcagttactcaataggaatttacaaagtgcctgcaaattatcagcttccacttgcagccatttctaggtaaaaaagaaacctgacatctctaatggggccagcaagctccccaccaagtctacagctgaaaggaccttttttgaaattgggtttcttctgtacctctgaaagggtaacaccctaaagctgaatcatctttaacctggaagtctaacatgatatttagcaatacttgcatcccagacatacaacattaaaaggtacactaaattctgaaggtagctatgctgcaaaatagtttaaaattaaacgattgtacaatagtcatttatgcttgaaactccagtcctagaccaagcttgtggccaccagcattgacgttcttgccatccagcagagccgacagtgtcagtttgatacctgcaggagaaatcagggagaggaaaggaagagagaggtaaaaaagaaaggagaagaaaggttagctcaggagggtcactgcagcacactggagacaccacatcaggttcaaaacctgttccagcagtgtgtgatcagcaggagcaaaaccacagggccctcaatccctgttactcaacaccatctgactaatgactaggcagcctaggatgagctgataaaacaataatgattcttccacagctcacccaaagccacttaagggactctgctttcctctatcctctcaatatccctgctatagtcagcaccatgcagtaaacttctttagcaaaagccccctgaaacaaaaccctagccatgaatcagactccaaggtcttaggctcccactcacagcacggatacatacacacatacacacatacacaactaaacgctattttctctagaatagcttgattctgccatcatgtaatcttagatctccagaattcaaagccccaatttaatcaaactaacctcaaggtggtattatttcctatagctgtaacattaattcgatggactgacctagctaactttgcagaagaaacctgcaaaccagttttacaatgaggatgatcgataggctggttttatgaacttgctggaaataagtatcaagtattaggtatacactgggacaaagaatggaagaaaataactaaaaatgtaatatatgttagccttggccttttttctcctacttatcacctctcctgttctccaaatgttttataatgacagcactcctttataaacattcaactataaaatgtgatatacactcatttacaatgttctgtacagttatttataagcaattaacctaaagcagcaaaaccagcaccacattttaagacagctaatctcaccaatacatacctggctttagggtctgagtatatcctaatcctatcaggctggagttgttcactttagcctagtcaaggaaaaggtaagagtgaaaatgttaaatacttcatgttaccgtctccgaactgaataagagctttttaaccaaccaactctggatttcagcatcaaattctattttttcatgacctctttgtttacaggattcattaaattcaatatgaaatatattaagtttaggaactacgtctcagaaagtaacacaaagagataacaccattttcaattaaag

SEQ ID NO: 34667 - DNA, 2924 bp, Bovine  19866880671861
  misc_feature (1)..(1): n is a, c, g, or t
ncttgatggaaggcactgtcttgtccttctttgtattcattatgtaatgaatcataatgcttattcaatttaactcaataaatttatgaatacataaaatacagtggttgagtttatggatggacaagcagtagcaactaacaactcccagtccccacccccacccgactatactccttgagaagtatttgtttaatgaaaaacatggacagaagagcctggagggctacagtccatggggttgcaaagaattggacatgattgagagactaactctttgatttacttttttttacatgagcttaaaaatcagatagaatcaagtttaaattccaactttgatactcattgagcaatttaatctcattgatccttattttttatatgtgaaaactgaggacaataccccttatgatatagggcttcttgaggattgaatgagtgaatattcatagataatctatcataatctggaacacagtaggcactcaataaacatgatcctctatttccccctaataccccagacttaatattccagttcttcaaactgggtacctagcaatgtgccaagagtgtcacaaagcagctggataaacacaatggttttcctcctgtatatatgtttttctatggatggtacataattgtattaatataaaacaattgttcagggattcttctactcatcaaatgtttttgagcatctgttatgtagcagcagcctgctgagcacaagggatagtctaatgggaagaaagaaaggaaggaagatggaaggaaaaaatcaaattccgacaagtgctgtgagggaaacaaagagactgcagagataaaaactggggttgggggagccaacctcttcagatagagtgtgcagagaaaagttttaaaagcagtggatgcaagttggatgatgagaagacagccatgctaagtgctgggggacaaacatttcaagtggaaggagtaggaacacgaaagtcacctgaattcttcaggtaaaacaaatgtcatctttgctggtttgacagtttccctgacttcctgctacatgggagtctttcagatacttaggaagcactgccctggagaagactttgaacaccagctgcaagaggtaggaatggtggataaaaaccactctcctttccctcggtatttaagttggcagcttccaagggctataactaagcatccagaataagctggcacaactcaaatatggagggaaagaatgtgaactagatttatatagctcttaagctttatgtggcacttgcattttatgataaagattcatacaaattaatataaaataaaaccaagtttcctctccgcatacactggatgctttccttttgcctcatgtgggcatactgccacaaatggtaatggcttctctttatatagccataggaaatcacaatttgaaaacgtattaagtgattgtaactttcactagtcacacatttactgacaagctctggttttgctaaagtaatcttaagagaaggagattcgagttgggtaagtttcttgaaggagggataattttatctcatttatctttgtgttgctaagaccttgcacagtgctagggacatagtagacgttcattactctgaattaaaatgaagctataattttcagttgagattggtgaggggcactggggatttctcgctcttgggcatctgtcactacagttaaattccagtgaaatggaagaatgtgaacattccatagcatatgcttctattcacggtcactggatttggctgcacttttgactacctgcatattctgcatctctaacacctgggaaaattctttttgagacagtcttcatactctcgataatgggtctaacaaaatgccgtaccacatgaagctgagggggcagaaagtaattaagtgcttccaggaaggaggaatacttatagccatgaaaatccctctgagactgtgcttagaggagctgtccctgctaccctaatgaaattatggagaaaaaaatgtaagcaatttcttcagatgtgaccttattttccttaggttttcaaatggttttctaaatggaagagaatttcttttcttttttacaatctggaagcaaaaatatatgttgtatgagaaaaacagcatgccagtgcaagattcaaaattcttgatagtgagcaacactggaatttggtctcctacttacaaatttgaagaaagaaaaaacacgccccatgagaaactgaatttaaggtcagattaagtcaaccataaccatatgggttagcatttaaacatttatattaacttttcaaaatgaaaagtcattagggaagtcataccatagtatgtaccactcatttccattttgactttttatctcacaaaggtcacagtatgacaggcacaaactcagaatttactccattgttatcatagcaaatgtttcttctattactaggctaaaatattttgtccggttggacagtttaaactcctttaaaaagagtgtagttacttggcgacaccgtctcttaatttgttagtgagtgtaacactgactggccttagaccactgcctccttgtgcctccgcttctattacactgggctccccatttatccctttccagtgactgagaccagaggaaaatagagatcataccattctaacacacaagaaagaatcataaggaatcaccttacaaggacaaacagtgaggttgagtcatggcatgtccttcttctatgtcatgttatatcttatgtccctatatactcaatagcctattctgtctgacctccatattgcattttggtaaagcatatagatagaagctcttgaaacctccagtcaagaagcaacaacgggaagccaaaaactaggggagctgacttcacatcttacaaacagcaggaaag

SEQ ID NO: 34668 - DNA, 1090 bp, Bovine  19866880723371
  misc_feature (1)..(1): n is a, c, g, or t
ntaaagtggtctcttttttaacaagcatgttaattaatgctgattgcaggatggctttgcaaagggaagtgaacgtttctatatgtttgaacgtagaatcattgtagttcattgctatggaggcaattcatcttgtaaggacaaacacgactctgtttagaagctccaaaagtgatttctcacttaacaatctcttgccaactccaactgagccatacaaaatactgcaaccaattacagttggtgacctttacagtaaaagtaaccctgaaaatgtaagaaatttttttttacgagaagtaaaaatgcatattctaaaggctcaaaacaactttaagttttactttagatgtagaaaaatgcctgcaaaaatatgcttcttgatatttcacatgttataatatgaaaagatactccacagggttactggagaagtgctatcaaacagtgttatagatttatttatttctatgtatctcacctttggacattttaagatgaagtgcttgtccttttaattaatcaaaagtgctgttcccttccagttagctaggtcactcagatctctattcaacatttccccccagttctttggtttacttctagtactgaagaattaggtctggtaattaaatccaatatcagcagagttttgtcaagtttatttaggttccatgcaaaatggaatcccttagggagagagaattaatatattgtgaaatataattgcagagaactatatttaagttatttttgaaaaaagagcttagagacttcccttgacttaattcagcttcagtatctttatgcaaatcttttcatttatagctcccatcctttataattagatgtgttcttatattttctgctgactttctgcatcaagaagctgcttttgtcaatgattttatataaatcagtatgtctcccactgattcatgtacacatgtagacatatgtcaacatatcttgatattttaaatatttttaaaatgagacaattattgatataaaaagttagaatgtatatataaatatataatgcataatacttgtagttatatcatatatgattatatacttttaacat

SEQ ID NO: 34669 - DNA, 1709 bp, Bovine  19866880764250
  misc_feature (1)..(1): n is a, c, g, or t
ntccttgcctggataatccctatagactgaggagcctggggggctacagtccgtggggtcacaaagaatcgagcatgactgagagactaagcacagacttgctcgagaggtagggtagccataaaccttcaatttgtaaaaaaaatcgcaatgcctgcaaagtgcaataaaatgaggtatgctgtgtacaactgtgtttatttcctgagactgctgtaacaaattaccacaaattggtggcatgaaacaacagaaatgtaagttttcactgttggccagaagtctgaaatcaagttgtcagcagggttggttctttctggaggttcagagggagaatttacggcatgcctctcccctagcttctcttctggcaatccttagcattccttggttttaaatacatcattccatttgctgcccctgttttttccctctggtttctctcctctgtccgtatgtctcaaatctccctcttctttttctcataagaacactaattattggatttaggggtcacccaaaatccaggatcatctcatctggaaacctttaacttaattgtatctgtaaaggtcctatttcctttgccatttgcagcaaaactgatgtcctcagagggaatcgtggtaagttgaagaagtcatacagagaaaggcaaatactgtatttatcacttatatgtgggatataaaaaaccccacaaactagtgaataaaacaaaaaagaaacagtctcacagactcacaggatacagagaacaaagtagtgattaccagtggggagggagggacagcacagaggcagacagggagagggggccattatgaggttatatgaaatcatatatttgaaacttctgaaaattatcagccactacagaatttgaagcatcttccattcactaaattaaataaatactctatttccaaatgaagtcacatgtgcaagtactaaggattatgacatggatataattttcaattcaacccactacaacaaccaatcccaggtggaaaaacaagtttttgtgatgtcaagggggccaaagacaatgagacccaaacttggggtaagtgttcaaactcatgcacttaagaaaagaaacaaatctctattcaaaataaaatgttcttttgtactctccattcagacttcttctttaagctgatggaaatttctgtttttatgtttttcttcatgctgcatttttataactttttcattaaatagtttaaaatgacaaaggttttcagaagtgttgaatcatcattactttttttcttttccttcagcaataaatcaaagaaaatagaacattgcctgttttgtttgcatatcttttcctctctttattgcaattttatttacttggtgaatttaccttggcatttccatattttcagttcacttttatttacagttttgaaataggactttctgaaccatgaaaagggcaaaaaatcagctgaagttctttgataactaaatttgatatttgatcaagcaaatatgtgtatctgcttaatagtttaataatattaagaacattcactgagaccaaactttagttttactttaagaacttaaaagatctttataagggaattaaagtactttaaaaagcaatttgcattttggcaaccttttgtctacagatctctcatcagtaagtgacaaataacttggaatctaactttatatttttaacg

SEQ ID NO: 34670 - DNA, 1701 bp, Bovine  19866880864979
  misc_feature (1)..(1): n is a, c, g, or t
ncctactctatttagagtaattaccatatttcacatccatcaatacagccaggtattgctgtatcttctcacagacctatgagtcccactcactatgaagaggattgagcgtggtgaaggtggaatttaaagtgtaagggttcctggagtgtataatgcttcaaactctgaaattataaatgatttggaagatacacagttatttttgtggttctagtatgttactttggtaccatgggagttcataaatacagatatacaaggctctatgatatgaaatgataagtcctttccccatgtgcatcagtaacaaccaactttttagtagaataatattatatgtcattaaaatagtgtccaataaaaaagaggtatggaaacaacagactgatttcagtaaaaccaactagaatgccactgttaacttccacgtattgtaacagaagttttaaaaggatctatttctctggaaacagagaaaaatagcaaatatactctgagtctggagtcaacataaaatatttacaagcacagcatgacacctgatatgcttcaattgtgggaatttagaattctcctctgctatgtttgtgctgggaaatggaatgttgtctccatgttgatgaacagttataatggaaatgatatgggctggagttacattagagattcttagagtccctttatttcagcatatttctatgtgtaatgaacccaaaatttaaaaatacttgcatttttgtggtagttaagagataaggtaataggacttctatcatactgagaaaaaggttagacttgcttcaggtataaaagataagcagtaagactgaatgaatctaaatgctttctaagaaagaaattttaataacataaaatgataatttcaaataaaatctttgtaagacaaaagacagataattctcatattaaaatgctgaaaattacagagaaagagagaggaattaaaagtaacaactacatacagctgtgacctaaaagttaaggtaaaaatgatgtggaggatattcatcgtgcttcctgcacatttgcatatgcagtgctttggaaatactaattaactgagagtaaatttgtaatagttctgaattctcccaccacaactaaactatttgaaactgtatattgcagttcaaaccctggcacatgaattacaaattaattggtccagtactcttatttctatggatgaaagaagtgaggctaagagaagttgagagatttgaatgagtttacaaatttttgatgagtgaaagtaaggacatggttgaggcttcttaaaaccttggccagccatctctgcagaccaagtggttagttcatgctaatttctattatttaacatttacaattatttatgctgcaataaaaaaaaatcaaggtaaagtaagcatttgaaaaccacttgagaaaggaaacaagatggaccattttccatagtactgtatgaaatgcatatgtatgaaattttttctatgctgtctggggtccaattcatatcatttagctatgtgtttttaaaattatcaaacttaatagcacctgaacagaagattttagagatgatcaatgaaaaattctgcttgctgctaaataaatccattctgggtgctctttggctcgtttatttctttagaaacgatcgattgagtgcttaatgaatgcctcagactgtgatga

SEQ ID NO: 34671 - DNA, 1533 bp, Bovine  19866881069172
  misc_feature (1)..(1): n is a, c, g, or t
nacaagagtcccctatttctctcttgggtgggaagatggcactgaccttgtggcttagactgctctgtgctataaaagcttttgtttccttttgcttattaaaactgttgtaaaaacatgcagcatgtgtctggagcccatgagtaagtggggaatttgctatgaaaacaggctaaagagatttcagaaaggtagtctcaggaacacccctggtgtatgtaggtttgtttgcctggcgtgtttctatgagattaacagaaaacgtcatttctcccaagtcagcaaaatcaacgtaaattctccctgaatgatgcttggaaacctcgattttcctggaagtgtgtagaccggatgatatatatgtaggtagtattgggtggttcttctttattggaatggtgtggtaaccgagtatgggagtgctagtgaaagctggtgaagcaagtttcctatagactccagctcccactgtctagactgctccaccgggcgtttctcctactcgtggttctcaaactcactagatgtccgctcattagaagtccattgaaggcttattaaaccagatgggtcttaaccctaaagtttttaactgggaacgtcagggggtagaattctattgggttgtcgcaatgttccttccagttttcccttaagatgttaaggaaaaaaccctgaatgaatttttttgccaatctaatataatagctctgataaattatctggtgatacttaatacttaggtccttggtactaggatcacacctgcaataatttggagttaaggttactttgtcagcacatgcagtcatgctcgtttggttggatgctaatgataccaaaactggagaaatccattgctgaaaagtaatgaactaagcactagatccagaaaattccacataaacgaatattcacagttaaagccgctgctgcatataaatgtgttctataaattataatgtgatagagggtgctgtgataccaggtatactaaatatttcagtgatttttggtggaatttctgcctttcccattagctattaaaagtcagtaaatcagaaatgactagaattaaggacaaagttgatataccctaactttctcattttgctttttggtagacaccaggcttttccaaagtcctttagcatcttgccagattcttttgtttttctaaatcctctaccaactctattccacccatattgcgctgtttattcagtacaaatatatacaatgttttcatttgtaaacatggtcatctcatttgtgaaaattttttctcttcagttaattctgtcaaatcatgactatgtcactgcatttactttcagtgaaaaaaaatgtgctgtgcactgtgagttttatccttgcacataattgaaatacaaatatttttggagaggttttatgttcaaagctgaaattatttctaaaacttttaaaaagttgagagtgtttgctctgatgtttgatgaaaaataactgatatacccttgatttgcaaattaatattgattaaatatcaat

SEQ ID NO: 34672 - DNA, 849 bp, Bovine  19866881166881
  misc_feature (1)..(1): n is a, c, g, or t
ncttggctctgtagtcttctctgatactgactcacagaattaatcttctttaccctatgatcataaaggattttgtgttaacatgtattcaaaacttcaggtcatgcttccttaaatattctctacttgaatttcagactcacatttaattgcccaataatcatctcactgcattcatcctcaagtccttcaaatttaatccattgccacttgaacatacccttcctgactggacttggtgttcctcctgtgctggatgtcatccttgattcttccatctcccctaacctctcaccttatgtaattgataaatgtagatatctgaaaacaactaacccattaaaacttctcgttacactttctttttatgaagtatttcaattttagttgaaagtaccaagtgatttacttactcatcatcttctagggccaaaatttaatgtgttgattttattaatctgaacaacattggctttgcatttaaaaaattcaagaaacagccaagggtcatggggctaatcacttcaaattacttttctttcctaatctctacccactttgctagttttccttatttgcatgaggattctcagagaattatcagatcaaaaatatgacctaccacatcccttcctttttgaaggatgaaaataatttttgaggtcattcttgaaattggaacattgctgaaaagaaaaaatcaagtggattgataattttgagcttaaggagaaactctgggttaagcaaaacatggatgtgtcatgaaataacaacattgctcattaaacatcctgttaaaacaggatgtttaaactttcatttaaaattatcatagcaatattttat

SEQ ID NO: 34673 - DNA, 2546 bp, Bovine  19866881289924
  misc_feature (1)..(1): n is a, c, g, or t
nttcctggttatttttaggtctaaaaacctaaaattaccatagataaaatgagaagtgaaacttctatagtaaataggagatggcagccttcttcaacctaaggagatggcatgagaaaagccagcgtgagtggaaacatcaagtgcgtgagacaggcttgatctttcaatgttcagcttatttagctaaagtcagagtcgtcacagtcacccactggtctttgcagacactcacaagactgggtggactgtcacatagggataaagagaaaagaagcagctttactctttgtatcaggaagttgcacattactgtcaattgagagagaaagtaaattactttcaaatgatgcccctgcagcgtcaactggtgcaggctaagcccctagcagcccccgcagcgtcaggcgctggtgctggggggacatttgcaaacactgccagggtgggagtacctcacgggaagagctgggctagaaagtttccctcaggataactaaagaaaaaatcagaggagagtgaagcacagctagtttcctggtggagaataattgtagcaccttctgtcactcactgctaaaatagtcccattatgtaaatacatgtggcttgctcccatcgatagttgcttgtttcaggtttttttctccagatagatttgatattttctaaacagcaaggattgtagcttgtattgtatttcttttctagacacaacgctactcccttttgcctgctttaccagccagcacagatatgaattctcttatccccacttcctctccttactccctaaacatgaggacagatagacctcatcaagaatagacagataagtactccttgggcattgtttagtgaacagattttcagacttgttctcctggtacttcagcatacttttgtcatatctctaactagagaagttaaaactaaaatgcaatttccagaacttaccatgtggcatgcacgcatgtacatgtgcgcgcacacacacacacagaggagacaataaaatcttgaaataattcaactcaatttaaagttttattaaacctttagtgcatggtagatattgtgctaggttttgtagataacagagaactgagtaagactcacccataaggatctactctgtggtaaaggagacagacagggacataaataacttttaaggggagacagactgtaataaatatgacctggaagaataaataaaacattattaagagtatcaactatatccataatcacagaggtattaaaccactagagctagagtttaagctacatatatagtttcgattagaccatccttctttccacacatagacttcaggcacagctctgtttggtgatctttatttcaaaattacctctctgtaatacagttttctaagttgatttcatgtcttttggtctttcttgctaaattagcacttctctttgcaaatatatatattttttgctgttaattatttgttctccacgcctccctccaggactctctctccttctatagtcttttacctattttcctgtccattctattgttatcttctctccttgtcaccttttcccatatctgcaatatttctccagacacaatgctttcttttcttgtattattatcctactggtaggagaatcaattttcttttgaagggaaaatattgtcagaaggacaataattcccctcaaataatccctttaattctgggtcatgctggatcttggaacaagtgagtgtctttctttgtaactgtccatggctctattaacaaaactgctggtgtttctctgaagcataagcagttgaaagaggtaagagcacagacataagctaacactttgattcagcgcaaggttgggatgtggtatgtatgtcctctctgatggttgggtgagcctcttctggtgggataaacagagtgaatgcactcaagccccccctgtttcaggtgacggtctcttgtatttgtgcatttgcctaacacctcattcatattcagtatctcactgaaccccagccccaggactgtgattcagtgtggtcctgcctcatccctttttcatacgcaaaaaagaggctgaagtccagtaacattaagagtctgcatgtccctgagcagctggtataggagcccttttttttttttttttccaaattcagtgctctacttcaaaactagcttctcacccctggtgccaacatgcagcatgtgagggcgtcacatggtaattgcttgacactcacttgataaaaacttgatctcacactctaaaatgctcatgattgtaaagaaccacttaggaattaaatgtaactgttttttcccatttcctcttttaaaacatgctctgctggtttcgattaggccgaaaatattataactgtggtttagcttgtagtagtgatgcttcaccaaccaagcgtgagatggaagttcaagaaacatcactggagaaaagggagctctcctcattaataaaagcaattagtgtggccccagctgagcagccaactcgcccaggggtgttctcgc

SEQ ID NO: 34674 - DNA, 1203 bp, Bovine  19866881324859
  misc_feature (1)..(1): n is a, c, g, or t
ntaacataataactcagtgagtacttatgtatgacaatcacctgaaaggaagaactctgaagagtaataacaatcgcagtttataaccctttccaggagcatcttatccctgaggacgtgctagcacaaaggttaggaatagggtagctggaaatggtagtcttgtgacacggggctgctgacccatctttccatgccctccaaggtgatattgttaagatccaagctgagagcttctgaaatgacatcttgggtgggaagcattttgcaaaccctaaagggcaagggaaatgttagttataattattactattcagagaaatctttttcgaagtggttggggcatgaaccttcccatttgagaaggtgagttcagtacagctgggttggtgcagcacgaattgtttttctttgtctttgagagcacacttcagaggcctgccctctctggaaaatgacttgatctgtaaatgtcaatgattcaaaaatatttctaagggggattctagccacatacaagtcagaggctcagttagaatttcctgatacttgaggcaaacactcctgtccagtcccacattaggactttccctctgaccttatatttcaaggagggcttcccaatggtgagccgaaacctcctgcggagtcctcatttgcccctcagtcagtataaaggacactctgattagagcctgcaaatggcaaacattttagtagctacgtttacatttattcttactattgttcatagaacggattcaaacgtgattccatttacagtcagctcataaatagttggttctaagtttagccttaatccctttgggaatgagttccttttatggttcacaatgtgacttcctagtttgaaaaagtaaaaaaaaaataagcaaatcctctaacacttagaggaaagcacattctatttcatgagctttcttaaaaattctgggggcgtgcttaagctacttgcttgccagcgtgaagccacaaaggagaaggcagaggtgacagaactcgaaaacccctccaaagggtaaaccagagggaagggagcaaagaaacgattcttagaatgctcagtctatataaacaagaaaaaatttcataatattttaaaaacaaacaaaatctaaagcaaattagtccatcagacattcattcagcttgtctagctttgagaaatgatgaattcagaat

SEQ ID NO: 34675 - DNA, 587 bp, Bovine  19866881327819
  misc_feature (1)..(1): n is a, c, g, or t
naatcgtgaatctcctccactcattcaaatgtctcttctttaagacctggatcaagtaaccttcctctagtgttttccttatgttctcacctcaggtgacctctcctactcttctagctcccagggcccatttgtcatttagcacacactgccttgtgttgcctatatcttgctggctaggcagtgagttcctgaaattccaagcttatatatcattacttattagattgtatcttattcctctttgctttgacaacccctagaaaagaacctactttctaatagattttcagtggtggctgccgaataaattagccctaaaaatcttctgtgactttgtgtgtctcaaagtgctaagcactatgcaattaaaaaagaaaggtctaaattaaagtgtgaatcagttccagccaaccttagtgcaatgatcagtgtgttcttggggctgcctgacctgctgtcctctctgctaagagaattctccataactgtaatagaaacctaatcaaaacataattaggaaggcaaactactgtaaaaagccatcatataatgcattccaacaagagattgggggattatctgca

SEQ ID NO: 34676 - DNA, 749 bp, Bovine  19866881377679
  misc_feature (1)..(1): n is a, c, g, or t
naatcttcccttttaacagctatgagtgactatttttagttgtaatatattacctttcaggaaggtagcaagggcaactgaagatatgttaaatatatatcaccatcaaatcatgtggataaaagtgctttttcgcttttgaaattacagcttcatatataaaggattgagtaacatgggtgacaggtttgtaatgtgctcaagtgggacaatttatattttatgattcctaagatcaaagagatgaaatgtacagtattcaaatatgggcttaaatacttgtaactagcaatcccaaatggaatcttagttaagatttgtaaaacagtatgcactaaacatcttttcaaaataatatgccctaagtgttagttgctcagtcatgtctgactctttgcgaccctttagactgtagcccaccaggctcttctgtccatgggattctccaggcaagaatactggagtgggttgccatttcctcctccaatatgcactaaactacagtaaaattaagaacttctgttcatcaaaagaaaccattaagagcgttcaaagccaagttacacatagaaaaagatatctacaatacatatgtttgaaaataagtcattaagagacaaactagtaaaaaaaaaaaaaaaacacaaaaccttgaatagcattttacaaaataatattctgatatccagtaggcatgtgataaaatgttcaacaccattacttattcctctatcaacccaccagaatgg

SEQ ID NO: 34677 - DNA, 789 bp, Bovine  19866881382766
  misc_feature (1)..(1): n is a, c, g, or t
ntgttcctgggagtgtgcagcacagtgacttgtgtctagatatttaaaacttgaacctgaactctgacaatgtcatagtagaggtgaaatacaagttctatgcatgtgcaaaggaaggggaggtgaagaaatggtagttgcgggatgactaatgattgtaatattatggaaaattggttttttcttagtctctatataaactcttggatattaactgaatttgtattttatagtatttatgtgtggatacaataaatattattactgtgccagttaaaaatagatagtctagtctctgaagaaactttgaaagagtgttcttcagagctacatgagcttattaataataaatcatcttgctccactgttaattgtatttttccctaaatttttccatgagtaaaatgactgcatctccattttgatttgtaattaaaaattctgaaagagctctaaactcctcttgaatctaccaaatctggcctagtaaaagccatcttcaatgacttatgtgaatacctgtcagaattaattggattgttacttgaaagttcatgaaatgccattcattgccttttaaaatattcataatttcaagtttacatcttgatgacttttgtttcctccttcaagttgtcttttcccagagttaactcttacttctctgaattcctattatagcctctttcggaaagtgcttctgccattcaccatgtcttgtattatatgttctctggcgttacactgagaggcattatgtcttcctatttagtttgtcatcatcttgag

SEQ ID NO: 34678 - DNA, 1029 bp, Bovine  19866881394494
  misc_feature (1)..(1): n is a, c, g, or t
nttggaaatttgatctctgattcttctgccttttctaaatccagtttgaacatctggaagttcatagttcacatactattgaagcctggtttggagaattttgagcattactttactagtgtgtgagataactgcaattgtggaacagtttgcgcattctttggcattgcctttctttgggactggaatgaaaactgaccttttccagtcctgtggctactgctgagttttccaaatttgctggcatattgtgtgcagcactttcacagcatcatcctttaggattccaaatagctcaactggaattccattacctccactagctttattcatagtgatgcttcctaaggcccacttgactttgcattccaggatgtctggctctacgtgagttatcacaccattgtggtaatctgagtcacaaacatcttttttgtatagtattttgccacagtttattatttacactgcacgtgattttccctgggtcactaatcgtggttttcacaaagatgtcctcagttttcactgtgctctccagttacattttagccattttcaatcttattttgtgtttattattcttaccagaatatttgttagaggagttttatttaaaagtcttcgtatttatttcttggagcaaaaaatattactggctgttgtaggtagcaggcagggtgtaagcattctgcttcagcaataaatctttaaatgatgaccaagtgaagcttaaatagtttgtgaaaagctgatcagtgcagtaaagcacaagaaatgcactgtggaaatactggaagggcactcaatggcttacttcagatgtagaagaataagaaattactgaaccatcaaattagacaactgagaagaagctgaaaacttaaaacaaaaatacaaaattatttagtgtacacgctagaacctatataatatggtaagtgactgcaggccttctataaggtacaggagatgagaaacagactgtggatggatggaatttcagatactgcaaggattgcctagtaa

SEQ ID NO: 34679 - DNA, 1408 bp, Bovine  19866881512679
  misc_feature (1)..(1): n is a, c, g, or t
nccagtttgtctattctaatcaggtttccttctaaaactggttccctgaggagagaagggcgactctcagctgaactagagctcccaaagggaatagtcaaggtggaaaacttcacagcagcagtccaaataccaatccaatcgcctatgaagaataatactttgacttaattggttcaatcaaagaagtagtcccaaggttctgcatgtgtttctcaggctttacaatgaaagaaaggttatacttaggacgtgggtttaaatgtagaggaggagaaatcaccattaattttgcctgccaaaaaatcaataactaatgttttaacctttctctctctttctcactcactctttggcttaagaaataaaaactctgtatatattcttccctatgatttatgggctggtttgaaaagttagaaaagtaagtcaataacctctttagacaatcctgttaggaaaactgtctgatccaggaggcaattagaattcaagcttccatcaaggacttctctttgtcattttcaaatcctattttcttatagtgattacctacaattacaaggcaacaggtcactattggaatgtaagctcttagaattcaaggtacttacagtattttgatgtgacatcaatttctgtattttcatcaaatacagaatgtatttgataacgtatataaataggaacccaccctaccctaagcttttattgcccatagaaatgaacaataacctgagtaccagcaaaggaagaatgaactccaagagtatgtaccactgagacttgtaatctcagaattttagtcagataacaggtgtcacacacctgttgctttcattctgattaaacttttgaactgtggtgttggagaagactcttgagagtcccttggactctaaggagatccaaccagtccatcctaaaggagaccagtcctgggtgttcattagaaggactgatgttgaagctgaaactccaatactttggccacctgatgggaagagctgactcatttgaaaagaccctgatactgggaaagattgagggcagggggagaaggggaaaacagaggatgagatggttggatggcatcaccgactcaatggacatggatttgggtggactccaggaattggtgatggacagggaggcctggcgtgctgtggttcatggggcctcagagtcggacacgactgagcaattgaactgaactgaactgaactgaaatttttaaaggctgtttctggaaatgttgtcctcattaagatattctctatttccactaagtatcttataagtcatactaaaattgtttccatctaacttagaaagactagccaagtttgtattacattcagaaaggctgccatgtggtttctgtttggacaccacctgcacatcacca

SEQ ID NO: 34680 - DNA, 749 bp, Bovine  19866881721633
  misc_feature (1)..(1): n is a, c, g, or t
ncaggaaagcacattcttgttgaggattaggtctggatggctactctgcccaccatgctgatttgcttgtctttcatttgcaagtcaccaactcaatactcctgttttgctgatagaatgtgttcacttatattcactcatatggaatttttctggtagtcctcctcctcactttaaatgcagcagagtgattacttctgaacccaaagagcagcgagcactgcaagaaaggtgggcaaacaactgcatagcaatcataatcagaacttgaccagaaaagggcttcctcccagggctgccaaccaaaatcacatcaagcaattttaaaggaactaggaatttgttttcattgcttctccctgtctgcatctctctctggcaggatgtttacttactgatcagtctgagcaattgcaccaattcattaaaagtaaataaatcaaccttacttggtgactgcattatcatcctgaagtccaacctctaggaataatgttgccaagttgagctttggcaggaaagggatgcagtgcccaccatcctggctctgccttttctgggctatacacactcagttacttcagataagtctcaagggattgattataccttaatcaggaggaacatactttatggggtgaaagcaagacttcagaaacaaaaagtttctaagaaatgactccatcacttagtccatgatttctaacaataactcaacctctctgtactcagttctttatctatacaat

SEQ ID NO: 34681 - DNA, 686 bp, Bovine  19866881924286
  misc_feature (1)..(1): n is a, c, g, or t
ntttatggaaatcaacctggtttgggttttacgttttcatgcaaatctatttataaaacataatcaacacaatgttagataaagtctaccttctagtttgcaaaagactaaaaaataagatatataattggtcatctcccttgctcaaaaatatcatcttttaatactccatgccttttcttttcaattaagctgatcaaactgaacttaaatgcaatagaataataagaacaaggcattccataaatagctgattcattgagagaagtaagaggatattcacagagtaactatggccatgatgagaaacactgattaaaataatatagttggtctggtgtttttagtttcctaacaggaaaatgggtgccctctccccagaaatcaagttcatcatatggaaaatgcaggtaaatataatgcagttaaaaataagaatctatatgattacagataaacaattagtgagaaattgaaagattacaaggaaagtgggaaaagatgcagaaacatgggcaaaatttgacctgggaaactccacagagagagcataagaagaggagggtctgaagtcatggtggttttccagtcagtcacttgctgtctgtaagagaccattttcattctggaaaggtctcttggatgagctgagtttttaaatgaaggatttggacaaaatggtgaga

SEQ ID NO: 34682 - DNA, 1582 bp, Bovine  19866880101002
  misc_feature (1)..(1): n is a, c, g, or t
natttggaaccagtctgttgttccatgtccagttctaactcttgcttcctgacctgcatacagatttctcaagaggcaggtcaggtggtctggtattaccatctctttcagaattttccacagtttattgtgatccacacagtcaaaggctctggcatagtcaagaaagcagaaatagatgtttttctggaactctcttgctttttccatgatccatcagatgttggcaatttgatctctggttcctctgccttttctaaatccagcttgaacatcaggaagttcacggttcacgtattgctgaagcctggcttggagaattttgagcattactttactagcatgtgagatgagtgcaattgtgtggtagtttgagcattctttggcattgcctttctttgggattggaatgaaaagtgaccttttccagtcctgtggccactgctgacttttccaaatttgctggcatattgagtgtagcactttcacagcatcatctttcaggatttgaaatagctcaactggaattccatcacctccactagctttgttcatagtgatgctttctaaggtccacttgacttcacattccaggatgtctggctctacgtcagtgatcacaccatcgtgatcatgtgggtcatgaagatctcttttgtacagttctgtatattcttgtgtcaattttaggtctaattaaatagcttttgattacaatagaaagaaagtgaaatcgctcagtcatgtctgactctttgtgaccccatggactgtagcctaccagatcctccctccataggattctccaggcaagagtactggagtgagttgccatttccttctccaggggatgttcccaacccagggattgaactcgggtctcccgcattccaggcagacgctttaacctctgagccaccaaggaagcccaatagaacggcccaaatcactgactgctcccccaaacaacccctgaatgatttaaacaatcttgcagtcatcccccagaaagcaaaaacaaacaccctggtctctgtatttctcaaaatatgagaatgaaaaatactctggcttcactttgattgtcaggatgagcagaaagttcatccttggaaggtttgacaacaggaacgaggcagaggaggctgaaggagtctttactgactcctgaacagagctggctggccagtctagctggcatgtctagatggtgaggccagccttctgtcaccaaaacacacagctgaaatggatgaatgcaggactctagccagagcagatagctgcaggtaaatgttaattaacattaaatgacaccagatcatgaaggggcagggtaaattaggaggagaaatgaccaagaagggacttccttggcagttcagtacttaggactctgcgcttccactgcagggggtgaagcttccatccctagttgaggaactaagatactgcaacccatgtggtatggccaaaaaagaaatgtgacaaaaggaagtaactaacatgcccaacttttcttgtctgggggattctacttatttttcaggtttcgtttcccttcagtcaaaatctttaaagt

SEQ ID NO: 34683 - DNA, 1009 bp, Bovine  19866880447943
  misc_feature (1)..(1): n is a, c, g, or t
ncgatctcacatactgcatggtgaggccaaaaataagaagtcacacctgtaaaatgcccacaacaatgactggtatgcaaaagcttagaacatgagagatgacaggtatactcacaaacatatcttgtattcccagcacctctctagttttctggcacattgttcagtaagtgctttttgatgaatgggagggattttaggtcccatcagccaaaacttcagtttacaccttggttatgcctgaagtctgggaaggaggaggttcggggtgaagacagccatgaacagtggaaagcactgagagcacttcaaaggctgccctgatgtcccttgtggaggagcatctctgcaggtgcctacatgctccagcctgtgatgctttgattccagggctcataggaagacctggagcagtgtgagggtcggccaggtgctccagagctgcccagaggagggaagagcttctctgtatgctacctgggcagagataatgtgtctgtgtagcaacttcatctcccagccataaaatattgatggtcctggtgctggacggagaccaggagatactcccttggaaggtgctgtttgctggctgctggtgaatgattgatgactgggaagtaaaatattgatgttttgagcagcacaccaggcctcttcccacccagaggggcttgcgtcttatgttattaaaggcaaaaattcagagactaggttactgtgcttctgcttaggacccaacagcttttagccaactatggcttggagatactgtagaattttaagataagtgtgggagatggattcttggaattagtaaaaagaaaccctactttccttcggtgtgaaaaacttgtaataatagctttgtcaatgcattctttttctttaaaaagttatgtttattaaagttgttcatgcatagaacttaaagaaatgaaaagataaaaaaacagctctcttctgagacacccctgagtccccactattttatcctctgcatatgtga

SEQ ID NO: 34684 - DNA, 762 bp, Bovine  19866880467187
  misc_feature (1)..(1): n is a, c, g, or t
ntggaacctaaacccaggcacttccctatgcaccagtcagcttgggttcttggggaggtgtcacctccagggagtttccttggaccaaagaaatccagggaaaatgaagcactgatcttgggttaaaggcgagcccgattccaggccgggcccatccagcaatgtccctgtgacagtccagctattaatcctgagcgctgtccctctctgcaggcactgcctcagctgacccagtccccggccctcctgtcctcaccctcatcctttaagacgttaatagatttcctatagcttcaggtatagcaaacctctgctggtctgaactaatgtgttagtattttaaaaagacttcttgggaattctctatttctcttccttattttccctttcagcaccaaaagaagaaaacacatgacctcaatctgccagccacctttgaaaagaaggccccttggggacgaacacattagcaatccacatggcttatttaattagtgatgaaaatgccaaattattaaagtagccaaaaaatactttgaataaaaagttggtgattacagttcccatttcatttttacccaaacacatatggtagtttcataatgcaagaaattattttcagacagaaataattacatagggctctcaggccacttttagcaagggaccttgctatgcacttttaaatcacaatttgtgctgctgctgctaagtcacttcagtcgtgtccgactctgtgcgaccccatagatggcagcccac

SEQ ID NO: 34685 - DNA, 856 bp, Bovine  19866880470771
  misc_feature (1)..(1): n is a, c, g, or t
nctatagcacctattagcacctgcaaacagcccgctctgtcttcctctcaacctagatccaaaggggccagcttcttaacacactaaaggctggggagggggacgagggggagaaatgacaccccttcagcacttcaagtccagtccagttttccttcatgaaaactcagtctttgaatggcaacaaggttcacaactcatttgcgtcataggaccctgtctgctcccttcccacccaccaagggcacctgaggagtcctgacctttggaacctgaaggataccctccaggccatcacaaacaggtctcaggagagtccttggcaaaccatactattgctggccaggtacctgggccgacttcaaaataggagcctgaaggtaagaagccctcatcctactgccaatcccaatccccaaccccaagaaaatcaatgaggccacttgttattcacaaagagccactcactgcaagacatgatagtcactttaacttcaaggcttcaaatacttgcaccttttccacataaaagcctctctttatctggtcacagggccatctctcagtgcactgaagaataagggtgttttgatccccaacaaaaatcaaagaaaactctacttgctctagaatgaaatgtccaaaagccacaacgtgactgagtgtcttagtggaaaccaagggatcaatcatgctgatggctctcaaaggactcttcaaaggacccattttgacccccgctaggtagcccagccacctagaagagcatcctcttgcacacggcttaccttataattgctagagttcacccaagaggtagcgagtccgtccacaagtttgtctaacatggtctggt

SEQ ID NO: 34686 - DNA, 1109 bp, Bovine  19866880513892
  misc_feature (1)..(1): n is a, c, g, or t
ngagcttttgttctttattacattcccctaagcatcactcattgtttaaggcagggcaaatcctgtcaagtatttatggagctcttttcttctccttataaataaataaatctgtaaagaaagcatccactaatctctgttttctctaacctgcttgattttctaaagttaaaaaaagcaatcctggtgtcctgaaaccacagccaaggcttctcaacattttcagttaaaatacctgttatttcccaaccaggggagagcacaccaccattacctatacttacagcacacagctcagtgctgttgacttctaactatcacagggtagtgtgtgctcattgccctggtcttcttcagccgcaaaaatattcagaacttgggacttccgcagtagtcctgtggctaagactacatacttccaactcagggggtgtgggttctatccctggtcagggaaccgggctcctatatgccaaatggcatgcaaaaaaattttaaaagaaaaaaacactcagaacttactgtccacatagaagagttctcatggcaacacactaagtgacaaaaagaccaaaaaataaaagaaactgtttttattgctttacaacaagccagcaacagacacaacacaataatcacacataacacttgacatccccaaatggtgtacaaaaccagaacatgctcctccacttaaaatctatttgtgaaaactgaaatccaaaacttctcccaagaactttactattctcaagcagaatcaatacttaaagaagcaaagaaaactagtatcaaacttactgcatatgtctgatcacataattcagaaccttttactctcaatccaggcagtgctattactgcacattttagatggccatcctaggtactttaagactccaacaactttcttctttccacaaattctttgcagaaagagctgtcaagaaaattgttctaaaacccaacaatgcacagcaatttatgcctcatttctacttttttcctcataatggaaaatttggccgtccttaactcagcctgataacaactccaatgcccatgccgaaaatcctacttacaaacaggaaacctaaactcatattagg

SEQ ID NO: 34687 - DNA, 1106 bp, Bovine  19866880539568
  misc_feature (1)..(1): n is a, c, g, or t
ncaccgctttgagagtgagagggtatgtctgggtttgaatcccatatctgcctcttaggaacttggcaactgggccaagcccttaacccccgtgaacctcaatttcctcatctgtacaatgcggaacagtggtcctggcttccccacagatgtgtgaggatgcagtgagctcagagtaagccgaagaatgcatttgctctgattatcaccctgaagaacctcgtatcttcagattggtgctacgggcagagtccactctgggcaagttgcaggtcctgggtgggggttggggaggttcgcccatccccgggtcttcatctagcaagtctgctcgaagctgtcagggctcacctggatgggattctctccctgacagctccttcctcagaggaggaaggcactctgtatccccacaaccttctttcttccccctaagtcccttctactgttctttccaccctgtgttctggaacattctggaacaacagagctcggtcccccacacctgctccttaacttcctttcctcctgccaggaatgtgaggccgaagatgaccatttacgtctgccaggagctggagcagagccgcgtgcccctgcagcagaagcgggacggcagtggggaccccaacctgtgtggtgagttgtggggagcccctcccctgggctggtgagagggcagcaaagcaacagggagagtcctctggctgagagtgtctcccctgatctgccttgcatgcaggaggggttctgctgtgcttcatcctgggattgaaatgtataaggtggagatcatctctgagacggtcttgtcccatttaccaatgtcccatctggggaaacaggcctggagaggagacgtggcccccgaagtcaccaagctacccaggggagaactgggagtcgggctttctggctccctggctggtgacaaatgccacctgacaagtgtattcccaggagtgtgtcctcctgtgttcccgcagctgggtgaggctttcccatttggtttggctagtgcccaagagagtcttagaccacctctggggcacatggttctttggggctagcagttttcagcaccttgtttctgagcatctttaagt

SEQ ID NO: 34688 - DNA, 2380 bp, Bovine  19866880607581
  misc_feature (1)..(1): n is a, c, g, or t
nacaatactagtttgtcacaaataagttgtgatgatatagatggatgcagaaattaattcccagagaagacccgggcagaagctgaccgtaaatgtgacagaggccacaggaggcggcagtgttttcctgctcccggaggagaaaaaggcggggcagtgtacatttggagaagaaggtgctattgtgtctcttttaaaaagaaaacaagtttcttagttgatgaggctgtgtcttgtgtctagacaagtgttcgtcacggcactatccttgatgaactccaggccgtgttgaccagacagctgacatgctgaaaacctcctgtgagtgagtcatgaaccccagcatggcaactctgtggtttgggcaagttacatcgtcactttgtacctgagtctcctcctctgccatgcaggtcggccgagaaacctggaaatagagcaggggacatgctggtcccatgtgggctctggaaagatgctaagtctttctgtcatgaaagaaggcgagacagcaatgtggctctgctggaggactttgacccaagtccctggcatggatgcaggatactctcctggaaccaagatcttcaactccagccctagggcttattgagttctcctgggctccatgtgggaatcagctctttcagacctgcaagctttgagcaggtcaggggcctgcctgcccagaatgaccagtcttggacagaattttaatggaagttcattaacattttcctttcacttctggaggatttgctttgagagttgggtggaatattatctccaatgagatgaaagtagagtcctcggatgaacggagcccccttgttccaaggagtccctgtctgatgctaagtttgtacacatgtacctagccagcccctgcaccccacttttaggtccaagacactgggaacattgatttaaagtttcccaagagctgtccccttggtgccttggtgaactgggagaggttgaaaacaccagcacctgggtttgtttgcaggcaggcaaccacacattggttcagccttgatagacctgctctcaggtgctggcctatgtgctcacaatggctactttgggggatcctttttcggtgcacttaagtggccaggagtgggtcacagccactgagcaaggagctctcccgtcccagagctcaggcctctcccagctggaccatccagtgtggaagctgagaccttctgtggatatttatgtttaaacttaattcaatcaaataaaaaattcagttccttagtggcatcagctccatttctgggtgcttggaagctgcacctggctacctataggatacagcaggtggagaaggtttccatcattgtaggaagttctgttggacagcctggcccaggtgtcaggactttccacttgctgaggaaggctggttgggttccgtgaccaagatattagaggtggtgggtgacattcacctccagatgaatccatgggtcagagccctgggcgcatccaagccaccccagggtggctctgtctccccgccctgagccagactcaccccctaagctgtgtacttgcccccctgctcccagagaggtcagaacagagaatctggtcccagcaacccaaggtcagcagtttccagccaagcaggtctgggctgggcctggtgtttgctgagctcagcagccctgaggccccatggcaagctgggcctccaccctctagaggcagctggacaccccagtccacctctttgactccatctgcccttctggcaccttcctcctgcttcccagctaaagatgagctgaaaacaaggacagcggccttcccaaatctaccccaatagcatcagcatctgcctgtgggagcctggcagagccccctgctcctgtgaaagcctttgtctctccatgtgtacgtgcatatgagtatctatgtgcatgtctgtgtatgtgtgtgtgcatgctcgcgcacctgtgttatcctgggctgaggctttggatctaaggacaacttcccttccctccccatcgtatattgatgggagggggaaatatttgcatttcagtcctgcccagcaagctgttgctgtgcttagtcactcagtcgtgtctgactctttgcgactgtgtggactatagcccacccaccaggctcctctgcccatggtgattcttcaggcaagaaactggggagtgggttgccatgccctcctccaggggatcttcccaacccagggatcgaaaccaggtctcccgcactgcaagcacattctttaccgtctgagccaccagggaagtctcgcccagcaagctagggctgggttaaagagttcatggaataacctccagcatgtgaaagaagctaatcctagacttgagtccag

SEQ ID NO: 34689 - DNA, 2608 bp, Bovine  19866880669395
  misc_feature (1)..(1): n is a, c, g, or t
naacaccttcctttattaaatccctactacaaattggagctcttctgagcactttatttatttttattgaagtatagttgattcatagtatcatgttagtttcaggtgtacactttagtgattcatttgtacatatatgtatacacacacacacatatggcttccctcatagtttagttgtaaagaatccgcctgcaatgcaggagactcggttcgattcctgggtcaggaagatcccctggagaagggaaaggctacccactccagtattctggcctaaagaattccatggactgtatagcccatgaggttgcacagagttggacatgtttgagtgactttcactttcacacacacacacacacatatatatatatatatcggagaaggcaatggcaccccactccagtacttttgcctagaaaatcccatggacggaggagcctggtaggctgcagtccatggggtcgctagagttgggcacgactgagcgacttcaatttgacttttcactttcatgcattggagaaggaaatgacaacccactccagtgttcttgcctggagaatcccagggacgggaagcctggttggctgtagtctatggggtcgcacagagtcggacacgactgaagcaatgcagcagcagcagcattgagtatagtttcctgtgctatatattatgtgcttgttggttatctgttttatgaataatagtgtatatctgttaattccaacctcctaatttagcctttccccaccccctgatcctctttggtaactataaattgttgttcctgtgggtctctttctataaacaatggaatattactcacccataaaaagaatgaaataatgccatttagagcaacatggagggacctagaaatgatcatactaagtgaagtaaaccagaccgagaacagtatcacatcgcttatatgtgaaaccttcaaaaaaaaaaagatgtcacttccttgaatgctccctgcagctgtaagcagtgctgatggggagtagaagctcagggaagttacctgagtggccaatggccacagggttgtggggtgtcccacactcagcacagactctcccagcggtcccaggagcatcagagcccacgtgggaaggaagaggcctgagagcaaagaaacaggctactgattgccacagatgaagactgcaggagagggtgctcaggtctcctctcctccgttctcagtcctgtgacccctcccagagcgcctgctgggtactgggttccctgggccctctgcaatggtagacaaaagaaagagtaagagtcctggagattccagaaggtcactgctgagtagagatggcagtaggagctgaccaggctagccctgcaaacgaagggatctctccgcagccatggagggtgaatcaggatgcctgcctggcctggtcctccttctcctccccccagagaacttacatgaaactgttaagaggtaaatgggtggcgtctatgcagcccgtggactgtgtgaggccagtagtggcccctgacacactgggcccaggtctccccagagtccggttgcttgggaatgcagcccaaagtgggtggtaaactccatctaaggctaaatataatatgaggcttcctctattaaaaaaaattccttacaccagctacccaaattctactgcttaagaaacatccataccttaagattgggaaattctgtctctctcaaaggcaaaatgtttcacaggttgggaatcacccacgagcagcaatgccttcaggagagttggcccattctctcagcagagaaactgaccctgagtgagaccctggtggacaagttttgctgagatacgggagagagaatcatggaagtgcgagtcgggtgggggcgctgatccaatgagctggggcaggaggcccactagacacactcaggactccagcaggcgatgctggcaggcggacagctgagcacaatgacttcattttcagcttattattatttaaacatggaaaaaaattgaggagagacaaaagaagtttgttttggcaacttgactttcagcttcaggaaagtcatggcctagggttttcccccagcatttgttcccctgggtcttgggtgcaaggggtggggacaggccaggtgggtgcaaaggggagggtgacatcccagggccacttgttttgcctacaagaccataggactagggtggctggttctttatttttttaactgcagtcctgggtggactaaaatactgctttgggttttttctttgttttggttttgctttgtttgttgtgattgctgaggacagagcactgcttctagcccaggctctgcagtgtggcctcaagcaatgagctgccccaccctgggcctcatctcaaagaacacacacctcaggtctgtcacttcaggatctgggatggtgtgtggtgcctgctggggcactgaccacctccactcttccattcagaggaaaccatttgcaaggattcttcccagtcttccctcttcagagagccggtctgggccctctggccatccgccatgcctgtaatgctggtgcttgatcccacattttgccaacagcagaggagaggg

SEQ ID NO: 34690 - DNA, 1328 bp, Bovine  19866880691767
  misc_feature (1)..(1): n is a, c, g, or t
ncttcctgggtctactgaattgcagcagatgctagaactcaggcggggcctctgcatgcccaggtcacttgctgagtgaggagtacctgtgctcagatgcactttaaacgtcttatcaggtcacacgagcagggggcttaggttttctgtccctcctgcctgagccagccagtgggttgtgctcccccgttctctcgcggtgctgttctcttagggggaagttactcgtggcacctctggaccccatctgagggtcccagtggggaagcatggtgttccctgcctgagtgttctggtgggtggtacagtctctgagactctgctgtggttccttggtcctgtttgattcaggcccatagttcttctttgggttccttctaaaataattgattgcattatctgaaagtaaacatctgtggtttttttgcatgtaagcatttataagttcctttacacacacacacacagtcctatatacttggaatctcatgtgatttaaaaatgtaaatacagaactgagtgaggaaagaatgagaagtcttgatggaggaccaaattgtaaaataaagttggtccttttcttctgaatggtgaagtgtaaatttgggtagaaccttgtcccaaagggatgagactgtaggacatgtagagtatagtgcctccctgccccctttgcctgttctgtgtctctttctgactctcctcttctgatcactgcagtcggttatggggttgcaatgccgatgggctgtcgaggcacccacctccctttcctcagcctaactccatccccaccgctccctcccacaagactctcaggcgctcttactctcccaggtaacaagccacctgtcccacttgtctgaggtgtcacaatattattgcacttccaaggtcgtctcaggtctctggggaagcctctccgccgcctccggccgagaccagcagggtagagccttggtgagaagtgtgagcaggtgcgtgacctcggtcagacctcatgaggatggcttctactttgcccctagggcaaggaactgttgcatcacctgaccacattcatcagcatcttcacttgcaagccctcagcccagggcagtgctcagcctcctaaaggtgcctgcaccaccccagcggtgcactgtgtccccagccggctgcatgggcctgctccttcccacattgcacttgtggcctcggtcctgctctcagtggtgtgggatgtctttcctgctgtcctgcatgtggtaatagtctgaagactgagatccagaaaagcagccccaagaagtcgctccctattatagctcattaaaggggctgctcca

SEQ ID NO: 34691 - DNA, 1916 bp, Bovine  19866880724003
  misc_feature (1)..(1): n is a, c, g, or t
nttgggttcaatccttgggttgggaagatcccttggagaaggaaatggcaacccattccagtacccttgcttggaaaatcccatggacagaggagcctggtaggctataatccacagggtcgaaaagagtcagacacaactgagagacttcacttcacttcatgtatatatagatgaggtcttctctttaaaaatagaaatctcagttttaagcaccatattaagagttggtttctaagagtgaaacgtaccaaaaaggttagcagaaaagagcatatatactcacacaagagatttcctaacaggttctgaaacattaaatccccaggcttaggtgaataagaggagaggagagcatttgatacgtcatttgatagcatgacagctgacacggccatcccaaatttcccaagggagctgggttacacccacaagagaaaaagaaaaccctattaagtactggttattcagtgtaaaaacagaaggtgtaagagggcttggggtataaaaagcatggggagtttttttctgctactgaataaagaagtcaagctatagagaagtaacacagcaatagtttaaaatttgggtttcatttcagcaattcaaaataagcacaggtactttacatttgaatagcactttccaatccactaagtgattatacaaatggtaccttctttattcccctacaaaacttctttaagactgttactgtcacgcctacttacagattcagaagcaaggaaaattccagggtcacacagtatgaaacagaatcaatatttgaatctcagcttttaactccaaatccaggactatttccaccaggtcacagccactgctttctcatcaagaatacacacaactctctatgtactttagacctgtgtacacataacttggacttcccaggtggcttagtggataaagaatccacatacaattcaggagatgcagattctatccctgggtcaggaagatcccctggaggagggcacagcaatctactccactattcttacctggagaattccatgaacagaggagattggcaggctacagtccatggggacgcatagagtcagacacaactgaagtgacttagcacgtatgcacacataacttaggaaaaagatctacagaggaagcatacatacaccacatttaatgatcccaaagtaacagaatagcctgaacagagagcagcaactcctcctggcacagcgacacatactaagcaggggctccagaaacaaagaacaaagaggaagaaccacaggcactcccagaagtaaacctaattgtcagcaatccttagctcggagagctcagtacttcccacagatgtctatggcaagctaaaggtatggtcaaaagtgggaaagaaaaagaagaaaaagggtaacttgtaaccactgagagaaactagctgaagggtgaacagaaacactctgttactatttttgccacttcctgtgaatatataattattccaaaatgaaaaaaggaaaaagtgaaaaaaatgcacataatgtggacaggcttaagttcactgaacacctaacgtgccagccaatctgccagatgctgctgtcaatgagctccgggtccactagggagggaaagacaagtgaacaatctatttcaacacagtataccacagtgttttcctggaagatcagctacttttctgatgactcctcagaagacaaagaaaaaagaaagactacaacagtgaaacaaacataagagtgccccagggaatgctcttacaggtgcactgccatgaaaacatgctctattactctcacccccaaatcattttctttgcttcttattccttgctccagaaagattcagactggagacacagaacctgatgaacgagaagacctacagtcacagagctttca

SEQ ID NO: 34692 - DNA, 1659 bp, Bovine  19866880777759
  misc_feature (1)..(1): n is a, c, g, or t
nttgccattttgaagttatttctcacacctgtttttatctgcgtaacactgtattaatgatgtactgctttcatttctaactatacagacacatatcagtattagctgaaacgataaagaagggaatacatgatgctgattcagaagcaaggatagaagccagaaagtaagtgtctgttgaacaccactttcttaagtcattgcttttctatttcaggttcactgtccagattgccttataaaagttcattaagtcacacgaacatggcttgctaatcatgactttgttaagtgacccaaaagaccatttcacaatacttctctaattttttgtttcagaggttgtggagtgcccaggcctgagagcctgattggtactatttgaacataaatgggactgacgtagacagcggaaaaagctcattttttaatttatgagacattatcacatgagccagaaaagcacttgcctgcatgtcccatgtcttctcttactcacccagctctgttagtccccagtggcttgttgatttactgtgaaaactccccatcacggggattcttagccagggactacatctctgccagggtcaggtgggcgcctggaaagtggataagggtggctcagactgactgcagtccacagctcactgtcctgctcatgtttggagtcatcttaccactaggactggctgtgatgcagccaggagggtgtggcccccacatcccacgcctttctgggagtcatcgtgccatcctgactgtaaatagcagttttaagtttgatgctcagatgtcttctctcagacagcacaaagatgcatacttcctctattgctttggggctatttttctctgtgcttttgtggctggctagctcttctattttttttttttttgactgtgctgcacagcttgggagatcttagttccccaacaggggactgaacatgtgcccctcttgcagtggaagccctagtcctaacactgggccaccaggaaagtccctggctcttgtgataacacacattccaccagtgcttacctcttggagcactatggattattcagctgcatatacctacctgacctggctctcaactgctctttgctctcagttaaggtctgattccctggttctgagtgtgtggagggcctcattcttcaccctgaagcacaacctcatttggggaagttcctacccgaataagtgacttaattaggaatggatttgttaatgatctacttatgctctttttgtccttattttatatttcgtgccccccccccatttttttctagttttttaatcataacacagtatacctttcagatggttgtgagcatcatcctgtttttcttttttatatgttaacctaaagccgttttaaatactttgagccagggagtgccacatgcattttgcttccatgaaccagtcccctcacattccaggtgtaattctagatgttttagctctgtcttccctagtcttcccagtcttgcaggttagattctttgatttccatgttcttaatgagactgagagtcagacagatggaagaacttgcctagagtcacagagccagtaggtctcgggtgaggagtcagagcagtgctcctcgcttcactcgctcccttacgccgctgcggctgctg

SEQ ID NO: 34693 - DNA, 1373 bp, Bovine  19866880840075
  misc_feature (1)..(1): n is a, c, g, or t
ntgcattgacaggcagattctttaccattgaacccccagggaagccatatattatatatatggtgtatatatatatatatgtgtgtgtgtgtgtgtgtgtgtatatatatggtatatatatatgtgtgtatatatatatatggtgtatatatatatatgtgtgtgtgtgtgtgtgtgtgtgtgtgtatatatatgcaggctgtgccacaaggcacatgggatcttagttccctgaccaggaatcgaacctgtgccctgcttcagtgggagtgcagagtcttaaccactggaccaccagagaagtccgtgaaagtgagttttaatcttaagtataaaagctatgtgttgaaagaagcattgctaggtcaatcctgagtggcttaaaaccaaatctaaatgaaagggtttctagaacatcaaaatgcagcttagttcacaacctttaacagtaacagaacactcttgacatcgggtgggccgctggctgcttggtgaacaattcactagctcgtaaactgcacccacaattgattttctcttttgtcataatgttggcttcaaccgtgaagaatgatgacaatagtcctcagtatgcaaactatgcttcctaatcagtgcatttcccattatccagtctccttggggaaaaatgggacatcacattgctctgggggggttcctttggatggcttgatctgaggctggccacgggtttttcctgtaggaacttgccagaaagctctgtctccccagagcaaagggtcaggaaagctcagaaggtagcctgccctttcctttccagccatagacatgtggttaattccattccattaccctttgtctgagttgcaattgaaaaaaaaaaaaaacaaacaccaaagaaaaaaaccccaaactctcttggcctctctgccctcaagataatgtgatgaaatggggcagaactgcccaccagctacaccaataacatcttgaaatttcactcttaaccgattaggaaacacaatgtctccgccaagaatggcctcatttatcacagctcccagaatgttctcgctggactgcgtggatgagcaaggctccctgcgaggaaggacaggatgagggaagacccagtgcacctgtggaaacacagattctttttccacgcagcaattaatcttccgctctgctaaattacagcagaggcgggctgtctccggagtgaaaatctgaggtggatgtgggccctggaacagaacagagaacctgcctgatgacagctaaacaccagcagctcaggggtggcagtgagcaggggcatttgaaggacgggaggagatcctatttcctgtcgaccattttttccttcttccttctgggtaaagaaaata

SEQ ID NO: 34694 - DNA, 1861 bp, Bovine  19866880862060
  misc_feature (1)..(1): n is a, c, g, or t
ntcggatacgacttagtgactaaactactactactaattaagtgtacctgcttgtcgtcatttctgaacatttgcttgcttgtttatgttagccagttacactggcgtgcctgtaacagagtgcagtcagtctttgtgaacttaaagcatgcagttcaaattgtgacaggttctgtgttctcaaagaaaccttatctttaagcaaacattcatcaatattctgagtaatgatctcattttaaaaaaagttagataaggaaattatgcttttccgaggtagacactgttaattcactgactttgaaaaaaaagaattcctgtgtttctaccaaactgcaaaaaaatcagcagaattggaaccgttttggtcacttagggttggtaatgacccagaagtctgcctgaccccactgtctctcatcatcttcaccctctctgagaactcatctttgccccttctggcctccgtgtctaccgaagagtactatcctcctttctctctgttgcctgtgtttactttgctttctgtttgcttacatttataatctttgcttcttatgttacatagaccacaggggtgaaacttaaagttcaccgtgagtcaggcagccagccagcagccgggagcttggcatgtagagggaagtcaagagcaccaacccctgtgccaaaaacagcgtctgccttgggaaacttgctccagcctcagtgaaagaggggcctcagacggaccttgaagtgcagcttctggcattttctcttcaggcattttcagaaaacctatgtttgattaaatgcttcctgcaagcaacttcaagaattcctggagttttatcagaggaagttctccttgggttcaggtttcagctccacatacccgagctggtctgtttaccagcagctccctgcaggttaactcctgtaacctggatgagagtgaagcttggaaaggttggtggggaggaggaaaccctcacgagagagcctcactgcgaacctggccgtttatctccctgtctggtcagtgccctttgcaaccctgaggtgcgccgggaggtttctgctttactcctgtcaggacttaagtgaagctgccaggactccattcccagtctctctctcctgccgcccagctatctctacttcttagtggcctcctaaattgctcgacattagtgttttccagtttgggatattatcaatgaaatcatccagtattttctgaccctttcatttttttccccccatgtttaaaaactaagacctcagatttcatcagttagtattactcagttttctgaccagtatgttgtgacacctatgaacagtgatttcttacagttgaagggcattggtgttccactgcagggccaggttagagaagggatggacccctcttccactatctgcctagctgtgtatcacaggccagacgcttggctttcccaagtatgctgtggacggaccacagtcctcaggacacacatgagctgaggaagaagaagagcacttcatctagtgattgctgcatgatggggcccttctaatgatatgctgttgttctccaaacaaaccgatcacggcaaaaactaacctgaactcaagtctgttttccaaaggacagatctgttcccctttcgttgtgtcacccagaatggaccttctgggccttgtacagttgatttctccaaagcccaacttggtcctctggagaggtcttgacttcctcctcattttctgggccagctcctccattgaaacatgtaaatgcagatcagcgaggcatgccctggagctgactatgccagtggtgaacatttacacacatacacacacacacgcgcgtgcgctgtgggaaaat

SEQ ID NO: 34695 - DNA, 897 bp, Bovine  19866880900574
  misc_feature (1)..(1): n is a, c, g, or t
nctgtcatgcaggggcagctgtgggaccccgctcccctaagccactttattaatgacccaggagagaccagtagtgtctctgttaaagtcacaaacgattctggactgagaagccttgggaaccacggcagggaggactgacaaattaatacccaaattaaaagcttgaaatatatgggcagcaaataagaagaaacttccctggaaaaaagaaaatccagtagagatttaatgaccgagtctgttgcttacttaggagaaacaaattctcctagctgattttggtgctttaaaaagtgtgtggtttttaaattaaattattcctaatttttcaaaaagaattgattttggcaaaaatcaattgggtgccttcccccacaccccgccccaccatcttaagtcagtatgtatagacactccactcatcaaatacaatcctgggaaggattgctactgacaatgacctgagttccaaggcttcataaaatcacagactggaactaactaactcattttagataggaaggggcctcagagataatgggtctcagttctttataatgaaagtgaagtgcacagagcctggcctggtatgacattgcctggcagtgtcaggccaggctgtctgtgccctgtcctctaccatactggcatgccttttcctttactgtctgtggcatgattcctggtagcccataaaagggagtgacaccacttcttgtttttttttttttttttaatttaattaatttggctgtgccaagtcttagttgtaacacttgggatcttaagtcttcgctatggcacacgggatcttaagctgtggcatatgagatctacttccctgaccagggatggaacccaggccttctgcattgggagtgggagtctcagcca

SEQ ID NO: 34696 - DNA, 737 bp, Bovine  19866881043153
  misc_feature (1)..(1): n is a, c, g, or t
ntttgtcctggctttattgaggtctatctgtttattgttttaagtcttcatcctgaagtatgaaaagagaaagcccatccctcgtctcccccagtcctcagaggtaacttctgctaacagtgtggagtccatcctttccgatctttatccacaaatgtataaacatataaatacatatatgtgttctatatatttttttctccaaaaataaagtagtgctgggacttttccagtggtctggtggttaagattctgccttgtaaggccggggacaaagatttgattcctggttaagcaattaagatcccacatgccatagggcaactaagccctcgaaccacaattagagaagcctgcaagccacaactaagacccaacacagccaaataaataaataatttaaaaaaaaaagtattgccacatctttctgcaactttttcattttctgtttttatactgaagattgtatttcagagacttctggtatccacctcaacatgtaaagagcttggaagttgccactcccatccttacaaaatgaagaaagttaacaaactgaaaaccaatgacttttcttagacctataagagaattaaggtcatagggcaaatcaccacccctaaatctggagagacaggtgaatccaaaccatctcagctgagatcaccttcccttgagcacaggctgctgcagtcttcaagtgctaggagaactttcatggtgactttgatgaatgg

SEQ ID NO: 34697 - DNA, 1152 bp, Bovine  19866881169774
  misc_feature (1)..(1): n is a, c, g, or t
ntggtaacttggattaaatctgcaaaaccccaggggaaacctgagtgaggtctggggtttagttaattgcactgtgcccatggtcagttttgataatgtaccatagtgaattcagatgccacccctgagggaagctaggggatgatactcaggacctttgtgtactgtttttgtaacttcttgagagcctatcattattaaaaaaaaattttttttaacagtttgattggatataccaagaccaatgatgaaatcatttgttctctcttatttgcaacacatccattgttaacctgcaatttgtggcgaggtgttttagagttgtcgctgaacttgatttggaaaaagttgacatcgtttgataggtggtctttctgtctaggaatgttttgtgttgtattttttcaaggtatgttttatcttccagtaaaatgtgtgtagttttctttaggtaacttgtagatattttaaagtttggggttttaagtttgttcttatggatggatcttttccctatctgtattctttaactggctcttgctggttacatgtccctgaacagaatccccacacctttcaaatacatgaaattcttttagcttgagaaaatgctcttcattctgcagttagagacaatgtttaacaggtttttattcattcctttaaacttgctctcagaaagggtccatctgttcagttattgaatgtagatttaagtatctgttttcttcatctgagtatatgggggatgttctttataaagaaatacaaagttgtgctctgtaaatgtaatgttaactgtattgttttggattctgtctttgaacattgtagaggtgctgtctctctccaggggtcatgtgcattacctggggggccctgggtccctaccaggtcagatggacaaatggggtgtcctgtccatagtgtgatatgaacttttcttgtccctggcttttcttctctgctttggtcgcagagccatgaggcctgggtgggcattgagaaggcctctagcttgccgaagccccaaaattgaaaacagaagtggaaaatgtaccattaacctccctccaggtcagtcttacgaaattcgactgctggagaacaggaaactgggagattttcaggatctgaacacaaaatatgtga

SEQ ID NO: 34698 - DNA, 967 bp, Bovine  19866881199337
  misc_feature (1)..(1): n is a, c, g, or t
ntgcccaggacacccttggcccagcatctatctgcctcttagcctctgagctcagatcgtgttggctcctgtcatgacagctggagatgcatgaagcaaggctgctggcaaaggaaggaatctgaggaaactagattcttttctcagaacactttttgcaaaaccaacttccctaattcagggcccggttcatttattccagatgtccctccagtgttaaggccacaggagcccaacagatacttcagaagtaggaagcagtggatactagcaaaactcattaggaaaaatgttgtcatttagtttaaactaagtatacacctcctctatgactcagcaattctgctcccagttatctacctaagaaatgaaaaaatacgtcctcacagagatgtctattttaatcttcatatcagtatagttcattacgtcaggtgacacaaaataaatatccatcaacaagaaaatgatacagtcaatcctcattattcacacattctgtatttgtgaattcacctactcatgaaaacttatgtgtagctccaaaatcaatatttccaagagccttcaagggagcacatgttctcaactaaagttgaaaacggcaaaatccccatctttttgttgcaactcctacaacgtaaataatggcttctttgctgtctaattagcggcatgtttttggcattttattgggtgattttgctcttaaagatgactcccaagcacactgctgaggtgcctacctactgttgctaagtgtaagaaagctgttacgtttcttacagagaaaatgagcttagataagcattaaacaagcttttttacccaaaatacatattccagggacttctctggtagtgtagtggataagaatccacctgccattgcaggggacacggattccatcactgggctgggaagattccatatgctgcagagcaactaagctcctgagccacaacta

SEQ ID NO: 34699 - DNA, 1493 bp, Bovine  19866881266459
  misc_feature (1)..(1): n is a, c, g, or t
ntctatctgctttcacacttttatttctcatttccaacaacttagaaatgatatctaacacttttcaaataacaaattattttagtaaaacaaaagaaggcaggctgcattttacagcaaagtgataccctagatacattcatgggttagggtcaataattttatgattattatctagtttatagtttgtcagcaaataagtacttttctttagctacagatttattatagaattttcatagatttaaccagcatgacagtttcattctttcctcataagcatgttagctttcctcaagaaactcaaaagcatgcacatttttaaccaaattaacatctatgggcctcatttcaatcaaccccaattaaagatcattaagtggctgcagataaaggacaatgactagtctataattactggctctttcatgctgaaaatccaattctcccatgagcatacgcacatctgcatgatttaaaaatgtacatagaaaataatttgctttttgaaacccatagaaggaaaaactgtaatttttgcttcaaggggtttgctaattacatggagatggaaaaaaagaaacatctacaaaacaacatatttttaactctcatattcctgccactcaaaactcaaaggccttcaggtaacctagcaacaaaaaagaatcacacaaagatgaagtattccattacagccaggtcactcacccccaactgctgctcagatgctttttcactgctgttttcatcacaagtctaatacttgtgaaaaatgaagtctttggcatttatataatcaattacacaccttaaaacatagttttgaacatgtcaagagaattacaacccaggacaaaacccatttcttccctaagtgtattgctattacattaatagttcctttcaacttagctcaaatccagagcttttatttcttacttaaaggagctttattgttcacaagcaacaacaacaaaaaatagataaattagaattcatccaaattagaaccttagatgccaagaaagtgaaacacaaccaaaaactggaaaaagaatatttgtaaatcaaatatctagtaagagtcttataatctagcatatgaaaagaactcttatagctcaacaataaaaacacaagtaaaccaatttagaaatgggcaaaggacttgaatagagcttttcaaataagatcgtttgtagaaacaaccaacaagtacatgaaaatacactcaacatcattagtcatgagggaaatgcaaatcaaaataatgagacaccacttcacacccactacaatgactaattttttttaaaaaagaaagaaaacagtgtatgttttgttttgctggagaggatgtggagaaaatgggaaccctcacacatcgctggtggaaataaaaaatggggaaaccgtgatgggagacagtttgacagttcctcaataggaggaataattctggaacacagaaatgccacaggatccagcaa

SEQ ID NO: 34700 - DNA, 1581 bp, Bovine  19866881292839
  misc_feature (1)..(1): n is a, c, g, or t
nttgattttgctgtaaattaattgtccatatatgtgggagtttatttctgggccctctattctgttccattaatctatgtctgtttttaatgctagtacatacagttttgattagtgtagctttgtaacatagattgaaattaagaagcatggtgtgcccagttttgttcttctttctcaagattgctttggccatttggggtcttgatggttttaaacaaagtttagcattgtttattctacttctgtgaaaaactctagctgtttcttacacctacatttttgtatctccttgtctatcagtttgtgttacttcagcttcagaaatgggtttaagagcaaggagttcattcaatagggcaagaaaatgatgcaaaagatgcaaaagagaaacctcagagttattcctttcccagggtgaagaatttaggatatttgtgttccatgtcctgtttaccattggttgtcttcctcctagaggtgttgattcccagatgcttctgatctgctgtgcagatgaacagagcagccttccatgtttccagaagagccttcaggtatagaggtgtagatgctggcagtcggtagctatttggagcatctaaaatgatgtggtttgcagaaaggatacagagcctcgacagtacctgctacactccaaatagctgtgaaccctggatatcagttctgattctgtcacgaataaattgtttgactttggataagttatgtgtcccttgtgcctcagtttcctcaaaagcagagtgagggattaataatttcatctcttcaactaggatacagagtccttgggagcaggaactgttctttggacaccctgtccttccggcatgggtccagttcagttggatgcctcttcttgctgcttattctatcagtcactttatctaagaccttcaggagactccaaacatggaggatgtttgtgtttccaagagccacactattaccatgcttgggactagttctccttcactagcccatcctttgatgctgaacacaaactctggaagcaggtcgagaagatggtccttgagccatctgatggagcagaaaacaggaacatagggctttggatggactaggtactcagaaatgcttgcatagctagggactgaaaacatttcccaaattttggctgaacagcaggtgctccacacagatttctatgtacatataactttgagtgaacacatattctaaaatgtcacccacagccattaggaatgcagaggctcttcttggtatgggccattaactaccgtttatgaactggtttaaatcccgtgaacggtgcacccagggatgaccttggctcaggtgtcagtaaattatgctgcatagcgctttgcctcatgctaccatccctgatctgaaggtggctaattattacccaggcagtaggcatgtcctttccatattcatgggatttccacttctgggttgtctgttcatttccaaatactttctgaattagtctctgaatcttttctgacttctctaaaatgtaaggtttaatttccatcaagagtcatccatgtctataaataacctccaaag

SEQ ID NO: 34701 - DNA, 1401 bp, Bovine  19866881336881
  misc_feature (1)..(1): n is a, c, g, or t
natgttatactgtaaaactattatactttatcttaatattgaaagtcagtaatacttgtctgtgccacaaaactctaaacttttattgacttaaaaaagttacaaatcttccaaaatataattttgattttgtgtatgagtcctccagtgcacactgtttacattttaaaaattgatgtttttttatagctgcaaaagaaggagctggtgctgttgatgaagaggattttattaaagcatttgacgatgtgcctgtagtccaggtgagtgaagatgtttggtttgattaaaaaggatgggcttattcttcagatttcattttgcaagcatgtgacacacacagtttcttagtaggtagggtaattctgactatcaagaccacaggaggtctggggtttgcaggctaggaaatgttagggcctctcagaactgaaaatggatgaccttccagttagaactggtgagaagtggcttgctccagtagtgagttcgtgagtcaggtcacacagaagagggggaaataagtgactccattccaagagagaacaaagaagcatgcttatatctgtattttccttagagaagtctgtaaatttgaagaatgtaggtttctgaaaggtataaaaaatgttttcataaaaccttagtttataccattgtgatacttcccttaagtacctgacatgtgaagcagagatgacttacagaactcactgtaaactgctttgtgccccagcattgtctctggttgatgggggcttgtggtccattggatgtcagtgctcaggatccctccagcacttggtatctgtgtgtgtcccttgtcacccactgcttagttgccatgtgtatacaaagcagatagcaggtgttttaggttcaggttcatccttatgtccttgaccttcctatcatgccttactcttggtggattttttcctcccccttactgtctttggagtaagataccaggataaatgagaaaataggtttgaaagtgtttaaggttacaagcatagacacaccttgctgtattgcccttcacggtgttgtgcttgtaaatgctgcagtttcacatctatgggcaccttgcctcaagcatgtgtacggtgccgcttccccatcagcatttgctcaccttgtgtctctgtcatgtttggtaattctcacaacagttcaactctccatcagcaaaaagattacagttctctgaagactcagatgatggttagcatttgttttttttttttttttttggcaataaaggatttttaaagtatgcacacggcctttttagacagtgggcatactttaattgggcagttaatagactgcagtataggaaaatctttgtgactcacttcattgtgattttcactttattgcacctgcagtgcactg

SEQ ID NO: 34702 - DNA, 846 bp, Bovine  19866881367174
  misc_feature (1)..(1): n is a, c, g, or t
ntgtgtggtatttttgcactaaaaataaagtctatctttacaggtatatgttttagggaactataaacaagatgagtggggcttgctgggtagagcaaagaatctgcctgccagtaaaggagatatgagtcacaggtttgatccctgggttgggaagatctcctcgtgtaggaaacagcaacccccactccactattcttgcctggaaaattccatggacagaggagcctggcgggctacagtccatgaggtcacaaagagtcggacaccaccaagacacagcatacacacacatgcgagaagagtatgttcaaagcatctcccaggacctggcatgtattccaaataatgtcaaccttcccagcaataagtaccatcagtaaggtgacattaaagtctgttttgtttctgagggacatgtgagaagctaccaagcttccatctaccactggatagcaaagcaaatttttaatttttttctctgaaaacacagtttttggaaggaaaaacaagtaagtttgctactgggcccatgttgcctgcttaaaggacctgcctgctggatatgtgaggtccttacgacatcagtttctagacacatggagcctctgggaggatcaatgagcagcgacctccacgctctgcacaagtgactttcagggcctcccacccccaggctgttaaaacgaaaggtcagcatcctgctggtgagcgagtgaggaattcttcactgacacatacctgctgagtgatttgttgggtgctttttccatccagcaggcagctgtgggtaatgtttaaccagaaaaagaggggctaaattattcaagacatgtttacaatgca

SEQ ID NO: 34703 - DNA, 1125 bp, Bovine  19866881396775
  misc_feature (1)..(1): n is a, c, g, or t
nccctaccccttttgcagggggaagccgggcttcctaattgtactcagaactgtgtctgctctgtgatggaggaggcctggcaggcagggagccccatggatcattaagatcattagattctgtctgcagctgttagaaaacgagcattcatgcgtgtgggactctaccatgttgcataaatgctcagtgtgaataactgtggccacagagcatttttgctttagagaaaggaaaccttttgcagccaagggaagatggccttcagctttgagaaacactgccctcctgagtggaacactaaatcccaggttgtgggattccttcctcctgccatggtagtagcttccagtagtgtaaaggagggacgctttttactctgtgaacaagagagtatcaactgtccgtttccttccagagagagagggagagagggagggagcatgaggactggctcagatgctgcaggctactgttagtgatatttagatacttagatatctccccctctcttttacccctaaagttgaaactaaaacaccaactttgaaatattcacacttagcctccattttacagaggaggaaactgaggcattcagaggaaataatttacctacagttacatagctagtaagtagaacagtctaggtccaaagtatgcattcttaactactgtgcagtattgtcatgtcagtttaaaaacaagattggccatggttcttggaaccaacctttcattttaaagttttttaaaatttattgtattgaactataattgatttacaatgttttcttaatttctgctcttcagcaaagtgattcagttctctgtatacacacacacacatttgtatacacattgtttttcatattcttttcccttatggtttatcataagatattgaatattgttcctttgtgtgggttggtaaagaatccatctgcaatgcagaagacctgggtttgatccttagatcgggaaaatccccttgagaagggcatggcagcccactccagtgttcttacctggaaaatcccatggacagaggagcctggtgggctacagtccatggggtcgcagagcggacacgacttcagcaactaacactgtcaccttctcacctc

SEQ ID NO: 34704 - DNA, 2901 bp, Bovine  19866880164099
  misc_feature (1)..(1): n is a, c, g, or t
ncagtccaagggactctcaagaggcttctcccacaccacggttcaaaagcaccagttctttggtgctcagctttctttatagtccaactctcacatccatacatgattactgaaaaaccatagctttgactagatggacctttgttggtaaagtaatgtctctgcttttgaatatgctatctaggttggtcataactttccttccaaggagtaagtgtcttttaatttcatggctgcaatcaccatctgcagtgattttggagcccagaaaaataaagtctgacactgtttccactgtttccccatctatttcccatgaagtgatgggaccagatgtcatgatcttcgttttctgaatgttgagctttaagccgactttttcactctcctctttcactttcatcaagaggctctttagttcctcttcactttctgccataagggtggtgtcatctgcatatctgaggttattggtatttctcccacaaccttgattccatcttgtgcttcttccagcccagcatttctcatgatgtactctgcatataagttaaataagcaggatgacaatatacagccttgatgtactccttttcctatttggaaccatcccccttggtccaacacaaatttttataagtaaacagcacacacaattctgttactatcctcctgttgtgtaactccacctgagtgtttccacactcaaagcacccagccacaaacaagggtgattctgagcatgagctgaagacagatgaagacctgatgtaggtcacccaggctctagaaggggccaccttctagatcaaagtgcagccttgccaccagctgcctgcctctgagcaagcaggtctttggattagctctgccacaagccatgagcaaccgttagtctaaatttggggttggcagagataagaggccaggcagatggcctggatgagagcctttccagggcctcagtaagaatctacaactgacaattgtcaacagggttaatggactggaaacatgggcatgtcctgctaacaaaggcatccccaaatccctttagaagaggaggtatgggttttcagtctacaggcttggttgtttacccgagtgagtattcctccccataagacccctaaacagagatgaataagggaatagcatggcatattgcacacttaccatcacaggtttcttctgttagaagcatttttctgattttctttcttcccttacctcttgggcagcatgaagagaaatcacaagtcatgtggaggctaaggactccaattgtaggtttaaatttaggttcttctattagctgatggatgctggggcaagtcacttaactgaagagtttgtgaaaatggggttatagcaatatttacctcggagatgctaaaaaaaaaaagcattttagataaatagtgcctgttttctgaatcaatggattatttttatcatgaaagaagaaaataaatcatatcttgaaattgatacgctgatagtctcatcagacaagtagcctctttggagggctccagaagacccctggtgcttggcattatgacctaggtacttccttcctcactttgtgatgaatcatgatcaagtgtgcgtgcgcgtgcgcgcgcgtgtgtgtgtaagagacagagactgtgacagttaagggacaatttggttgtgctgtgcccagatatgttgtcaaacataaatgcttctatgagattgttttgagatggggacagggaggcctggcgtgttgcagttcatggggtcgcaaagagtcggatacgactgcacgactgaactgaactgaactaaaatttaaattagtgggatcgaataaagacaattgctttccctagtgtggtcagccttactcaatcagttgaaggcctgaataaaacaagactgatttccctgggtcaagcatgaattttgtcattcagttggctttggacttgaactggaacattagctcttcctgattctccagcttgctgacccaccttgcagattttgggtttgccagagccataattgcatgagccaattttttaaaaaagaagtctttctgttggttctacttccttggggaaccctgactgattctggtgagacaagaagactatcagcattccctgctggcttatatcacctgagagacttcacttgtcaaacctgctcacagcgctttttttcacagtgattctgcattttagaaatactgcagtgtttctgtcttgtgcctgcttttcattattttcttatttgggataaattaaaagtgtaaaacagggaatacaatggtcattactagactgtactatgttcaagggaatcttaattcaaactaagaccaaagacacacacccactcttgaagacaaaagacaatacaagatagtttctgtcaacataattctattataaggacctacaaaacaaggattattttaataattatgatagtaataacaatagttgactcttagaaagaaaatgaaagtgaaagtcgctcagtccgttccaactctgtgaccccaaggattatatggtccatggaattctccaggccagaatactggagtgggtagcttttcccttctccaggggatcttcccaacccagggatcgaacccaggtctcctgcattgcaagcggataccagctgagccacaagggaagcccttaccagttattggctatatacaagaatttacatgtattatttccttaaacatgataatagtggtgggaggccttcccaaatgtactggagaatcactgcaggcccctaaattttagtgtttaatttctccctacaaatgatgcatttctttgaattttatttaattattttttaagttttgactgtgctgggactttgttgctgggtatgggg

SEQ ID NO: 34705 - DNA, 1787 bp, Bovine  19866880196575
  misc_feature (1)..(1): n is a, c, g, or t
nccgcctactctgtgctcataacccgcagtggcacaattaaggggttaaaaaaactaaggtgcaataggggtgtttgtagggagctctgaactctgcttaaaaatggtaccaagatacgtaagaatatactgaaggtagaaagaggagattccaacatcttccattaattacttttctaaggagcctttcaaccctactctacctgccttgagagtgttttgccatttgcctcccaacctcattcagaccaggaaccaacagcaattagcctcatctaccacaagcctggtgttggagaagactcttgagagtcccgtggactgcaaggagattcaacccgtccattctaaaggagataggtcctggttgttcattggaaggactgatgctgaagctgaaactccagtactttggccacctcatgcgaagagttgactcattggaaaagactctgatgctgggagggataggtggcaggaggagaaggggacgacagaggatgagatggctggatggcatcaccaactcgatggatgtgagtttgagtgaactccgggagttggtgatggacagggaggcctggcgtgctgcaattcatggggtcgcagagtcggacacgactgagcaactgaactgaactgaactgaccgcaagcctagaaggcttaatcaacctaatctcgtggtattgcaaaggctgctaggaaactaaaattggtgtcgttgataagcaaaccaaatacaaaggaagccacagaaagctaagttcaaattctcatttaagtttctattttaaaagctaaaatacagcaaacatcagtgagaaagcttgaaagaagtcgttagcatctcagcagacaccatttggacatatttctcagcaaatggcttctgaaagtgcagtgagaactctgatttctattggtagctgactagagagttgccctgactttacaaccctgcagcaacgtctttggattcggtggacatacaactctccccagtagggaccttgcacagttttcaaatgtagcccctgtgattgctccagaagctgttttgccactcaatgtgttcagccctgaatttagggatggtccccaattccgacttgactatttagtctgatcattaagcagttcctttgtctttcttccatttatttgtttacttacgccttctccttctccctcccggccaaccaccaaactttcagtccgtccctctcccaccccacctcccccttggcaaccacaagactattgtctgtgtctgtgagtttgcttctctttgctagatgagttcattgtgtcatattttagattccacatataagtggtatcacatgttgtttgcctttttctgaattacttctaaatgatgatgaggtctacttagcaagtatctattctgtgccagatgctgggcaaagtgcttggcttatcttatctctaatgtacgcaagactgaaaggtagatcacagtctccaaccctaattacagaaactgagcttcaaggaagtcaaataccttgttcatagacacataactggtggttacagagctaagatttggattcagataactcaggatctttgtcattgtgaacactgctcctgatttatagaggtgtcctagtcacagcttctaccctggacaccaggaccacatcctttctcctattacttggacttgagtgtctcaaccaaacagaagaggccttagtgtacaactaactgtttcacatagtttaaaaaaaagttctagagaacttacatcaaagccaa

SEQ ID NO: 34706 - DNA, 3290 bp, Bovine  19866880414821
  misc_feature (1)..(1): n is a, c, g, or t
ntgtaagacatggcctggggtcttctctctagctcagttggtaaagaatccgcctgcaatgctggagatcccagttcgattcctgggtggggaagatccactggagaaaagataggctacccactccagtattcttgggtttccctggtggctcagctggtaaagaatctgcctgcaatgaggaagacctgggttcaatccctgagttggaaagatcccttgggaaaaggctacccactccagtattctggcctggagaattccatggactgtatagtccacggggtcgcaaagagtcagacacgactgagtgactttcattttcaaggcatgacctaaaaatgtaacttatatcaacaatcccataagagaagttttattcttatcttccccattttatagatggagaaattgagacacaagaagattaaataacttgtccttctaagtaagtatgacgagccaggacctgaactcaagtcgtccaatgccacagttcatacttgaaccgctgtacacactgcctgtcacctggccaaagggacaaaggcagttgctcatttatctgttttatcttttggtatctacacttgcttttctttaaagagggggtctctaagttttttaaagtttgaaaatcatggaactagatctaattaagtcacttcaacagtctaaaatatagctttagcagagctactctaaaggagaaagtaaaattgcatccctcatcttccctcttctctttacacatggagccctaaagacatctctgcaaattccacagcaggacaccatccctccaactgcagagaatgaagaagactctctgcttctcaaagacagaataactaagaaagcaatggcaacttttatgccccttgcactctccaaaatatataggaaagaacagactcaaagggacttagaacctaattcaaatttcaattgattcacttgttgtagaagcttagaggatgagcttgaaaggtgcacaacctatgaagaattccaaatactgaatctgcagctgggataagcatagagtggcgtgaaatttcactccaaatgtcaaggctactgctcgtggccctgagctgctcttatttttcagcatgtgagcacatgttttccaacacagagacatcaataagtcaagccaaggataatctctaggtcattaattaaagcctgtgtacaggcatgaacacgatatcatcatacatagcatacggagccataaacactacatggaaccagcagctataaattatgagcatataattcccttgagcttcataaaccataaaaatgaagctcaagtggtttgtgtagtcatttgaatcccagaaggaaatacagcaccgtgattcaaaagttgcttattgtttatttttatataatggatggatcctacttgtcaattcacgcgtgccctcctcccaatggggccgtccatcctcacactgactctctgtcagccatcccctcccagcctggcttcccccaaggtctcccctcttcacagaaaaggcccccctccatggcaggagcagaagcagcagcctggtgggagtttggggcttcttatcccactagcagacattaataattcacgagagcagtgtaactctgtgaatcatcaatgactttttttcatgggatgcagcatttgaaacactgcattccatgtattatgacttacttacagatttggaaaaacagcagctattgagcactaacgtcttcatgaaagtattgttttaaatgatgtcttcccaatcccctgtcctcaaatgcctcgtctccattcaaaaatgtgatgttctttccttaaatcctgtgcattcatccactcattaacctaacaatgagaaatcaaatatttagtgatcactgattatatacttggaaacgtgtcatacttaggatgttttcctctctcgagaatgtacaatctggttttaaagtaaaataaaaatacactgcagagcatgagaattggagtcaggtaaaagaaagtgaaagtgaaagtcgctcagtcgtgtccgactctttgcaaccccatggaccatacagtccctggaattctctaggccagaatactggaatgggtagcctttccctttcttcaggagatcttcccaacccagggaacccaggagtcaagtaaaccagggttatgtttgaactctgctgcttcttaactgtgtggtattaggtatgacacttaatttctcagaacaatcatcttctcatctgaataagtgaagatgataatatgtgcctttctgagtagctgagagttagtaacatatacctcttacttgctatatgcccttgggtaaattacgtaacccactcagtgtctccatttcctcagtctgcaaaatggggattgtaagtgttcttctcatgttattctgaagattaaatgtgttattaggtgtaaaacatacagaagagtgcttgatacatcataagagcccaactgatgttagtggctcaggttgtttctctacataaagtgcctatatcataccatttagtagatattcaaagtagtataaaataatatcagtaataaataagaaactatttcatatcaaattatgttacatagtctaaaataatttttttaaagaaacactcccaaaggacggaacacagggactcaaacctgtacatctatgttaatagcagcattattcacaatagtcaaaagatagaaggaacccaggtgtccatctacaggtgcatagataaacaaaggtggtacatacatataatggagtattactcagcctgaaaaagaaaggaaattctgacacatggtacaacatggatgaaagctgaagattttatgctatgtgaaagaagccatttacagaggggcaaaatattgtatatacctcacttacatgaggtatcgagagaagtaatatttacagaaacagaaagtaattaagtggcttccagaagctgaagggatgcggtatagagtctctggggaaggtgaaaaagttctggagatggatggtggtgatagacacaacgcaaatgtacttaatgtcacactgtacattgaaaagtagttaaaatggtaaatttcatagcctgtaattttaccacacaaaaaagtttagaaacagacggcatgtaaagagggttaaagaagtctacgatgtctccttagaacaggtggcacaataattgcatcttagaagacaggaagatctggggaaatggcgtgttccgagtgaggggagcacccgagtgaggggagcacc

SEQ ID NO: 34707 - DNA, 1936 bp, Bovine  19866880440332
  misc_feature (1)..(1): n is a, c, g, or t
ngcagacaggttctttaccctgagccgcctgggaggcataagtactgaatctttaaaacaaaaaaatagcacacacacaaaaaacaaaattttactagagagagattttatctctctgcatcatcattaaaacaatttgcttaagcttcttaacatgggacagctgcattttaagttatattgcttagtcactcagttgtgtctgactttttgcaaccccacagactggttcctctgtccaccaggttcctctgtccatgggattctccagacaagaatactggagtgggttgccatttccttctccagaggatcttcctgatccagggattgaacccaggtctcccgaattgtaggcagattctttactgtctgagctacagggaagcccatttatttaggcataaatactagcaaataaatatatcatggttggtcacttaacatctttcttcatttctaaaatggggcaaaagcttagtggaagagaataacaaaataataacataatttaaataaaatgatctaattcaagcatcatcacctctaaagttccatagaaatgagaatagaaaaaaaattgaatgattcagttatgtgcatagctttccctttccacattatgcagagaacttaggttaaagattggtaaatatagcatctggtacatggtgagttctcagtacgtaggtctgaataaatgagtaaatggagttaatgtaactcgttgccttcactggacctttcttaagccatcccacgttggaattcattcaactttacacaaaaaaagattgtgctattttcacaataaatatacaaatatcacatagtagtttatgagaagtcaggttatactgcttgtaacctggaacagtaatactgagagattttggaatgctatacccaatgatggatccacactctgcttattccaaacaagaaaagacattcattgactatttagtaatttatgtttgtttgtttagcaactttgcaaaaaaaaaaaaaaaagcacaatgagaggagtgggtcctggtacagtggaaagagagggaagacaaaggatttaattccaactttcctactatcttatcatgtgactttggctatggcacttggcctccccaggtccccagctcctcttctatgaaatgtgtcctcggataaaatatagcctataagaaaaaaagtgcctccaaacagtgaaagagacttgagaacaattgtgctgatgcatgtttcgaaatgtctgttgacagaagagtaagatcaaagagtccagatctcaggggaagagttcctagaacacatatgttgggtagagactgagaaagtgcagttcagtatatatttgttcaacaattactatactatgtatgtggcatctaccaaaagatttgagttacatgatgaataagatagtccctgctgccatcaatatcttcacacagataccaagataaggactatgatgatcaatctgtgtcactatgactaaattacaggatgcccacacatttggccaaacattatgctgggtgagtttgtaggggtgttcctggacgggcttaacatttgaattggtagactgagtaaaatgaattgtcttccttaacatgagtgggtctcatccaaccacttaaaggcctgactagaacaaaaaggctgaagaagagggaattcctcctgcctgactgtatgggctgagattcggggtttttttccccagtcttcagacccagccagaaaattggctcttcttgggtcttgagcctgacagcattcatactggaattcatgccatcagttctcctgggtctccagcttattgactatgtatcttgggacatgatctccataaatatatgacccaattctttataatagagccatatatatggctttctctggagaagcctaatacaaggaccaa

SEQ ID NO: 34708 - DNA, 1389 bp, Bovine  19866880531716
  misc_feature (1)..(1): n is a, c, g, or t
natttagcaaaaagaacaaaatgcttaaaaatcatcacgttttgaaagctaaatgtgagagctctgtgggtaaatcccctaacaagtgagagattttgaataaacagtaattatgtagcaaaaatctaagtaacagctgcagggaatgttgaaacagagcctggaggtttgtgtacgtgaaggatgtaacctggtggaataatttattatctggaaccagagaatccctatgcatactaacgctatgcatatcatctgtataggaaattttaggaatgaaaatacttccatgtcaccttgaaacatttattgctaaaatgtttacttttcaaaagtaatgtgatgttagccagctgtggacttctggtatagtgatggttaaacataggtatatttctttaatattgtcagagtttcctggcctgaatatggcagcaattttccatttcctcattgaacagaattttttgaaagtcagcagttgaagtaaatgataagacaacaaagaagagagaatgaagagagagagagaaggggagtagcctgttgagaagagatgaagaactatggagttgagcaccccgtaagtataaaaattaagtaaaaattttgcatatgtttgtactctgaatttttcctagttaaaaataacccacaaaggcatcaagaagacctgtgaccagagactgaatcatctttgcatgacatcaacatgacccctcgtgcaggtcctcaggaaacagagtggaacccccattccagatccgaggggacaagctgaggaccctgtccatccgtgtgcatgaggacttcttgatacagtcagagatcatacagccttctttcctacatagttctttctggttattcctactctgagaactgagaagttcataatatatcccattttaactgctgtttatagaaatacacttgtcagagtccatcaaagccaaggacagtgtaaaaaatggagaaagtttccaatgggagatagtcatggaaatcccccaaatgaggaaattgtaagtagattttccatatgactctcattctttaagaatttgctccgtgtatgcaatcctactttcggccagctccaaaggaaatggcctctcacccttcactcattcaccaaaaatcaaacaggaagagataaataatccttccacagtgtcccaataaatccttaaggattgtctttttattttcaacttgatgcattaatcaaatgtcagttgaaaaatatattaaaaagttagatgattttatttccactacagcttatgttgcagtggaatacaatggtaaaacatgtttgtgaagtgttgggctgtaatactgtatatcttctgacataagcagtattataggggttttatctttgca

SEQ ID NO: 34709 - DNA, 1120 bp, Bovine  19866880535592
  misc_feature (1)..(1): n is a, c, g, or t
nggttggtgaagtagtctaccaagtgtgtatggcttggtggttttaggcaatttcagttacaaaccatggtttccctccagccaggatgtaatattcattagtgaaattatgtctgtgtgaagaagaaagataggcgagacttgtttgtgaggacggagtcctcctctggcataatcctagcagtggggtaccttgccttggatcattcagacaaaggctttacttggccgcttcttttggccgtgagggtgttgttgtgaaggctgcgtctcgagtatccttgtgaccagggccatcgaaagctgggaattgtgacaggaactgtcttgtaggacaacatttaaagttctgactaataaacttgggtggcagaaggaaattttatttgacaaaaaatattaactgttcaaaatattcacttattgaggtccccaaagtagatactattatcctcgctttacagaggtgagtcggtggaggagccagggtccaaaccagccaatctaataattgcattgtgtgactgattcatccacaaagaaatcatgagactctaggcatgggaacggaaagcaattacttctgtttcccactggaaacctttctgtgaggggtgaaaccaaatgtaaataacaaaataaaggatgagtttaatgctttgtttactttttaggtttcattaagcacctcaaacggtggcctgtttgagcatctagctaaaataaggcatttattttaatttgcttttctgccattcaacttacatgtctttggaagcttggaagtgctaagaaatcatttcaagtgcagatggtatatatcgatcagttcttaacctatttactgagaagaaatttgtttgtgtatttaaaagagaaataatccttatcatcaacaataaaaatgtattactgtgcatcaaaataaatctttagatcttgttagtttcctttaatgttttctgtttattctgaaagctcttactaattggagaaattcatagaataccaatgttttgctgctgctgctgcgttgcttcaatcgtgtccgactctgtgtgaccccatagacggcagcccaccaggctcccccgtccctgggattctccaggcaagaaca

SEQ ID NO: 34710 - DNA, 1249 bp, Bovine  19866880537025
  misc_feature (1)..(1): n is a, c, g, or t
nttgtacctatcgcagttgcttataattaatcaggtgctattttctttttttgtttagttttgaataggctcattctaagtttcagaaataatcattcttaacagaagagccctgtaacagtagacaagcctattaagacttgtgtcaagctgtgaatctcaataccttggaatatcctaagggtctttggctggaagttataactgcagtttcacatagtagttgtttttttaagacgaagagaattttactgggaaaaaaatagtttgttccttttctcaaatgcagggctgagaaggcattgatatattaggattaataacagatctttaagttacttttataattaatatttagtcatcaagcatttttaatgtaaaagatcttagaattttgtatgtactctttataaaacatctatacgtatgagtgttttaaattttgaatatctattgtggaaaacaacacaagaggactgatttaggttgtatattctctttaagtaacttccatagtaagcattttaaatgtctgtgtttcttttcaaactttatattcatattctttgcacatttaaagtataaatgcataattttcatatatatttacttttgtacagcataccttacaaaatatttttttaacgaccaaaattcaaaggatacaataacatgtcgatcagatgggtttctctgacgtgttctttctaactgagttaactgtttagcttctcgattccttgctgttaatgttgctttgagatcatcctgcaaaaagacattttttttgttaataaatatctctgacttaagaataaaatacacacttctttaagaatgcaaaaacattccctatttgatccaggcatcattaccactggaattattactacattaccagtgtgtgtctttgtatgtaagactatctgcatgtatgtatttaatatcctattaaatagtgacagaattgcagtgcaaaattatatatatatatatacacacacacacacatacatatatatgtatatacacacataaaaatttttgcttgtggtggtagttacatgtatatacacatttattaaaacatttaaaacaggagaattttactgcatgtaaattatacctcaataaaattgattttaaatacagaacttttggaatgtaatatctaccatggtaacccagaattaatagtactgtactgcattctgaaagttgttaggaaactaggtcttaaaagttctca

SEQ ID NO: 34711 - DNA, 1491 bp, Bovine  19866880665470
  misc_feature (1)..(1): n is a, c, g, or t
ntaggcatatttggatatgaccagtatatcaaataattctattaatctttttaggtgtgataccagaaaaatgccattttccttaggagctacaaaatatttaggagtaaaatgttacacagctacaacttattttcaagtggttcagaaaaaaatatgaatgtatgtgtttgtatgcatgtttacatacacagagagaaagcaaatatggcaaaacattaataattggttaaactagtaaaagatacatgcacagtcattgttttttttttttaacttttctacaataaaaatttttcaaaattaaagctgggaaggcaaaccaagatgtaagctcattgtctttggggaaagggaatgtgaagacactgactcaaatatttggaaattctttattgactgtctgatatattactatagaggattggctatttctcttagaaattacataaaacaataagataaacacagaaatagttatagatctgagtatgcatacgcatgcccttcccaggtggtacagtggtaaagaatccgcctgccaatgtggcagacacaagagcagtgggttcaattcctgggtcaggaagatcccctggagtaagaaatggcaacccaatccagtattcttgcttggaaaattccacgaacagaggaacctggtgggcttaagcccatggggtctcaaagagtcagacacgactgagcaactgagcacacactcacacacacgtttatacataatgtgtgtagatatcttctagctacgtctgctaattagggcatactaagcatggtaatctttgtttctaaatattatccttaagagctttttagagaaatagctgtttccaggaccgaagcaggaaaagtataagatgagcctggaaatcttgtggtgccagacaggaaatgctccaataaagatacagttatgtccaaaagacataggaacaaattcgaagggcttctaatggccaaacctatgacaatttgggaaacaatgaactgaagctcattttagtcccaaatgaattaccaaaggaagaaaagcagcaatatccttaactagtagaacaaaaaaactgaagcatactcacaagctctccataacgtgcagttgaaatcatacgtagaggaaaattccctgtgctgctcaaacacaatccccctgtcttcataaataaataagaaaaaaaaaagagtttatgtaagaatatcagcaattcaattttaaaatatatacattatcaatgtaattagccttactaaaatgttaggttctgaacatgcacaggacttgctggtattaatgaacgctggttcacatcggacacacctgtcaatacaacaaaaattatttttaaaatgttaatgaattagctctaatttaattgagagcttgtctttctaacttaatagattagaatagattcattcaactaagcaattacttgcaataaagtaaacttatcaaaagtatacactact

SEQ ID NO: 34712 - DNA, 1017 bp, Bovine  19866880690861
  misc_feature (1)..(1): n is a, c, g, or t
ntatactatagagtatatagtagacaatactctagaagagtatgaatctagagagaatccctaacatgtcttatttttgactgtggcaaagatgaggaaaaaactagattattgcttgaatagagcatcagtttgcttgctagagttgatttttcttgttttgttttaaattggaatttcttaaaagtactttaagttataacagagatgctctcttaactttttactcccttgataacattaaataagtattatataaagtatatatccatgttaagtcttgagaacccttgactataagcaaagaaaagattcgtgagagctatttatcagttgtgttcttttgctgtagctttgtccagacacagagacgagactaaatgctgcttattcctttggaacaacttatcaacaaagtgtaagttggaactattttaggcagtctacattttggcttcatttttcacatcagcaataattgaaataattattaaatttttgaaattagtaattttttgcaaaaagaaagcgaaagtgaagtcgatcagtcatttctgactctttgcaaccccatggactgtagcccaccaggctcctccatgcatggaattttctaggcaagagtactagagtgggttgccatttccttctccaggggatcttcctgacccaaggatcgaacctgggactcctgcattgtgggctaatgaataatttatgaatgatttttattaataaaatcagcatgaaaacagtaccttgtcgtccatagagtcttaaacatcataattgtgtatttgcttctggcatataggtcttaaaaataatctctacttttgagcattttagaatgaagtagaagtacttcatttttaataaacaataaagtgttatcactgcctcctccctcctccctccagtagcaaaatgcttccttttctctccatgcttgtctccctccctccctgaccttccttcctttggtaatgcattttaaaactacagtatgggacaaag

SEQ ID NO: 34713 - DNA, 3045 bp, Bovine  19866880704878
  misc_feature (1)..(1): n is a, c, g, or t
naggcccccattcttcgcttctgctacattcctgactccatggctcagacagaagtgagcagcaatacccagtttgcgcaaagacctgggatatggttaggctggttccacatctttgcaaagaggccctttcctcctgccgcctcccctgttgagaatgactcagcacagtggagaggcagccagcagaagagcctgtggccaaggccaccagcacgttgtgctgcagagcccggtggctctccctatcttgggctttcaaaagcaacccaaataaagatgagctaggtgccaggttcattgatctgcggcggttagaactgaggcggatgtcagccgtgtccccatttggcgccccttccaagctgtgctggaaaggcgctggaggatgcctcccaggggtgcgctggaaagctggctgtctggctcccactcactttgtttgtctgggtctctgtctagtggcaaggcgaccatccaccgcagagctgccatactaggattgctcccctttggcacttccctttgtttttcattcctacgagtaaaagaagattattcattgaataatcagggtcaattggttattcaagaacattctgtaagtgttacaggatcggtccttgacttttagaaataaaacagactttcagagactgggtaagagccagcttagatactgccatgaaagggggacggatgttagcagcatcatgggaaggtccttccaaaaacccctcaaaacaggactggctttggagagctcatagctgttatagcagagctgtttcttcactcatctagaatcctaaacactgaaaagtatacaaaaacaatactcactaaccacctgacactgagcccagccctgctcgaggtcctggaatcccaggagaggctcacggtggagtgaggacaggtgttaactcttggtttcctcagaggaaccatcaatgaccctaacagaagttcacacaagatgtaatgagagcagagcaaagccaggcatatgtgctgggggaagagactatcagaaaaagcctcggcaatctctttgatcctcacacccttcttcacaagggccttgtgtaagcctttcatttctaagggaatttctttacaacactttatggtttacgatcccctttctctaattctatccttgtgataccctcaccagagagaggcttctgactgggctcttggcttagtgggaataattaacatttattgagttcttaccaggagtcagccgttgccccatgtaagccatatctcattcaattttagaacatttctgtgaatcaccttttatccccattcccacttacagataagaaaactaagacttagagggattaagtgagttgaccaaggtcccacagttggaggcagtgggttgtaacatgggcagtctcatggcagaaacctcactctaaaccaagtgtcagcaaattacggctggtgggggaaatctggcccactgcttgtttttataaacaaagttttattggaacatagccatttccatttgtttactattgtctacgactattcttgtgctacagaggcagaattgagtagttgttacagagatgttatagcttacagggcctaaaatatttactatatcactcttttcggaaaaagtttgctaacccctgatctccatcagcctcccttcaaattaaaccaaaatctcatagagggcatagactgtctcattcatccttggctgtcccctcagcctccaacttgggagattccagtattaatggttgcatttcaatggaccttacacacttgctcaattaaatggatttaatctgtatttaagcaatcccaaacctccttctaaaacagtagacattcaggcaaaaatcgtatttgctgcaatcttcattaggtgagacaaatttcagaggtcaagactggtgttctaacaggacagcaaggagaatcctaaattaaagtgtgtgatacatttgtagcaacctctttttaaaatgagttattctgtgagcggctcacaataaactgcatggaaggaagaaaaaaaaacccaatatatctttcagcactttggaaactagaaagtatacacaagcaaaaccccaaggatacaagaataaataaagcctgcactaagtccctggtgctttgcaggcagcccaggaagaaagcagaagcaaaggacgaggtgcaaagtgggtgtccatttgcagcagtggggagggaaggcggacctggaaagggttgcacattctgttgggcacctttgaaccaagggagaccacacccccaaccccactcagtctttatcatgttacatgtgtgcatgctaattagcttcagttatgtccaactcttttcgagcttatggatgtagcctgctaggctctgtctgtccatgggattctccaggcaagaatactggaatgggttgccatgcccaaccaggggatcttcctgacccagggatcaaatctgtgtctcttatgtctcctgcttggcaggcaggttctttaccactagcgtttatcatggtgtttgcccagttttggcaactacccagtcaaggactgcagtggtgtgggaggaacaatgggcccgtatggaagatctggggtcaagtcccagctgctgcatgccctggtgacttcctggccatgtcacctcgcccagaacttgactctgagtaagtcaatgaatgggtgtctaacccaatgagatgaacacaagtgctggagccagatagttctgtatttaaatctcagctctttattgaagtatgctgctgctaagtcacgtcagtcgtgtccgactctgtgcaaccccatagacggcagcccaccaggctcctgtccctgggattctccagacaagaacactggagtgggttgccatttccttctccaatgcatgaaagtgaaaagtgaaagtgaagtcgctcagttatgtctgactctttgagaccccatggactgcagcccaccaggctcctccacccatgggattttccaggcaagagtactggagtggggt

SEQ ID NO: 34714 - DNA, 1845 bp, Bovine  19866880724347
  misc_feature (1)..(1): n is a, c, g, or t
nctgatgcctgggcataggtctgaagttggcagaagcctaggaacagggttttaaaaattccccaggtaatcgatgtgcaaccaagactgaggaaacacagccctggagcgacagaaggactttctaggtggctcagggggtaaagaacctgcctgtgatatagtagagacaggtgacacgggttcgacccctgggtcaggaagattctttggaggaaggcttggcaacccactccagtattcttgcctggagaattctacggacagaggagcctggcgggctacagtccatgaggttgcaaagtgtcagccccgactgaagtgactgagcacgcagagtgattgaaagtgctgatgtggctctcataaccccctgctcttctgaggtgggtccaggcattcagcttagtaaagctcccgaggtgcttcaaatgtgcagtcaaggttgagaaaatcattgctctgaccagctctcaaattggaggtccttacttagataggcagcagcagcaccatctaggaacttgttaaaaaatgcaagttctcaggggccccaccccagatggactagatcagacttccctctgtggtgtaacatgggttcagcagggagatacaccaaacatagttataaattgtgatgctgtctcgtctgtgattttctataaataaaacaaataggggactcagtcgagattccctcttcctccttttctagagcaggggccattttatttttattttcatagaaatgtagaccagccactgggaaaagacaggataaatcattcatgacaggaggagacacgtttgcaagaacacagatttgttgtccacccataggcaattaaatgtcctggagaagagaaaaagagagaggggaaagcacagaaatgcagaggcctgtggattctgagtgggtttcatgtttgtaccactttccagttctggaacttttcatctgccaagcctgtctaaacattgagcacatctggcacttttaagattttagtgtcaaactaattttcttggagcccaagccagactcttctggtaactaagtaacatcccaaactgtgggtaacaagaaactcaagccaatgtgtaaaatcctgtttttggtctctcttttgcattattacttttaaaaactcaagagaagagtttctctggaagaaaaaaacatgagaaaagaagaagatacagacagtacccacagaaaaaaattcaggtaacctggtgagccctgaaaggcaagttgacctagagcccaccccgtgagagctgcacacgaggggaaggcaaggggtggaagggcctggaactctgcacacagccccctgcccctttctcctttgtgtgatacatacattaaggggaaatcccaaatggctttcaggctctaacagcctgaaactgtgttaagacgcatcccaaatcttatgtttcacaaaatcaccatgaaagcaaaaaataatgttgacaacccattaggaatataaacatcacctgttcaagacattctacaaagcaaaggttcttaaaaggaattaagagtttgtgttttgagaatggaacgagcctggaaaacaactcttgaaccctttcaatgtgcagggctccccagtcattggtgaaaagactgagctgagaggaggaaggaagtagagctcagaccctgagccctagggtcatcagaggcacggccatatttgcaaagaagctcctgcctcccctgatggacgggaaacatgaatcaccctgggaatgccttaaaatgtaggttcctcagctcccactcagcggttcttattcaataggcctagggtaggatctgagcatcca

SEQ ID NO: 34715 - DNA, 1083 bp, Bovine  19866880729020
  misc_feature (1)..(1): n is a, c, g, or t
ngggcagcactactgatggcaggtggccaagctccaggcctcggctcctgcgtcatcgtcataatcactcgcgttgaaacggtgctctgtggttaacagactgctccaagctcagtagccctttagtcctcacagcagcagaagccaaggcctctggggtttggtgacatcccaggatcgtgtgaccaggaagaggaaaggctgaggtttgacctggccttcctaacgctgaatcccctatccgttctttctgcccttgcaggggtcatcaaggcaaatgctctgggggccaggtagctaatctaaatgagagaagctgactggagtagaagacattagggagtagtcaggactctggggagtcagacaacaagctgtgcctcaaggcatctcaaggccaagcatttcgaaagcaataaaagccaaggccatttattggatcaccttttcagtgttcaggacatcccttctcgtggttttggtggaggtggaccgcactttatcattgagtagcactgacttggtggcacgaataagcatggccttggtggcagtaagtctccagtataaatgaggaagatcgagtaattctatggcttttaggatagtattacagacccaagggtgcactgaccttgggtaggagcctacccatcacctacccatcaccttgcctacccatcactttgccttctctagaactttcaaagtctgatattcaaagtaataggacattaatggttgatcccttatgcctcaaccccaggcctggtcaaatattctccccctccttccccacctcttcctccctctctgaaatcatggggtggctgcacaggtctctatgctaaggaaaaagagtgacagggtgactgagacagggagatagtcaggccccccaaaggcaccctgagtttaccttctcatcagggcatgggagctagagaaaagaaagagaagagggtggttcatgcctttagggagagacagaacttccccattagtaatatattagtgatatgtggcccagtgaaggtcaagggtttttgccaatcaaatcaaaactcctcttttgagggggat

SEQ ID NO: 34716 - DNA, 1835 bp, Bovine  19866880755294
  misc_feature (1)..(1): n is a, c, g, or t
ntgaagagtgagagtgaagtcactcagtcgtgtccgactcttagagaccccatggacttcagcccaccaggctcctccgtccatgggattttccaggcaagagtattggagtggggtgccattgccttctccacatccagataaatctgatctgttcacaaaaactgtattagtgacatacagtgacaaacaacagtcactgtctctgctgtatgtcaccagggattccctggtggctcagctggtaaagaatctgcctgtagtgtgggagccctgggttcgatccctgggttgggaagatcccctggaggggaatagctacccactccagtgttctggcctagagaatttcatggactgtacagtccatgaagtcacaaaaagtcagacattactgagcaactttcacgtaagttatatctcaataaaactgaaaggggaaaaaaaaaatcaaaccccatattattttaatctaattttatttcaaatcctaatttctgtttgtctttcttctgtgactgtcaaactatccctcactagctctattctgcaactttaagtttgaacaactcttaacaatgacacctagatccaattctgtaggaatttggggacttcaattccaaaatcttttaaaattcagtttttaaggcaaatataagctctccagtttataggaagtcccaccttcctttgcttataaagaagttaaagaaatcttaatcaaactgaaaggcttttcccactcattggagagtctgtaagcaagagaaagaaatgcagagactagagttagttaagtgctgtagctcctgcttctctctttttcctttcactttcattttttttttagctataagaagataaaggaaataagcatagcaaagatcctctgctagagccgtgggtcctcagatttatttttagtttcagctatttcaattaatatttcaaagaaaatttcagcaggggtactggtaatttgagtgagatttaatgatatataaatggatgtaaacaaaatgttagtttcaaaagcaaagattgagggtaccttagaatttcctatcattatatataaactaaatcctgcagactctgaaggacccttcagagccccactactgataagaaatgaaatctgaaatcagattgtctgagttcaaatttctgttctgctggtttctttttctttttttgttttgctgatttctaattgttctgggttcaaattccagttctgctcatttctaattgatttctaatataatatttgggcaaatatttaacctttctgtgccaccacatcctcatctataaaatgaggatatttaaaagaatctatctctgagggctactaagtaagttcatctgtgtaatgcaattaacacagtgctaggttagcatactatgtaagaaattagctatttgctatctttattattaatacactgacccaatggactgtagcctgccaggttcctccgtccatgggatttcccaggcaagaatactggagtgggttgcccatttccttctccagggcatcttcccaatccagggattgaacctgggtctcctgcattgcaggcagaactctttgccgtctgagccaccagggaatctttattattgttcctgtcaccttctttatactacagaaatcctgttgtggtcaagagctgacgatcagtatgtaaacagagttaaaaatatagacaggtaatgttacttaaaagtataatctcctgttacctgtataagtccaatgaccagccaaagagcagaagataccgcgtatctcaaaatgcggctgtaaggagctatgtagctag

SEQ ID NO: 34717 - DNA, 1863 bp, Bovine  19866880864228
  misc_feature (1)..(1): n is a, c, g, or t
nctggctttcttcctgtctctagatggagctccttttggtcacccagtgaataggcttgcttcagaagtgctctttttatcacatggccatctggccaaggccagagcaggtctgtgggtttgctgctctgacctcacagactgttttagccaccagaacacctgttgacactttaacattggaaagtgtggaaaaatagcatcaaataacccagaatttttgttaagggcaggcaaagagagaggaggagggggcttcccaaatactccagtacaaagaaagcactgtgcaaaaatacctatttttgttaacacaatgctttttgtaacaccaaaaatgaaagtcagtacctgaattagacccttaacacacagtcattttcttgccctagaataaacctggaaatgagcaagtgcttagccagactggcctggtattcttatgggtggatgatataaacccttgggttattggaggttagctgtgacaacatggagatggtccagcagaatctcagtggtgccagacaggaagcttaaaatagacttgcaagtgggtctgagatgctattcgcctgatggctagtgagttaaccgtggcctttgccaaaatcaacgattagaggaaagagaggctgctagacaatctttagctccttcttccctccaggtcttagatgagaaatcagcaagtatttactattaagcattaggtacttgttttattcatcctggcgttgagaattgctttgaaattaaattatttgcagttgtgcgctgaaatcaacaaatcatctgtaagaaagaagcagatcatgtactgtggctcatttcttgtgggtcagaggttataggtgtgttcagacttatttaatattttaaaagtagtccatcctcatcagaattcatgaagcagtagtagtttgagggaaatatatgtatcattgttctcttgccaaattagaaacaaaaatctcctgcattgacctaacatgacaacgaatatggaaagtaggtatctggggttgctttccttgagaaatccctgctaatggggttgtcttgaatattaaggatgatatgcatgggggaagggtttttattgtctagccatcagacaactaggcagtgaaaaattacactttttcgttcagtgtgtctctacagatgattctccagaatacagaaggtaaaagatttcagaaaggtttcaggggagctgagaacttggggtggatctagagcactttacagtaggtgccaggtcatgagtgcccctgaagcaggccatgccaatctgcagacttcagcaaaagcccctacactatgaactcaaaaatagtagctgctgatctacacatttctttaaaactataattctctgcttacctggacagcataactataagagtataagcttcccaaggacaggcatggatcatgtcacttttatacatccatatacacccacagcttggcataatagtgagaactgaggggtagtggatgcttactttatactgtcttctgttctaagtgcattgtctggctgtatcctcataacactcataacaggtaggttttaccgttatatccatttcacagaagaggaacctcactgagggtgatttgcactgcttacataaataggaagtagtagagtgtccgtcttacattctgaggcgctatgctttagtgaccgctgcacaaaatagatgctcagtaatgaactcgtgtcaaagtacagaaagtttcacattttcattatgggcccgacagtaaagtatatccttataattgcagaatttccacccatgtttctgtatctgtaaccagcaataagttttgcacagataagtgtgt

SEQ ID NO: 34718 - DNA, 912 bp, Bovine  19866880908693
  misc_feature (1)..(1): n is a, c, g, or t
ntgactagttggcatttcacaaacttagtcagatccaggtaactgaattaatttagctagtgcccttctacacatgttgggggaaaaaatcactcatttcccttgacatcagttctaggctcagatccaacgcctgagtactctgattcatttctactgcatttatttaatgctgctatttattcattcctttatgagttactactaattaaacacctactgtgtgctagcactgaggatacaattctgaacaaaatagaccaaagtctctgtcctcctggaacatgtaatttagacagaaaacaaaccacattaatgagtaaaatataatctctagaagactaggtgtattttgtactcagtagaaaaacaaagcaggaaagggagctacaaaatgccatggggcagggaggaggatttcaggcactgaccggtatatttaagttgagtctcaaggaagtgaaagtgaaagtgaagtcgctaagtcgtgtccgactctttgtgaccccatggactgtagcctaccagactcctctgtccatgggattttccaggcaatagtactggagtggattgccatttccttctccaggggatctccccaacccagggatcgaacctgggtctcccacattgtagagtcaagtgactatctgggggacgaatgctcctcgaaaaggggtggcaagtgcaaaggcctggaagcaggaacactgacacatgtactgcagtgctgagcactacagaccttgtgaagatgcggaaatcatgtaaggaagcaggtgatacagaggtactaaagctaatagcaaatcaactgtttaaaaactggaaagtgaaaagtgaaagtgaaaggtgctcagtcgtgtccgactctttgcaaccccaggtctatacagtccacggaattct

SEQ ID NO: 34719 - DNA, 814 bp, Bovine  19866880960744
  misc_feature (1)..(1): n is a, c, g, or t
natgatttttcgaatgaataagttcggtgtcaagttaggtctaattccaagcccataaaccttccagatatccattggtgcctctcaaatactcttttttttttctttttttaaaatttaagtttatttattttaactagaggctaactactttataatattgtattggttttgccatacatcaacatgaatccgccacgggtgtacacgtgttcccaatcctgaacaaatactcttgttccaacagaagagactgtggtattgccagttttgcaactgaagtaagctcacatgcagccataaagacccagtgcagccaaaaataaataaataaatctttttaaaatagtgcttaagaaataagagtgaagaagctaacattgagagacattatttctaaataaatgttataacctcactttgcaaattacccagacgataaaccaatcaaacaatcaagtcagtcaaagctaaattcatcatatgtatatcaaaactgacaagtaagtaaatgtgtatgaattttaagaaatgtattttaggagaagaagtgcccctcatccatcccaaaactcattcttaggctaaattgtttcaaattataggggacaacttttcagatatttttttaagaggaaattattttccaaggtgacatttcttcatatatatttcagaagacaaattcagggcaaataatgcttatatatttgaaactaattattagaagttgaaagggaagagactcaaatataacttatataagttggactttctgagtatttctgaaaacatttggaaaagacatttcatt

SEQ ID NO: 34720 - DNA, 1257 bp, Bovine  19866881008526
  misc_feature (1)..(1): n is a, c, g, or t
naaacagctgtaactgctctcagagttagctaccacagccaggagacagtcacagattgaggccatcagttctttgtttggtagagaattggagagttgctccagttcagaaacagaaccttcagaagagtttggcaaaattagtgcaatgtcctgtgagggaggaggggagttggggaaaaaacagtttttttagatgattgtcactatcacttcgagcttttatttctgaaatacacagcaatcagtacttaatagttattgaaatagtataattattatcccatcccaaacacagattcaaacacattaaatacaaaggagttgttctgcccttctacaaaggttaatacaaggatacgcacctaaagaatttgcttcagtgtttctactttgtaagactgacacctaatcacttggcagcggaacctgattcacagtattcttattttaaaagaacatctctttgaaaaatttttccttctggcttatactaagtgtagtttctatgttcaaatggttaggttagtactttgggtatgaaaatattttaaattattatatttattcatctgaatatttttaaatttataaagaaagcattcagagaaataaattttaataaatatatccatacttgaatttaaaatatcacaaaaagaaatggatggaatgaaaaaacatttaggcacaatcttccaatattttcctctcgtttttatatacatctaaaattcaagtttttcaatgtcagcaagtttacctaacaataactaaaaacccacactattctttttacagaagtaaagcagactttacagaaacatttttaggtatgtgttattgcctttaaccacttcaatacactggaaaccactattcaacttgggttaaaactataaaacaaagcttgaatagaaaggaaatacaactaggtgaggccagccaagaatgaagtttatgtgatcagggtagctaggatgctgaactgttactcagcatggtcatacaactcaatattaattataaaacaaataccagctgattggacattttgaggtataaagacttaaaatagcctttttaccaggtccaaaactattttctaccagatctcctttttgtgaaaacaaatcacacaaaaaatgttccttcttgacttgagtgttaaatgtaaccaaattggatttttttttttttagctagaaaaacgtaatcttctaatatgtgtgtgcttagtcactcagtcatgtctga

SEQ ID NO: 34721 - DNA, 748 bp, Bovine  19866881031734
  misc_feature (1)..(1): n is a, c, g, or t
nagtgacagagacgctaatggattgatacacccctgcacatactacatgctcaataacttttggctaactaatttttaaagagacactagcatgtttcaataattataataatgtcaaatgaatatataaatcagcacagtaaaacagcataatttcagatgagtttcagacaagagactataaaaagttgtccaaagatataaataatgtaagatgtacattaaaatgcacttatttcagtaacagatgacacaaacttttacaatgttagagagtttcacaatcactttctttgaaattaaatgggtagaccgaggttggaccaatgcttactaatttttttaatacatctagttagttttaaatttttttagacacatcacatttaagaaaatacgtttatattgatatgcattttgttaagcctttaaaagaatccatgacaatgattaataaaaaagtggggaaacaggaaaagcaagaagggaacaaaaggtacacggttcactgtgattggcttccaggcagtcatccaaacgattaatccaagctaatcctggtacttctgtcccctttgccaacgactgatgttaagaaagagtttgtctcagactaggttctcagaagtagagcctgagatacagattagctacacatgatttatggagaaatgactcaggagaaaggggaatcagaaaatgcaggggaagaaaccaacaatgtagctttgagttaaattacagggag

SEQ ID NO: 34722 - DNA, 1186 bp, Bovine  19866881105177
  misc_feature (1)..(1): n is a, c, g, or t
nacttgagagctattcgtggttatggggatggtgcagctgagctggaaacagagttctgcacgcacagctacctgatgaacaagggtcaggggctctgttagcttcgacctcctgctagctggcccgtgcccagggcctgcctacctggccaggctgctcggtcacagtgaaaggactgcttcgctctggtggcaggctgctttggggttggtacatctgaatcattttcataaacagcaaatggacctcgggttcagatgcccacacatcgtgtgtcacagcagccttcagagaagcgtcacaaaacaggcagacggaagatcaggaaggaagttagggcacaggttagaagagggcacgtttccgaaaaggtcctcacaatttatcttttgaaacgcagagacagctgcggggcttcagagggtgtcgtgctggaacgagcacttcctgggacaaagtaattacccaatggctccccagcgctatggagaccagtgaccagcagcaaagggcctctgactaatgtgaactgaattttaaaaggcgcgattttgccaaaaaaagaaaagcaggacaataatgaaattcataaacatttgagtatgacatttatgacttttcttcttttgtgcttgggatatttttctttgatgaaatccagggcacagagactttacatcctggctattcagagttaagtatctccaacttcgagtatgactgccttgtgacaaaacagagcgcggggcaggcgtggaacttgcagcttcaaactgtcataaaaacacagaagccataatgaagtgtgcctcctggtgcctttattaaaacctgctggcctgacgctcccagacaggcctagcccgcaccacctgctgcaagcctgggtgagccgccagcctggcgtgtggggtagatttgggccctctggcggtgcctcccactgtcttttgcactgatttcctttgacctctagagtaatttgaaaacagatgatgttttgctatggaaagttttcctcttggaactgtgcccaagcttttgatatgggaaaatttttgcatcagttgcttaataattcccaacacacatcgtaaaaccctcacaatttagggtactttagttcaccctaccaaaaataaatcaatttattaaaaacaacaaagggaattattttccacagta

SEQ ID NO: 34723 - DNA, 1531 bp, Bovine  19866881107543
  misc_feature (1)..(1): n is a, c, g, or t
ntatgaagtttctatgtaatgaaaagtttcaaacacagtaaaatggtgattattgaacaattaagaaaatgtaattaatgccacttacctgcacacttaaaaatggtaaaatggcaaattttatgctatatatattttgccataataaaaaaatagaaaaaatattagtagatttcaatctccaaaacataaatcaaagaactgtagagtagccaaagtgtggactgtccattttacatatgctctatataatctttataaaccttctattatacctaagacttaaataattcttcaacttagaagcaaagaatatatattaagactgttttgagcacttactttttataagtaaaaaggaaaggaagtttccataacagtgatataaaacattatttatgtatgttttctctttaaattaccttatccaaagttttcatttacttatgtggtacctttaaaaagaacactgatccagaataactttttttcttgaacaagaatctccaccccttcccttgtggaggtatttttcactgttaccaagtttatttatagacctaacccaagtttactttatgccgttccttcaaatacatatagttagccattacatctaaggtttttagaagaatttatcaaagatactgaaaactcctataggcaatgaacattgttaactgtttaaatggcaattttttaaaatacatgcttctctatatttcttttttttacctcaaataactttatatctgaattcagttttgcaacctcttcattaggacttggatgacttcttgctggtgatataaactttggttttttgaagggatttccttgcaactgacttggtgctgctgatcgtctcatatttagcagtattaacctgaaaaatacccaaaagtcatttcatcagaagtctgattagaactacctcccaaatatatcatcactataatcatgacatctttaaaaatataagggaataagcctgtaaaaagccttagaaaacaaattcaacagttggaaacattttattttccatcacaaaaggcttttgaaatgtattaagattcaaaatatatggtacaaacctgaacatatattgtaccaattttgataaaactatagattagataaaaacaataaagccttaaatgtaatttagatagtagtttcaaaatcaaagaaaacataattattcacatacatatattaagcatgttggcttttttcctattccccaatccataaactgcatgcggggagcaatcattgttttcttaaccattttgtaagcagcatcaaccacaaagccagatacataacaaatacttttgaatgagtgaataaaatcctggcaattgaaagaatacatttagagttcaatttttactatcctatttccttttagagcagtgaggtattttaaataaataaatcaagagacaagaaccatgtttccaaacttttgctcaatgttttttccatcaggacaggacagggagacagataaaagacaagaacatta

SEQ ID NO: 34724 - DNA, 962 bp, Bovine  19866881188664
  misc_feature (1)..(1): n is a, c, g, or t
nactcaaaagatatttcaaaaataagcatttataaattaattaaaaccaataaaattcgaaaatcacattaacatgttagtgatattttactgaaattaaaatgctaatcacaatataaacattgtaccaaaagatacggcacgagttctttcatgtccaacaatcttcttctccaatacaacatgtgcatgtgtgtgtgtgtgcacactcagtcgtgtcagactctttgcaaacccaagactcaatactttgactatccttaatgtgaacagaaaaaacttcatttggtagaacaccccattttgtctacctctgttctcatttgcagacatgaaatcctgtattagtactcagttttatggtggccatccaaaagatccaacatatgcatacatacttttactcatatcatttaaaagaaaacacaaaattctaagtttctctgagaatttataaacccctgaaaacatgtccaaacatctctaaggacctaaaacctatctggaaaacacttatcccgccaactgagagagatttttatcatttccttttcatatcctttatcgtcccctcttcaataccactttcctttcaacctacgacacactacctttaaaaaaaaaccaaccaaaaagtctctctggtgccctgctatccctcaagataccactccttcccttcgaaaccacatttccgtattgatttacatacattatttacttcatacactgcctccatctgcctgtttccagtcatcacatagccattacaatacggcttttgttccaaacactttctgaaactatactctcaagtattaccaaaacctgcaaactgtaatgttccagcagctacttcttgacttctctaaagcacttgagagccaaagggcttatctaagactcaactacaagtttttcaaaatcccttcatttagtcataaaatggtttttaatttatc

SEQ ID NO: 34725 - DNA, 1422 bp, Bovine  19866881191037
  misc_feature (1)..(1): n is a, c, g, or t
ncagtatctcttggagataagtctgaatgttagctgtgtcctcactagtactaaaaacttttctaaacattatgtccttggatttaaaaatcattaccttaaaaattatttcctctgcagttctgcagagctatggtgcacccacacagaactggccagcatggagttcagacacgagagctccaaggaattttagacacaaaactcacatgtggttgaagaatatttcaggaaagatgcaggaacttcaaggaatagagcggagaggactttactattctgaccagtttattcatagagtcataaatactaaatttggaaagttatctgggccaaactcttcattttaagatgagaaaatatggcttaaaatagattattggttaagcagttactttgggaaaactctggctttttctgatttccaggccaatgttctttccattacattgttaataatatcaacgacaaccacaacagctactgtttattgaataatgagtgtgcaaagctatttacatacgtttactcatttaactccggcaacaaactaatgaggcggatattgttcccattttacagatgaggaaaatgaaggtcagaaatattaattacttccccaaggtcaggatactgatgtttatatcagtccacagtatagaaagcaagaaggggtatatgtgtcaaggattggtgctgtttgtttacatacaacagaatgtctccatttttttttaatttagagatgaaaattactcctaatctcaaatatcaagggccctagaatatacattctgaactgtcaggtcagaacaaaactttccctgaagtgtgtctgactttacactgacaggaattaactggaaatgagggtgtggcacttccccattcttctgcatgtcaggcttttagagtttagacacgagatgagtcataagggaaatgtgtaggcttttggccacaatggaaatactcattttcccaattgctcagcagcaaaacattgaggccaactctttttgtatgctaggaatgttaaaaatatttttcagtcttagtgttgcttttaaaatcattaaaccaatttctgttgcccctgctgcagtttcaaaagatcctatactcacaagaaatttgcctgctccttaatcttgatttcttatttttccaactttaattaaaaggataacttcctcacactggcccacgttatagagcttgaattttaaaacttccaacatgtattttctgaaaatatcaaaggacacttttcagaaattctgccttccctaaaatgttaactttacactaagcaatgctatgtttgaatgtccccaaaacaccagaatgagttcttgacatttctctagtacaaaataaaagcataagaagagagaaagagagaatagcagtgtctgaaat

SEQ ID NO: 34726 - DNA, 861 bp, Bovine  19866881269713
  misc_feature (1)..(1): n is a, c, g, or t
ngatctggccatgttttctttatatcactgtaggaacaggtctttactggcttattttctttaaagtaagtgattttctgcattttaccttagtgccacaacctgaataacttgtaagctctctttatgaagcaactgtttttacttgagggggtttctaatcaagagtatttgggcaagtgctaaactccccattccctgagcgtgtggtgtttattctatgctttctttgggttataacttgggcctcgtaaaaactgtgtgcggtcacactcagcagtgtcattttcatcccaggcacagaagtctgtctctgttttgctgccagtgccagctcaagaaaaacgttttgttacttatgtgggatgtggttttgctctgaaggtaagtttcagagcacaggttactgaattttaaatgtctgcttaaaaaaaaaaagtctgctaataagcatgtaagtcttcagagttaaaatgctttcaaaatctttggtgtaaaatttagtttaattttagaagaaagtatgaattgttctattttactaggaagtctgcatttatttataataggtatctcattctgaagatctgccttaagtaattgtttattatttaatgtagactgttaatcaagagtgaatggtaccacgctggctaagcgctgaactcttagcattggttctctgcctccacgttcctttcctcctcttcccatgggagcccccctccctgcttcactgttctttcaggggatgtgatgttcttcacgtgcctctgccgtacatctcatccagttgtgttgtgattattaagtgactattttcccactgacctgtgagcctcaggaagagaggaatcatcc

SEQ ID NO: 34727 - DNA, 1073 bp, Bovine  19866881275555
  misc_feature (1)..(1): n is a, c, g, or t
nggctgtgatgttgatgcagactctgtcagaacatgcctgagcctgcacgtgggtaagatgaggggcccccacataagcatttgacctagtttcaacctcaggggctcttaattcacttccaaggaccagatgaagtgataaccgtgaggcgccaccagtctggaatttagctggccctggaggcgtggcatgtgcgtcctgtgggtgaggtctaaattagatggcaggcaggtatgtacacaggagtggtcattactgcgggcagatgtgcacggctaatggctggcagtggtgattgctgcagggggaatttcttgataaaaatgagttaaaatgagacaatggattatccggaagggtgcttttctacagactacccttttattggtgaaagcaatccaaggaaaaaaaatcaagccattaaaaatgaaagccactctaatgtatttatttaatatcatctatgtagctcacaactgtatgcatacataggagtctgagtaaattaaaggaaatactgtttttatttttttcccaaataaatggaaatgggaggctggtacgttaaggtgataaaagaacctaatgtacaggggcagagggactgcttgcaaaagagctaaatttttatccatgtaagccagactgcccaccatctcattacactgcagaaagcttacaagcattgctcccaatcacaaagaaaaatcagcatgcaagtgacctgtgtattagcatctctgcaaatctcaggcaggagctgagatttatataccctttacacacccctgaggaaatacccgttttatgccattgataggccagatgtattttcctctgtgaaatgtgattggaatgtaattagaagaaaatacactgtgtattcaaaaacaaatgcactgtattctttaaaactccatggtctttagaacaggcagcaatatcaaattagaggagctgtatggaagggttgtaattgtgtgatcagtcctgtgtggttacatttgtgacagagcactgatttacttctgcagccactgagctgaattgaaaatttcacatgtctcaaaaa

SEQ ID NO: 34728 - DNA, 719 bp, Bovine  19866881329318
  misc_feature (1)..(1): n is a, c, g, or t
nttgtggtagccttgtataaactgtgttcctctgactttcaatcccattgcatatcagtatgccctaaattgtatatttttttaaaatacaaatgtgaacacatccctccttttcttaaaaatcattcaaagattcccagtagcctcccagaaatttctcaactctgtggcactttggtcaagactcttcatgacatgggtgatgcctccttttccagccttatccctcttgactccttcacactttcatgttgtccaattataccagaatctatttgcagaacctataatttgctctgcttctcacctctgttcttacctgttgcaggttcctatacctccatttctcatgcttctggccaactttctcttcattaagactcagctcagatgctttctccccttggaaaccccggcctcatacagagttcacagcctctcttctgtacacccctggcgtcatgtccctgcctctggtggagctcttctcatgttatactgtgatcagtagctctcttctatatcagcacctatagtgcagggactgtgtcttaattatcctggtaagagatattcaaacttactgaatgcaaaaatacagagaaaggtttgaaaaatagtaattatattgaattgtcaaggagtctgcttcacctctttggagcattaatagtgtcatttgcttttatcataataatgaagtgaccaaaataaggaaa

SEQ ID NO: 34729 - DNA, 1408 bp, Bovine  19866881335544
  misc_feature (1)..(1): n is a, c, g, or t
ncctatagcataaaatgcttggcacaaagtactaattttaacttggcttattcccaaaacatagcaatatttgtgtaaaataacttgattaaaaatacttggaaccctaagatatttacataactgggatatatataagaggagagatggttgctggctgctttgggttaggtttcctacaccaatgcctacaccttggcagggttatcaaaggatgacagaccccggggtccaatctgcagcttttcatgttcagaaacttgcatatgcttaagctctagggaaatgagccatactaaccaaattaagagactaaatcagactataaattatataaatttattgacctataaatgagacctgcctatttacaccaactggtctatgtattctgtcctataaacggtccatggggaagccaagttattagcactaagttgtctggtgaacattaaaccaaaatacaagggagatgaatgatcctaaggcacaagagttttaaaccaggagcacgtaatcagaatcacttggggcagctttttcaaaatcttcatgactgggtcctactctcagagaatctgaactggctcacaagtgtctggagtggacaaatgtactcttaagagcttccctgaagactgtaatgtatactcctaattaagaatcaattaatagataacacctttatgttgagacagcctgattcatggaggtgcatcacagagatttaccagttagacttcccaaatcaactagacagggcaatctcttctctgactctatgcaacccaatactctccttataagaagatacacatacatcatatataagaagatacacagaaatacacaactcttaaaagttgtgacttataatatttttattggttatatccatgcacatttcatgaagagaaacccatcattttgactgaatttgggaaaacaatctagtttcagttggaacacatttattaagccattgcttaaagattacttatatgtgtgaaaggctcatttcaatcatttttttattgatccttacttgctatgatgttagagggatggtaaattatgtactatatttgaagtttgtagtatactctgcctgttattagttaagcggtacattctgggctatcataggttttttcttttaaggaagaattcaggcttctttttttgctgggcatcatgcccaaagagtttaatttttatcactgtgtatagaatctgttcctttaaaagttgattaataaattgttataatcctgttgactgcagagttatagaaagctgacttctcctatgatgaactatgtaaatataatccactgtaggaataaacatggagaaatgtgacagaacactacatctcctaaatacataattaatgacctccacataa

SEQ ID NO: 34730 - DNA, 1838 bp, Bovine  19866881359162
  misc_feature (1)..(1): n is a, c, g, or t
nccttaggtggatcctacttgagctccacggcgcaattccacctgacccttacggatgtgaacgacaatcccccacggctggtcaaggagtacacaggcttgttcttttgctatccccccaaagcacccggaagtctcatttttgaggccaccgatgatgatgaactggcatttcggggtcgacactttacattttcccttggcagcgaaagcttacaaaaagactgggaagtttccaaaatcaatggtgagttgtcaaaagaacattgagaaaaacactgatgggcgatgaaatgagtttttaatttgccttggtgtgtgtgcagcactcaacacagagctttcttccccgctccagaaaggaagttcatgctgtggaaacttgcacaggcaagctctccagagggttgaaagcccccaaggttgggaaaagacagattgttaacactcagtgtcccctttggtgtaaacgaacagttggacagtagttggtgtacatgaattgttttccaatcagagcagcattgcaaaacaaccagtggcagctgagaaacagattttgtcatgatcttttaaaaacagctttattgaaatatagttgacatacaattaacagcatatatttaaaacatacagttttataaaagttgatataagtatgtgccactgaagccatcagcaccatcaggtaagacgactccaccagctccaccaggtttcttcatgctctgttgcaatccctattttccaccccacgctgttcatccctcagtcagttcagttgctcatcgtgtccaactctgtgaccccatggactgcagcaggccaggctttcctgtccatcacccccaagtaaccactgatctgcttcctgtcactgtagattggtttgcattttcaagagttttatgtaaataaaataacagcatgcaattttttttgtttggttaatttcacttagtatacttatttggagatttcaccgtgttattgcatatatcaacacagcactcatttgtattgcagaggagtattccattgtatatcatgatttattattcgttgacttattatcacttaaattgcttccattttttgccatttcaaataaagctgctatgaacatttgtgaaaaagtactttgtaggagcctgtgcttccatttttcttggttaaatacctggaagtggtcatatggtagctatatggtcaaattttaaggggatataaaattgcttcccaaatagtctgtaatatgttacatttcccaccagtgaacgagaattctagttgcttaatattcttcccaatgcttgttatgctcggtctttttaattttagccattgtagtgggagtgtagtatttcattatggttttaatttacatggccccaatgactgatggtgttgaccagcttttcataagcttatttgccatccatatatcctcatcagtgtagtgtctggtcaaatactgtgcctgcttaaaaaatttagcaaaggtttgacttctgttgtggtctttgtcagatatatgtttacaaatatttttttccgaggcactattatatttttattttgtaacagtaccttttgaagagcaaattaagtttttttgatgaaatctaatttattgatatttttcccttataatctgtgactgttttgcatattctttaagaagtttttgccaagatcactaaagttttctgagatttttttttcttccagaggaaaagaaagctatggttttagcttttacaattagctctatgatccatttcaagttaatctttcttgcatgtatggtaaatgtcaaggttcatttttttttaaat

SEQ ID NO: 34731 - DNA, 1603 bp, Bovine  19866881366593
  misc_feature (1)..(1): n is a, c, g, or t
nattctaccccttaaagcccatgtttctctcttttttaaaatacaaaataggagccagaaaggacatggaatattccatcatctcatcctctcttgtgtgtttatctccttccaatatatccattactgggttgctaaaggtcatggggagagtgaagcctgtggattattaatagaatacataattcgcttaaataacattttttttctccacatgattttgtctaaaaatattgtgacataaaatttgtatttatctcctttaacatttgagagttaggcagaataaatgatctgccctataaacataatttcattgttgttcatgtgcagatgctttagtttcaaggaagctgaatcaaccagcgcacatggtcacttgaatcaggacactccagacacagagacgggagacagtgcagagccaaggacagaagggccaggagagaggctctcctctcgggaggaagtgacaataataaaaatttaaatataagaagaatagtaatagtttgtgcttattgcatgcttattacttctgtttacaacagcactttggctattatttccattgaagagaggagaaaattaaagcttagcaaggtggtgacttgactgcagtaatgagtgagcaagaatttgaatcctctgacttcagagcctcttacttcaccacacacagggctgtttccaaatgcacagtagaagagcctgctatttacaagtgttgtcttgcaaattttccgggaaatctttgatcattttttaaagcatttttgctggaaggaatcctgtaagatcactgcctcagagttcagatagggaaatcccgatagtattcttcttaaatctaataccttttgatattattcagcccttttatcatctttgtcattctccttgagttcctctagaaagatgatacattccctaaaattatggatatagctcaactcctgagaggcatccatttgcaaatagatgaaaagctttgccactgtaggtgagatgaacaaggtagactgacaacgtggcaggttaaacattccattaccactgacctgctcagacacacagacacaatggctcactctcctgtcccctggtgaaaaatcaggggagaaaaggggcccatatatacaaaggttactttttaatccaatacctggaaagaagtagaaggtttacaatcatcaagcttaatcttatctaaacttctgaagattttatacagaggggtgaaggttgaagggatggggatgggaatccttctaaaaccagtattcatgttggcaacagcagctctccaaagctacagttcacattctgcagcactgtgggcactttttttctcttatacccacccccctccacattcccccagacacatactagaaaaacattcaaagccagtttttaaatgcaagcatacattttttctttctcgcaaattagtttccccttaatgtaggtattgttaaaccactgacaggcaaacagcaagaatgcctttacatgagtatctctttcttccaaccccagcacaaatataaccatcctcacaagggcttctagccgtttaggtttcaaggaccaataaatg

SEQ ID NO: 34732 - DNA, 1027 bp, Bovine  19866881403846
  misc_feature (1)..(1): n is a, c, g, or t
nccatgggattctccaggcaagaatactggagtgggttgccatgccctcctccaggggtcttcccaactcagggatggaagccaggtctcctgcactccaggcagatagtttactgtctgagccactggggaagcctgggaaggatatggagggccagctataagttatacacatatttctgactgtggtgggtgcccctaacccccttactgttcaagggtcaactgtacctacttccaagaatcttaaagtcaaatagggcaagtaattgatagattaaaggaaaaatccacatatcaaaaaatcattaaaactgctacataagttcttcatgactaaggccttaaaatgttgatggtaagattgggatccttcttgtaaaatcctctatacattgcttatttaaataagagagacatgccgtaaactccctcttctgttctgcactgagaaatataagctaattaatactcaatgttacaatacctcaattctcaccataaattagggagaaatatagcacagaaacacaaagtaagaggaaaatatatatcactgagaacaaaagaatatatcactgagaaccagtgggagttttcaaaaaagacagacacatcatattaaacaaaagctcctaaatattttgatctcctagatacaaacctagtttcactcatttatcacctgaagcatgcagtctctggtgagcatgtccctgtgcaaaagaagcagattcctttgccatcaggaagttctcttatccatgagtagagacaaattaccatttggtgccagcccatatggggcttctcgctgaggagaactccattagggtatgatgagttttatctgactgataaccatggaaaggcaatctctcctacctgtcactcaagaaagatttctttaagggcttcatttgcatccctttaaattgttttaaacaatagtggagaaaaagagcttagaacacctcaagatcaaacggcaggagacttaagctgtccaagaactatagctccacct

SEQ ID NO: 34733 - DNA, 1022 bp, Bovine  19866881405142
  misc_feature (1)..(1): n is a, c, g, or t
nactgcttcactggtgctccttgtgtgagggttacttggtaacctcatgtactaaaatatcaccgatgactgtgttcgagctccctgaactcatgcttcctgatgctaccatcttggctgctttgccttccaggacctgacgatgactctgaaccatgtcaccatgcgccagggcacggcgggcgtgcagccgcagcagcagcgctggagcatccccgccgacggcaggcatctcatggtccagaaggagccccagcagtacggccagcgcagccgtccccctgccgcccccgaggacccctgccgccggagctggtcctccgactctacggactcagtcatctcctctgagtccggaaacacctactatcgggtggttctcatcggggagcagggggtgggcaagtccactctggccaacatctttgcgggtgtccatgacagcatggacagcgactgcgaagtgcttggaggtaggtggcctggctccggggggctttacggggtcagcagcggttcaggaggaagagcaagtgggtgggtcatttgtctgcagagttgggaactgcaattatgccttcttggctctgcctggggagccgagtccccacagaagcgctggcataggcctctgggacaagaaagtgaaaatgcttgtagatagaagctgggccagagagggaatttcttacattccaggtctaaagggaccggggagacggttttcagagggtggagccggagggtcaggatcccacctctggcttttgtcaggtctgacctggacctttcaagcactcagtgtagacacagcctttttccatggtgatacttaaaaccaagccaattagaaaactgttaggatgaattcattagtttgtttattgcagtattagaggatttgctgctgctaagtcgcttcagtcgtgtctgactctgtgcaaccccatagacggcagcccaccaggctcccccgtccctgggattctccaggcaagaacacggaggggggccattagagg

SEQ ID NO: 34734 - DNA, 607 bp, Bovine  19866881406858
  misc_feature (1)..(1): n is a, c, g, or t
naactcaaaggggaagccatggtttgaggctaagatgccagtggaatgtccatccctggcatatactgaccagctcatacaggaagcagtagggttgaagctccatcatcccctcctccaccccagccacaggcaaatttacaaaggaattcagaacatgctgatgaggatgctgaagcccttggaagccctctgcgactataggcaagaggatgatggtgaggaccaaattccagtgatgaagatggaattgctgactcggaacatgaagcattccagtatccatacttggatactgaatacatggctgaaggcagcatttgttcctcctacaacacatgatccgccagacagggagtttgtaccacatactctagcagtccatgtgagacagttttgaaatcaatgtgaaatggaaatcaatgtgatgaaagatcaagacccaataaagaaaatgcagggtcaataaaagcctcagtgaagttaaccaaactgtcagatttatatcaggatgatagaggtgcaagatggtgaacagatttagaagaaattctgaatttaagaataaagagatttgagtttttgcacttaaaaccagaaaacaagg

SEQ ID NO: 34735 - DNA, 1380 bp, Bovine  19866881461173
  misc_feature (1)..(1): n is a, c, g, or t
nactcagcaaggcttgaatccggtgtgaattaaaaaaaaaaaatatatcagagcacttcatagctacccagggctgagagcatttaatacccgcagggtgcctctcctatgcggctctacttatccaccaggcaccagaatcagaggcagtttagacgcatcagctcacagaaccacagcccaaacatccacactcccaccccgacatcattcccaccagctgtcccttcgccccaccttttctgagagctccttccctgggaatcctcccctggctgcgaaacctgccctggtgtcatttccattcccagataacaccaactactttaccccctagagcacgttccacccagatctcctccccagctggtatcctcttagacatccccctgacctttctcggcgtgaagggagagcatcacctggccgacttggatccagtctctctctcagctggtctggaggaaggtcaccctgtctcagagctaatgaggaagtggttagctttactggagttcagctcagaccagcccagcccagaagccaatattgttcaaagaattagacacgcggccaggtgcactttgccccagcagtcaatcaattatccctgacttcctgggttttttacatattgttcgttgtttagtcactcagtcttgtctgattcttttgcaacctcctggacggcagcaggctaggctcctctgtccatgggcttttccatgcaagagtacagaacgggttgccaattccttctcagggggatcttcctgacccagggatccaaccaccatcgcctgcttggcaggtggattctttatcagtgggccacctgggaagccccttcccccaataactgaacatcctctccattactggggtatcacatggctcccagtacaacatcgccaatgtgctgactttccttctggaatttaacaggggccttggactttgacttggacttgggcttccctggtggctcagctggtaaagaatccgcctgcaatgcgggagacctggggtcgatccctgggttggaaagatcccctggagaagggaaaggctgcacactccaggattctggcctggagaattccagggactgtatagtccctgaggttgtaaagagtctgagtgagtttcactttggactttgaaattaattttctgtctttggaatagaggaccctttggtctttttctttgttgatcatgaggaaaagactggagggagaattaccacagagccagtcccagggctctcagggtcaaggacacatttcctgagcctgacacgggcaatgagaacttacttctccccatttttagtcagctccctaatgaactattagtctactattctttgtggagaag

SEQ ID NO: 34736 - DNA, 612 bp, Bovine  19866881475698
  misc_feature (1)..(1): n is a, c, g, or t
nttctttgatcttgtggaacaaggtcatttgatttggttcacgggagggcagaagtgttaagaatgtgagagttgcttagcctcactgacctcatttttctaaatgtagctatgttgtgaaacaaaggaagaaggatccttgctgggcctgccggtccaccgagcatgctgactgctgacccacaaccagctgatttcacttcagggtccccgagacaagtgaggcttagtcttctcaaggggatcaagaaggaagaagcccatctagacagtgggctgtgctcttgtgctttgactgtaccagatgcacactagagacagatggagaacgcagtgcagctcaggagcggcccagaaatgagtatcagaatgactatcacatttgacataaaagcgaccttgatccacatctttagtgtaggtttccagagtgactgaggggtgggaatgaggaatccgtcaaaaagagcccttgactttggaaaaggccataggcttttattgtttaattggaaacctcattttgagtggaaaaagtggtaacttgttcttagtaagtccaatctcagagagtgagaaaaaggacttgatttgtgttttgggggaaggcta

SEQ ID NO: 34737 - DNA, 867 bp, Bovine  19866881714841
  misc_feature (1)..(1): n is a, c, g, or t
nttcagtcgctcagtcgtatctgactctttgcgaccccatgaatcgcagcatgccaggcctccctgtccatcaccaactcccaaagttcagtcagactcacgtccatcaagtcagcgatgccatccagccatctcatcctctgttgtccccttttcctcctgcccccaatccctcccagcatcagagtcttttccaatgagtcaactcttcacatgaggtggcccaagtactggagtttcagcttcagcagttttacctttgttcttattgaaaaagctacaggtttttcttttagagaactctgtgataatgtattacttttccttgatatatcttgttacgtgattttaggtatttttccatggatgctgaaattttatctttaattactagagttttaaaatcttaccagtgattatatttttctacttgtactaagtttgtatgataagaaatttacattctgttttcgtggtaatgctagaagctggtatttgaatttcccagtttatagcatatatatgaaaaaatacttaatacaatccaatttacttgtgcttttattttgctgagtgattttattacttaaatagtaatgtcatctataataattggtttttattttgtttatattctagttcattcagcccctaaagaaataacagtgtctaagggacaagaagagaaacctgatagcctagttaaatatttcagtgttgtttggtgtaaagcttcaaagaaaaaacacaaaaagtgggaaggtgatggtgttcttattgtaaaaggaaagtcatttacattaaaggatttggaaggcaaagacattggaagaggtattgtgatattacctgatgtttatgatttgg

SEQ ID NO: 34738 - DNA, 992 bp, Bovine  19866881926196
  misc_feature (1)..(1): n is a, c, g, or t
ntgactgctgaccagagccgtcctcttcctgcactcccagcatggctctgctatcgccagtgttggccacgtgaaggtcaacgccatccacgtgggccacgcaagctgtggccccagaaaatgccactcgaagcactaggtagttgaggaaagaattgggatcaccaacttgagcctccaaggagatgtcattatcaagcctcttgaaagcattaatcaaagcctccttaacatcaatatcagtcgactccccagtgttgaggtcaataagctcttgccagtaagtcctcaagctgttgaaatataacttggatgcctccttactgaagtaatcgttggggtgcttgtgccactggagaatgggcagcagggctcgaccactctctacagcattttcgatctccagcaaagtctcgtggggtaacaaagagacagcaatataataaaagagtctttcactaactgcctgggagcaagcacagcctgcgtggccatcaaaaacccccaaaagcatccctctggtctgcaagcaggttgctgcactcctccggtcctcaatgggtgcgtttgccggcagctgattgctgtcaaatccaaggacagaacttacatttttgccatcaaattctggcactttgaaactgtactcattagctttcaggatgctattgacttggggaggtgtgaggtaaaacttctgcggtgtggaagcgtatctccttccttgggtgtactgccaccagctctcctttggcctgtaaaaggtagcatacgccggatggggtgtgtatctcgggcgactctgcggaatataagggggtgagcagcagagatgtttgtggtggcagtaacatgcagtgccatagattctgctcagttcacagttacgaatcagagggaaaaacagttgaagttggtgctggcatggcatcagagaacagtggcaggctggaacttctgaccgggattcctagacagcaatttcacaggta

SEQ ID NO: 34739 - DNA, 1703 bp, Bovine  19866880353643
  misc_feature (1)..(1): n is a, c, g, or t
ngtaagataaagaaagtaacatctaaaaaaagaagtgaagcagaaaggcctactaaatacaagctgtaggacttttgttttacttttagttttgatgaggttgagtctctgcgatgggggagaggcaggaatgtgaactttgcccagtgcctgccatcaatcagggcataaacttccccgaaggccccggattcaggtcaggagatgtgagagccctaggaggagggaggaaggagcagctgtgaccttccacctcttgcctggttcttgtgccttgtggtctgggtaggggccagactctctgctgcccatggggagagctggtgttccaattccaggccttgccccatcaagaaaagcttcagagtacagacttcaggctggaggaggcttgtccccactgatccaggagcaagctccactcctgtcccaggggatggggtccctcgggggcctcatcctcacagtctaagaccaggaggctgtgcctgaagcgggcccacctggttccacgcctggctgtgcagatcaccagctttgtgaccttggccaagccacttctcctctctgagcctccacttcctcctctaagaggagctaataatagcagcttgtcgggatgctgtaatgattcagagagggatgggtgtgagcagtctggcagaacagaagtgtgtcaccgtgcccgtcactgcaaatatccgtccaaccactgttggccaactaacagacacagagaagatgtcccaggatccagctggggaatcccagatgtccctggaaaccctgaaacccaacctaacctgactgactgtgctaagtgacctcccctgggtcctaagaactacctgtgacttaggtcagttaccactgtctctgttttacaggtgaggaaactgaggcctggagacaccgattctcttgcccagggattagaggcagagctgggattcaaaccaggcagtccaactccagttcctgggctgatccactattcaactgcctgcagaaaccccacagctgggacttctggctatgactctgagctcctgatgcagggggctgggctttgatctgtggtcagggaattagaccccacatgctgcaactaaagagttcaactgtcataactaaaggtcctgcatgttgcaactaaggcctggtgcagccaaataaatataaatattaaaaaagagaagaaaccccacaaccaccggggtcagacgtcccgttacttgaccgagttttcccaggatctgttatacatcaggcctgggagaaggccacagggaccctgactcagccttagttcctggaagccgagggcggttccaggccctgccacgtccgcctgctgcttaccggtgcaggccacagccgcgaacacccagcactggccgtacttgacgcgctggcagccatctctcttccagcgccgcaggatgtccacactgccgatccaggacatggggctgatgccgtccgcggtagtttgttgtcccagcgccccagcagcacgccctggtcattgttgcagttgacctgcggacccatgaaagcgtcagaggggccaagtctgtggttagtgacggctgtgatagagtgggcatgaactcagcacgtggtgaaaggcaggggcggggccttccaggctgaaggagcagcaggtgcaaagatcccgaggtatgactgatggggaggtt

SEQ ID NO: 34740 - DNA, 1500 bp, Bovine  19866880384509
  misc_feature (1)..(1): n is a, c, g, or t
nccgagccactggtggctccaggtggaaggccacatatgcgctcagagagccaagaggggtcccagctgccccctctcctccaagacagcggtagggtgtgaaaagggctgagacacactgcggggacattgcttcatttcacgttcacgtgagtcttctgaggggagcactctctttagctccttttgcaggttggcatagtgaggctcaaagaaactctgctcccctcaaggagatgtaaccatgaagtggcagagacgggacttgaaccgaggtctgtgggtccaaagtctatgctttaaagcgctcttgtcatccaagctttagaagaagcccagaactttcgactgaactcctggggatgaatctagtgatgggctggtaaatatttaacaactagctctctggaattaaaaaaaaaaaaaagccttgatttgtcgtgtctgctggtttctgcggtgttaaaacttccacttctgctgacgtcaagctaccagcatgatatcactgaatgtggagttgggaagagatgaacccgatctgctcctgcacgagagaagagccagcttcagcacaccactgcatgaacatcctgccctcagcccaggccccccagtaaaggcctgtaggcctgtctgaggaatgaatgagggctgagaaacctgctcctccagctagggccccgcccagaatatcctaggaagctggggttaatctttaaaccacctttgcaaatacctgcagccatttcaccagccagggttggcttctggtgctggctctattgctgacttgctgtggggcttcaagcagccccttccccttctggcctcagtttaccaaccataagcgatttacctttgttgagcacaacctcagccaccctcactcctgtcagttctaaccttcccagaagttgtctgtggacatgtttactcccgtttcatgggcgaggggacctgggctggggaaggtgacgggctcgtagaaggtacggcagctgggcaaccagtctaggtttgaacccagatcagtccagtttaaggccttgctcattcctggtctcccagatactgtactgtaccctgaggccctgcctcccgtggtctcgagtttccctccctgctcctctcaggagaagtccaggcttctaccgtttgacccggagtgggctttactttcccatctgtgaaatgggaaaactttcagagaaggaaaacagaggcagatggtggtattcaaagctggattcaggcccaccttcccctgtgcagtaatcccaggaggacctgtgaaaagccaagggtgggactagcacacgtgctcagttgcgtttgactctttgggatcccatggactgaaaccctgccaccaggctcctctgttcatggaattttccaggcaagaatactggagtgggttgccattcccttctccaggggatcttccagagccagggattgaacccgtgcctcctgccatggcaggcaggttcttta

SEQ ID NO: 34741 - DNA, 1556 bp, Bovine  19866880399646
  misc_feature (1)..(1): n is a, c, g, or t
ncccctcccctccgcccgcccccgccgccggccctgaggtttcctgagcccttggctacccttcccccggtgtctccgcacagccctgttcacagagacgccccacgacatgacggcgcggacgggcgaggacgtggagatggcctgctccttccgcggcagcggctccccctcctactcgctggagatccagtggtggtacgtgcggagccacagggactggacggacaagcaggcgtgggcctcgaaccaggtaccgcccgggagagccttatccgagtggggctgggaggatcctggcccccccactccccgggagggggtatgtctctgcccctcatcgtctctgaggggcacgggctcgggctccagctgtgctcgtcctctgcagcccccagcagtctccctcccttcctggaatggaagcttggtgggggggtcggagtagggagcggagcgaggctatgtacttgggatgcgcgcagctggtagggccctgcagggagcagagtcccgcccttcaggtacaggtggggaaactgaggccagagggacggaagctggctccaggttactgggcaaggcgcgtctcctgactcaccttctccaagccctgggggcacttgctttgtagtgaaagtgaaagttgctcagtcctgtctgactctttgcaacaccatggactatggggtccatggaacactccaggccaaggcctggtgtgctacgattcatggggtcgcaaagagtcggacacgactgagcgactgatctgatctgaacctttcccttcttcaggggatctttccaacccagggatcaaacccaggtcccccgcgttgcaggcggattcttgcaagccctctaaatacagggcagtctttgcccagttcggtccccccaccccacacacacacacacgtgcacgcatgcccttccacatacctgcggacacaggaggcagcccagtcacggcacacgtgcacactcacacacacacacacacacacaccgtggaggcatatgctactggtgtccccgcccacctgcctggccagcgctatcaccaccaccagccccactgccagtccctgcaacactgcctgtgggttttctctggaccacagagcctgccggcacggaaggcaggctgggaaagggctccatcaacggctgacagcagttggagggtaaataccccagctccctcgcccttcagtcgggataactgaagagcatccccaggtgctcagagggagaaagttcagttgcccacggtggtaactggcttgaggacatacccaaccttaacttcctttgctctttggtatcactcactcactcacctcctggtgtttcctggcatcacctcccaaataaatcatttgcacttgaatctttgtctcaaggtctgcttctgggggagcaaactaagacactctcattcttacgcttgtgtgtatataggtattatgcaaacacatatgtgtctgctcacctgttcacatatgaacacatacatgacacactcttatatgcacacacaggcatgctca

SEQ ID NO: 34742 - DNA, 1624 bp, Bovine  19866880438496
  misc_feature (1)..(1): n is a, c, g, or t
naccaaagggaaaaaaaaatttaggcacaaaatccataaatgtctgattttcgcatgtcatctgctgtgttctcaacttgagggacgagtcagtggaatcctttctaaagttctgtgacagatcatggcatttactgggttcctcctttgtatgataagccctgttgggtgctattagggtggcaagaaataataactccagttgatagcaaaaacactcaccttgctgtgtgataagtacccttggagtgttttgcacagaaaataccactggagttctgagaaaacacacatcatctctggcttggcagtgattagagaattgggcattggagatgcataagcttttgatagattagggattagtatgcatttcaagtgtatttttacagtgtctaccttggcaatggagattgccattcctcacgtgctgggagctgatgtggccatgtagtcagcccagacttacatggatatcaggtccatggctttatttatttttagagtcatgacaactgcccccatctaaataccctcttctttaatttaaaaactattgagtaatccaaaccaaaaaattttttttcaaatctgctttctctccacctatttgtgattcagaaaaatgaggtctcattacacttctgagtgagcttctcaggtggtgctagtggttaagaacccacttgctaatggagaagacatagagatgtgggttccatcttgaatcaggaagatcccctggaggagggcatggcaaccactccagtattcttgcctggagaatatcaccgacagaggagcctggagggctacggcccatgaggtcgcaaagagtccgacatgactgcagccacgtagcactcagcacatgttgtactgttgactcagggcgtcagtacagtaggttgtgtgctcctaggaaggggggttcgttttgttagttgcagagtggattattggtgctgatggggcagtgctacttggtctgaaatagggagtggtcgttagcactgttcttttctaaattactgcttagttttctcagaccctagaaagccaggaaaacttgcgtgaagttatcctgttggattttgtgaaaaattgctgtgggaactggaaaataaagagcaggtggagtttttttttttttttttaataaagaccagcagggattgttgaacttgagcaatctgagtctgtgactgtgacatagcatattattccagaaggtgtgtacaaggagtgcctcgtgtttgagcctccatgctgatgagcaggaatagggctgggaagggtttgcacctcctcaggactttcttctagttggactggaagggagttggttattgctccagtactttcctgcaagcactgtctaacaagactcctgtatctcaagctgttattttgctgggagctattctcatcttgatatttctagaatcaaaattatatggaaaagaatttacttcttttcctcattcatcatccaacttccctgataatctgtactgataaaccaaacactcattttttggagctgtttcaatatgctctgaaataaatcagatcagagaaaagtaccaaaatggcggtctaggaaaagcatctcttaatgtaa

SEQ ID NO: 34743 - DNA, 907 bp, Bovine  19866880592771
  misc_feature (1)..(1): n is a, c, g, or t
nttattaaatgtgtatggatagatttgtgtggcccactcccatgtaaaatcgagaagatttgtgggaattaagtggaagctggtagtgagggaaaagagaagtcaaagagcgcatatttctaggttcttgacatgagtatatggatgactgatggccctgcttactgtgatggagattggggtaaagaattggtagaggaaatcaggaattttgttttggctatattaagttcgagatggctgatagatattccaaggtatgatgccagataggcagatggatgaaatagttggaagctcagtaggaaattaatttctggagacatgaatttggaattatccccctatacatatttatttcctgttataacaatcatgggtccccaagaccacttccaggttggtgactttctaggaggactcaccggacttagtgtgtagttgtgttcatggctgtgagttattacagtgaaaggatataaagcaaaatgagcagagggaaaagaggcaagggctgcagtccagaggaggccaggcataagctcccggggtccactcgtggtgggtcccacgcgacacactcagttcttcccactttgagttgtgatggcacacgccaagtgtcaactacctgggggcccattagagatttagtacctaggggttttgttggggttggtcacaggtattcttggccaaaattctagactcgcagaagaaaagcaggtgttcagcataaaaccatactgtttgtacaaacagtttaagcacagaaaaccaccctcttccattaggacgtgatggggccatgtctgaaatccaagttcccagatgccagtcaggggccagccctgtgagcaggcctttgtcagggcagcagtctcaggcctgccgtgttaactctttt

SEQ ID NO: 34744 - DNA, 2347 bp, Bovine  19866880675659
  misc_feature (1)..(1): n is a, c, g, or t
nctccccagatttgtaattcccatggctgtctccttcaatatgtgctggtggccttgggaggcaccctgcccccagcctgccagccctgctgcatgggggctacctggcagggggcctgggcaagtccccaccctctctgtgcctcagtttcttcatctgaagaagaggagggtgacagtggctgcttcccaggatgtgctagggattctgtgagatatttcattaaagaaacaactctgtaaaaaggaatgaaatctgataatatgctacaatatggacgaacctcaaaaacattatgctgagtgaaaaaaagcatgtcccccaaaaccacatattctattattccatttatgtgaaatatccagaataggcaaatccgtagagacagaaggcagattggtggttgccagggcctgggaggagggggagtgactgcttagtgggaggatgaagatgtcgtgggactaaataggcatggtggtcgcacaacttggtgactggactcaatgcccttgacttgtacactttaaaatggttaattttatgttatgtgaacttcacttcaattaccactaaataaataaataaaaaggaaacgtttttataagcacatacttgagtcagacactcactttataaaaacactaatggatttaatccttacaacaaggacatagatgtaaacaacagctgattccctttgctgtatagcagaaactaaccacattagcaactacaagaaaaattaattttaaaagatccatacatcagcctctgcagtggttgttattattatccccattttacagatggggaaaccgaggcacattgagtgttagcggtttgaattgttattgggtgggcaatcagctggggctgggcagggaccccacttaggtcaatgtgctagtgtgtccctaaaactcagcagtgagtggatgttgaggccctactgtgtccagaacaccgaaacagactcttcacctgcacagatcatgtaatcctcaaaaataagcctttaaccaatgacacacgtgggaaccgaagcccagagaagtgaagcaacttacacagcatcacacagcaagaaagagtggagccacatcctagggaggggggctgtgtgacaataatacaggctctggtgtttcctggaacttgggttcacgtcctcgccctaccatttactggatctgtgccctgtgatacacagtcctctgtccccgagtgttagattttttatctgtgaaaaaccataagattgttgtgaggattatggatcatgccctgcactgggcttggacttgtgaaaagggctctgttgtatggatgaaaaggcatctacatctgtaaatcctggacttcacctgccccccagtccctctttttcctctgggtcctctgccccttttgccaacacatcagccctccagtgcgcagagcatggtctgaagagcctgaggctgcagagatgaaggcagcctccgattggatgggatggaggtccttgacaaggggttcgcctcgtgccggagagtaaacagctccccaccaagggcaacatttctttgatgtctcctgtttcatccaaaatgcatgagttctgtattccatgccataatatattcatgtttgttttaatacaaaagtaatgttcttttcccatttgtcggggcagcggagggatgggaaggaaactgatgcctcagaaagtcacttccaaagcctcagtacagccagaagggagccctccattcatttctttggtcattcattctacgagcacgcattcaggcctcctcgttactgaaatttatgtcagtcctccccacatgaaagacacagggaaccttctggcaaatcagacaggatgctgtgccatataggtgagtgggatttcaggtctatgggccagagcgagcaagatctcggaggtgccaactaaagatgaatcgtgggactgggccagtggccaagacagccagagctggtgacagtggtggaggtagctgcccaccgatgggcaacgtcagctggacctgcatcccaagcccttctggtcaagaaggaagtctcttcctgatgccgctcgaatttaacacccatctctcacccatctcccctgttaatgagaggaaatggggacggaggctcatagccttcagcaggcaaccttctctggctagaatttacgaacgctgtttggttttcatagtgtttatttttcctgttaccctctctttatggcaagtgatgctgattttccatttatggcagtaataaaagtctccttttaagtggaatttatttaagtaaaaaagagaaagatgctttgaaaataaatat

SEQ ID NO: 34745 - DNA, 1108 bp, Bovine  19866880727657
  misc_feature (1)..(1): n is a, c, g, or t
natgcattggagaaggcagtggcaacccactcccattgttcttgcctggagaatcccaagggacgggagagcctggtgggctgccgtctatggggtcgcacagagtcagacacgactgaagcgacttagcagcagcagcagcagcattttgaatgtactgtatattttatacaggctgaggacaaacatgggtttctgaaacaggaggtggtagagttgctaaaagttcacttcagtagccttgggacacagatctgtagcaagcacagaagtcagttaaggtgggaaaatttccccatcacatggtaggagtgtggtaccctggcaggagtgagagcttggggcttagattgactgcttgaatcctgtctccactatttcccagctccttgaccttgagcagcttgttatgcaagccaccccccaagctttggtttcctcacttgaagaaacggggaatggtcttacctacctggcagggttgtgtgacgattgaaaaaataatgaaatgtcaagttctgggtatataataagcacacagttaatggtcactgttctgtagcttggataatcacttggtgagggatctggaggaggaattctttatggtttctgtaaaccccgagattctctgacctcagtgcctccttgagaagctcttggtaaggtttatatccaacttggcctattgaggactgtcctggcttacttaggcagctttgtttaaaggagggggccaaattcccttgtgtataggtttctcagccagtgtctctctgtttttttgatatgtttactggaattctcaagtttctaagtaatttcagtctgagacgagagagtaggattgatgtcaggctgctttaacacaggtgttataaacaagattaagaggttgttgaaaagatatcagtggagctccagggctagcttcctggagtcattctaaattgacagctaatgggtagtttgccttgatagctctctctgagttgattgtaaccagctagagattcacccacagaggaaacctttttatgaaaattcactttactttcctttataaaaaaaataaagctattataacttgtaatgatgtctttacatg

SEQ ID NO: 34746 - DNA, 1717 bp, Bovine  19866880791274
  misc_feature (1)..(1): n is a, c, g, or t
nctccctttcggtgctgttatgaagaccaagcataaagtatgtcagtaccttgctcagtacttagctgctgctgttactagattttcctagcttcctttgaaattcctgtgtaactgttaagtaagccaggcccccctgttcctaagagcatcctccttcccaaataacccagaaggagctgtcctagcagaccagagcattggcaccattcggtgctttgtctgaggctaagctggaataagctttggtttttgcttgttgttgttttttctttttttttgaaggggtattgttttgttttctgagagagaccagagtaagctgttgagcattctggagcagcttgcatggagctgttaggaaacttggcctgcttcccacaagattatctattatcagcactgaagagagtatgaaattgattagcactgatggagagaaacgactgcagccattctccccagcattcccagtgcttccgtgtgccacaggtgtggggccctgccattccctgacaaacatctgtctccttgatgccaaggccgttcagctgggccctggcaaacattccaaggctgtcagtgcccagcagccttggtgttgctcagggagtcggggcgggctggggggcgaggggtgcgtttgtgagcagcgcgctccgccagcactcaggctcctcctgccaggtgaagctgcctcccaggcgtaaagggacttggaaccaacagcctctctcctgtctctccttcatgcagtctcctcccgcaagtcacagacagtttgttgcctcactccaccctactccctttaaacttgaatgttctatacctactaggaattcagcaaatatttgttgaccagaattgaatccttgtttttcttgataacgttgactatcagatctgtaaggaataaatatctcatatattgtgccaggcctgcaacaaaaacaccttaaataaattgaccaagagaagggggatcaggtattgacagtctgagtgtctcggagccaccgctgtccctgcagacttcagactgccaagggcaccgtgcagacgtccacgggtttacagttgaccaggacgcaccaaaaagaatcccgtcatgtggcacgtgtttctcaggcacctgctctgtgcaggcactatcagctcgacaccggcttggggtgagcgcaggttcaagtgtcgagagaaaaaggggcccagggagcactgctactgctgccgagggctggacgaatccagggcgcgggggagccatctgcacctcgcgtcaccctgaacagtcctgcagatgaggcagaagccgagctgcacctcacagggggcatacagggcatttccaggagcaggagcgaagcagcagcagtgggaggccaagttaagtttgggggccactgttaagttatattccaggaacagaaggtgtgatgggggagcatggactttagagccaggcagcttcgggttctccgactgcagacacacagcctcatttctccagctttcttttcttcctttctggtgttctgttttttgaggtgcacatctcaacctgtgggtgtgtgaggaattacacatttcagaattcagtgacatagatatcacacaggtgaaagatgctttcacaggtcctggcatggagagttgcgagagaacctttccttttttctctgtgaggactgtttctaccaccaggcctccgcataca

SEQ ID NO: 34747 - DNA, 1313 bp, Bovine  19866880801757
  misc_feature (1)..(1): n is a, c, g, or t
ngaggggacgcccaagggcacaaataatggcagatgtggatcactgagggccccacatgggactgacttaccaccagaagagggtcaagcagagccttgagctgccggggtgtaacaggcagggtccttgaaggagacagaggcactggagctgtaatttcaggagactataataaaggagctattgtgtttagggaattacgatagcctcgggaatccaacaaaggatgatgcagctcctctgggctagacaatggagcctttggcacccctagtctgaagggcaagagccagatatggttactggaatccagggagagtagctgtggctccaagaggcttctgcctggcaggaactggggcctttggtggagggagcttacagggagggacctgggaaagaaacaatctacctgtctctactccctccttctgattgcttgctcttgcttcccattggccagaccctactggaagcaaaagggaagggaccttgctgatgtcatcggcttccatggaatatgattctctctctcgtatctccgctccactctgccctttagggcttataagtagataaatctgcagagaagaaagggaaagtttcaaggtatcactcactctgccccatcacatgtcttttttttctttctcctgtagatctcagctcaaatgtcacctcctccaggaagccttccctatgttcctacccttctctgtgctcccataacccttagactgacgctgccacagttgtgctggcactgtctgttgaaatgacttgttttccactctccctatactgggcacgcctcaagggcaaggcatgtgttttaatttctctctgtggctgcagctgtgcctaacacagggtcaggacagtagaatattcactcctgttcaccaagcggataaatggatgcatagtcccctccagttctgctccacttctggacccctgcccctcgggggagaaatgctttctgagagcccatgtggaataactcaacatcaccaatggcaggtggggctgggggtgggacacccaacccttgaatccagctgtaccttagcacagcctctcctgcttgtgatgccaaggccctgtcagaggcatgacaaacagcttggctgatggcttataatgtcagagatgatggaaacagggaggcaacggctgaaagaatgggttggggacgcttgtcataactttatttgtgggaggtgagttcctgtcggctgggtgatggatggtgccagggcaggcacaatacagacccttccactgcatctcccccttctctctagaccaa

SEQ ID NO: 34748 - DNA, 2309 bp, Bovine  19866880886088
  misc_feature (1)..(1): n is a, c, g, or t
ntgactcacctgtggtctcactgctgacagtgggcagaggtgggagccaaactcctgccagtctgacctctgagtctttgtactcggtgtaaggctttaattaatttttggcgagtgtggcttgagacagcttcttgttctggggccttgttctgaggccagctctgtctcaccccccatcccccaccagtgcacacgcaccagctgtgaacacctaggccacctttcagtgtgtcacccagaaggaacatgaccacccccgaggagggcagttgaattgacgaatgtgctgcttttggggacatttctaatcataagagtcctaagaacagctactgtttcttgagcgtgccctgtgaggagtgttctgcccattttgctgatggtgacactgaggctcagaaagaggctgggcttgtcacctggcctgggaggtcagagctgacattggtacccagacaggcagatcctgcatccctgtgagatgggaatgggggtcctcccctgaggcaacctgcacacctgtccacacaggtacctggaacggcaccaccagggtggccatcaaaaccctgaagcctggtacgatgtctccggaggccttcctgcaggaggcccaggttatgaagaaactgaggcatgaaaaactcgtgcagctgtacgccgtggtgtccgaagagcccatctacattgtcacggagtacatgagcaagggtgagggaagctgggagggccctggtgggggtccttgcaacagggcaggtgggacgcgcttcacttcccaccacatctagaatgagtgtgtgcctttattttttaaaatttttatttatttatttataacatcaaaaacattttgtgttggggatgagcaatgttgtgacagtttcaggtgaaaggcaaagagattcagccatacgtatgcatgtatcccttctgccccgggcctccctcccttgagctctcccattcacctggttccaggctggcacataacattgagcagagtaccctgttctatccaataggtctttgtcggttatccatctaaaatatagcagtgtgtacatgtccttcccaaagtccctaactgtccctctcccccagcaaccataagttcgttttctaggtctgtgagttagagtgcatgcctttaaaggtgaaatgcatgaaaagaatcaacttcccacatccatggaacattaaactgcaggttgcctttctcggttcattttgtttttagtgatgtcccacaatgcatcagtgtccccctgtctgctgcttttgtaaagctgtttgccatttctagggctggaaggaaaattccctgaatcctccaagctgagccacacctgggtcaagttcctggcttgacttttacttagttttgaaaataattatttttcaaaattccacttttggaggtataacttacatatgataaaatacaccctggtggttcagtgggtaagactttgccttccaatgcagaacatgtaggttcgatcccttgtcagggagctaaaatcccacatgcctcatggccaaaaaactaaaacataaaacagaagcaatattgtaataaattcaataaagattttaaaaatagtccacgttaaaaaaaacctttggaaaaaaaacacccatttaaaatgtacagttcagtgagttttaatgaatggatatgctgtgtatctcttagcatagttgagataaatatctccatcaccccagaaaacacctttgtattcctttgcagatagtatgctacagtcccaaacccatacagccgctgatgtgctttctgtcttcatagatttctttcttctagaacttcatatatgaaatcttttacatccacgggttttctttcttgtgtattatcggtagtttcttcctttttgattgcttagtagtattccattatagtatagctgtgccattatagtatggctgtacaacagttctgttctcctagaggtgaacgtttggttgtttcccatcctgcttgccttttgagtgacaaacacagactttattcagagataggtttacataaaatctgctgtatggttaaagcaagactggcttgccccagtggacaagatctgggaatcactgcttcctggctcagggaggacagagtgggagctagagctgctttctctctgcccagggagtttgctggactttctcaagggggagacaggcaagtacctgcggctgcctcagttggtggacatggctgcacagggggagtcagcccctcccacctcctacatctggccttgagctctcccgcccacctg

SEQ ID NO: 34749 - DNA, 1158 bp, Bovine  19866880892056
  misc_feature (1)..(1): n is a, c, g, or t
ncctcccagaattccacccaacccacctgctattgcatgtacagctctcctctgtcacacttgtggtcctgggaggtgatatgggaaagttgggtgcccccctggactgggggctccatgagggcaggcttccactggctccctggcacccccttaaagtcagatgaatgaacgaatgactcggggagcaggtgcatgaggcactgtgggcccgtgttgggggcagtgcatacacacaggtatggacgcctggccttgagggtgtcctgtgtggccctgaagcctgtgtgcatgcagtgtgtgagtctacgcacacacacacacacacacacaccgtgggacacggtgaccctgcgtggatgccaggcctgaactccattgccctgtctctgtcttcagaacacgctgacggcctctgccaccgcctcaccactgtgtgccccacgtccaagccgcagactcaaggcttggccaaagatgcctgggagatcccccgggagtcgctgcggctggaggtcaagctgggccagggctgcttcggagaggtgtggatgggtaaggccatgcccccggctctcccgcccctgctttgtccccctttgaaaaccaggcagatgtctgtcccatgtggcttctccaggccccatgagtcccccaacctttgcttccatgatcttataacctctgtgaactgtgggtcctactctcaacgtggaactcctccagtggtgggcagtagcaagctagggccccagcaagccatgcctccagctgccgtggtacccgttttctgagaactgcttggggctgggcatcgtgattccccagtgacatgccctgtggtctgggccgggtggcttccctctgagccttgatcttcccacctgtaaaatggggctggcgggggccggggggtaataggaccccctgggggattgagagaatgcttgccctacacgtgtccccacgttaacttcagccgtgggaagagaaacctcagctcctagatggagctccgggaggtgcagtctagagggttcctggcctgttaacgatctcctgtttcactctggagaaatggccaaactgtccttgaaaacaaacgccgtgcagccctgacaaaacccaggcccccttctgctgactggtctctgcgga

SEQ ID NO: 34750 - DNA, 3715 bp, Bovine  19866880904327
  misc_feature (1)..(1): n is a, c, g, or t
nctaaaacgtggcccgtcctgtgctaggcatggtagaatagagaaacgaggacgacaaacaccctatgtacacagtccagggaggtaggtggttacgcaacgcccatctgtgggcacttcctgcatctgttaactctcacttggctacagctgcttgagggcagggctcattttgaggtcacttcttggcctcagagcccaggaaagggcctggcaggaaggaggaggcagtaactggtaaatgaatgggtggatggatggatggatggatgaaaagccaggacaatctctgccctttctcattttcctccaagcatctgatttagctggtaaccagctccatggaagttggttggaactggatggcaaatctggagctaaatgataacgaatcagcaaaaggttgttatttatagcacaagctttgggtaaccgataagacctactttcctatatcatcattccacatgacaattatgtttttttgcagatcgacattatttccttatcaagacaggaaagtcaggaaatttaactggaagagagtaatagttatttgctaaatcaccaaagaagctacgtgatatcaaaagatttaaaatgtaataagacacaaatatatatcaaaacagaaacagactcacagatgttgagaacaaactcatggttatcagtagggagagggaagaaaggaggggcaagacaatgataggagattatgagacacaaactactgtgtataaaaataagcaacaagagtatattgtacagcatggagaaatacagccattattttgcaataaccttaaatggaatataatctataaaaatgttgactcactatgctgcacaccagaaactaattttgtaactcaactatactctaattttaaaaatgtaataaaaagcactattaccaagcagtgagctctggtagcacagactgtagccagaatgccagggtcttaatcccactctgcattcattggctgtgtgactgaacaagtgacttaaccactctgtgcctcgcgtttcccatgggtataatgaggaaaacttgagactctgtcctgtgtgtttgttcctgagaattcaagaagttcatgcttagaatagcaccttttctgttaagtgaagtatgtgaagtgaaagtcgctcagtcatgtccgactctttgcgaccccatggactatccatggaattctccaggccagaatactggaatgggtagcctttcccttctccaggggatcttcccaacccagggatcaaatccaactcttgtgcattgcaggtagattcttgaccagctgagccacagggaagccccttttttctgttaacagcgtcacaaagttagcactcagagctacctattaataccaatggagtcccttggacagcaaggagatcaatccagtcaatcctataggaaaacaaccctgaatatttgttggaaggactgttactgaagttccaatactttggccacctgatgcaaagaaccaactcactggaaaagaccctgatgttgggaaagactgaaggcaaaaggagaaagggaaggcgaagatgagattgatagcatcactgactcaatggacatgaatttgagcaaactctgggagatagtgaaggacaggggagcctggtgatctgcagtccatggggtcacaaacagctggacacagcttagtgactgaacagcaacaaatggacggaacaggctatccccagggctggatgagctgtggaaccctggtggggagggcgcctcccaaccatggcccttaaatttgtcatccttaaggagtcaggacaagcggagtcaagtcccagacctgctatcatgaccttgagaagttcctgcccaagctgtcttgagtctctcccaggtcctttggttccagacttcagggcttctacatttggaacttatggctgttttagcctagtctgtggcgacatctagtggtaatatggggaaatgcctgacattcttaaattgtcttcaacctattatcaactgtatgaataatacagttaacaatattaactgtatgaacaatacctgttacattcttcaccagtaatggttagatactccctatgctagacactgaatgttacatgagttgtattagttaattttcaatgtaattctataagaagaaaattgttattacctttattttacagaagaggaaaggaagattcaggaagatgaagccaggaagttgcctaaggctacacagctgtaggtgacagaactggatttgaatccaggccatgtggacctgaagtttgcatttttaactcctctatgtcaggcctctgcatgaatgctgagaaaacatgaaaaatcatattcctgcctcatgcagaacataactataatctatagctgttttagggacaataaatgaagcttagactttcatgcttgaataagctgtaacatgtctccctaatattccttggagaatttaggaccgagggggcttttccttcccaggtgaccgagtcaatcccagaagataatgggatcctgacaaagactcgctgtaaagcctagattgcagaatcccagttgtcattcattcatccaaccctacaacaaacactgagttcctagtgtaagccaggcatcatgctaggctgtagggatacagtggtgaacaggaacaaaaaagcccctgacttcaccgagctcacagtctgatggtggaggagccagacatggagattacaagctgtcactgtgtgaaggagaagaatcataaaaaagcggacctaaggtccctttagtgtgagggagaccaaggaaggcttcctggaggtggtgacatctaactggattccggaggatgagaaaggattatgaatacaggtgacagtattataggaaaagagaatagaatttgagacagcccagaggtgagagatcaggactggtctagagaacacagacaggtcagtgtggctggatctgtgggggtgaaaagagatgaccatgacctggtcatggtcatatcacacaaggtcttaaaggagtttgggttttatcctaagacaatggagagcctttgaaaggctttaagcaaaatacctgtatctttaaaagatcacgctaggtgaagtgaatagattggagaaccagagaggttgtggggaggtggtggggaggccgggacagatgtctaggtggtgatggtggtttcatggagggtggaggcaatggtgatgcagggaagtgggctggtttgtttctttggaggcaaggctgttagaatttgctggttgcttaaaatgtgaagagataaagaaaggaattgaggatgattcttgggatttgtgcttgaaaatggatggacttactgaaatgggtaagactgagggaatagcaggcttaaggagactatattgagttcaaatataccccagagggtagagatttgttgttgttttgtctgtctagggttgtgctgcgtgattgccccagacacagggatgggaggaggtaatagatgcaagaagtgctgcggagagagaccatgttaggtctgcgtgtttaggatcatgccatcgactccctctgaagaaccaacatgaggagaaaaggaaatcagaagcctttcaatacttagttgcacacaagaatactcttttactttcctggagaagccagaggatccacatgtccataacacaggaa

SEQ ID NO: 34751 - DNA, 1087 bp, Bovine  19866880928546
  misc_feature (1)..(1): n is a, c, g, or t
nttctttaagtctcacgatgaccttatgaggaggtgctgcaattgaccccattttacagatgaggaaattggggcacaaagaaacgaaatagcttgtccaaggtcacagaatcagacctggaatcaaacctttccgggaatatagtctaagcctgtttttgtctttgatgagaaaattgcagatcagagaggtctcatgacttagccgaggtcacacagcactccaggtctcattgggggaaaccagactcaggctggctcttgggccccagtgctgcccaattcctcccctaaatgctaactctggaagacagggagtgtttaaaggacagctggctcctggcactcaaggccccagaggccgacatcatgcctgttagttcatagttatatttgggcccgggtgtgggcggggctggcaggtagccccttactgggcaggccccgtactgtcagcggtggacggcagagtggcagggagggagatggaagagtaaacagaaaccctcccgggcagccgcccaaccaggcagagaaagttctgtttcttctctccaccacccaagtccagaaggggggaccggccccgctcgccctccctatgactcagacctccctgcaaaatctgggccctgccctccccccgaaaaagagccagttggaggcaggccctcagcacactgagacctgagacactatcctcccaactggggaaacctcccctttgggaatgagagacaacgtggagacctgggcccaaatgctgactttgccacagacccctggaacattcttggaagagcccttctctctgagcctcggtttttccacctgtacaaggggtctcgggggaagcaggaagtgccaagggcgcttggtaaagtgtcagaggctgtagggaggtgagggatggttctggctcttcagagttgcctgtggagatacagaggccaagaggtggagggggctttggggagacagacacctggatctacaatggccagcaccctctgctagccaggagcaagcaggctctcagacaggccccacggccacttcagaggactaggtcccatttactcagagt

SEQ ID NO: 34752 - DNA, 1612 bp, Bovine  19866880955174
  misc_feature (1)..(1): n is a, c, g, or t
ntttgactggtggacctttaaattgtttttgcttttatttttcttttttccttgtaatgaattttgtagaaaatacactttttcttttttaagactagaccatgctcctgaaatgcttatgtaaagcctcttttgttcccagagaaaagaagatctcccggagcagtgccctgaaagtgctggaccacgccatgatcgggcccgagggcacagacaactgccacaagtttgttgacattcttggcttacggaccatcttccccctttttatgaagtctcccaggaagatcaagaaagtgggaaccactgagaaggagcatgaaggtagggttcgccggagaagtcagcctcacttaaaggtgttaggagaaatgggggagatgagagctgctttggcgaagtgctgtgcagctgaggagtcgactctcaggtggaagtgtgctacctttttcttttttatctgcatattttctgtgcctggaaaagcaacccagtgacccctggtcacagatggcctttgtcacgctgcttctggtggttctattccctgctggcctgttaataagccggtgcgtgaggggttttgttttcttcactataatttgtagcgaggtgtctctctgatggaagacccttttgaaaagagtaatgaggtagcaacacatgtcacctccggagtagcgctttcatgtatttctgtattaaagtatgattcagccaacatcaggaattgccgaaataaactatttacagcccaggtgcccctttttatgtttctcctccctgatggtgcgcactcccagcaaagtgccatgaatcgcggtgctggaagcagagtagttgctgctagaccagtcctgccctgctattgtctagaggcctgctgcttccctctccccaataaatgacggcagcgcaatctggagggccccggatttatgagcgctgacggttctgctggaggctaacaaacacttgcagaggaaatttacatggttgggtggttattttaaagtatggagaaagggctacaggggcgatgaggtggtggtgtgtgcaaaagaggaggacctgggctggctgactggctaatttagtcatcttatcagaagttaacatctgtccccatgatttgatttttcttttttatcagtgattagtagaatagccatagatgtctgcaaaatcttttttattccataccctcctagataaaagtttgagacttcctgtctgtctcttttcatcttgacttgacttagtctctaccaacttgaaatggctaaaaggaaggtggtgtggcatgtcttcagtggttaccaccagggataccttctttgacggaatcccctctccagacccagcaaaaagtctggcagggaagaactacaggctggaggtctgacaacacatagaaagttcaggtcacctcaaaccaggtactgactgaaaccccagctgttgaaacaccagctgtgagcatgttaaccccattgctggtcttttttctttcctcaatgggaatttatgcatgggagagagaatggatggtcttgaagatcttggaaataaaatttaggagactgtcaccattcattgaaatcctgccaca

SEQ ID NO: 34753 - DNA, 1849 bp, Bovine  19866880970985
  misc_feature (1)..(1): n is a, c, g, or t
nattacgcgtcacttccggcgcggcggaggaggcgggagactgagggaaaggctggaagaagaggtaagggaagactggcgcgagcaggagggagcccaacaacctcgagcccttagaggggaatcccagggagacgatgaggctgagagatcataacctgggaatggaacggggcctttctccctcacctggcaggccgcagccacactcttcctcctgctttctgacctaccaccacaaaaagcttttttttggttctgccaagccacgcacgtgcactttttctgcctccacaccttggagtttgctcttctttctccagaggtgacgccccccctccccacgtggtgggttcctactccacctccagaaccacccgtagtggctagttccgatgttgagtttgtgacagcaccgctgtaaaacacacctttgtgctgttagttgttgtgcgtgcctgcgtgcgtgctcactagtgtttgactctttgcaaccccttggactgccgtgccaggctcctctatccatgggattttccaagcaagaatactggagtgggtttgccgtttcctactccagggtatcttcctgctcttcggggaattaaaggctgccctcttgagggggtggggtgaggggtccatttgactgttgctcaaatttaagtaccatatgttaactttgtgggtggataaggaagtcagtgggttcgttaacctcctttaagaaacactatttgacactctgttttcagaaacagaaatactctgtacccttttcctatttcaaaaaagttataaatttcagttatcaaatcagcagagcagtttgttcttttaactgataatgaggttggtggtagggagttaggttattgtagacataacagaattttaaaatgtcccgatcacagtggaaccgaccagttgaagcagattccacttcggagaccctgttctattatagttgatgcctgtttttgctcttactgccctgttttttgcttagctgcttttacttttccagactggaatggtgataatcatagccaacataatgagctgctgctgtgagttagacacgttgttttcacacagtgactcatttaatcgtcgcaacaaagctatgagatggtattatgtattcccatttggcaaatgaagaaactgaggctgagaaagtttaggtgacctacctaagatcacatatctaagattacagggaagggactctacctatattttttaccctaacaccttatttgtagctgattgagtgaattaatatcaaaaagctgaaaagcctaaaatcacagtcaatatccagtcataattataacctagggcctttgagtccagttgctcagtcgtgtccgtctcttttcgaccccatagactatatagtccacggaattctccaggccagaatactggagtgggtagccgttcccttctccatgagatcttcccaacccagggatcgaacccaggtctcccgcattgcaggaggattctttatcagctgagccaccaggaaagcccaagaattctggggtgggtagcctgtcccttcttcagcagatagtcccaacccaggaatcaaaccagggtctcctgcattgcaggcggattctttaccagctgagcttccagggaagccccaaatctaggccatctttctgtattaagtaacagtgtcatatagtgagcacttttacaccaagttcctatgtattaagcatcttacatacattcttttatttaatcgttaacaacagtcctatggggaatgggtatcactatttgatatgtgagaaaacattaaacatggatgagtaatctgttcagt

SEQ ID NO: 34754 - DNA, 1161 bp, Bovine  19866880976868
  misc_feature (1)..(1): n is a, c, g, or t
ngccaagatttcagatgcatgaaactccttcagtcatgtgagaaggtaccgtcattatcttttacagaaggaaaaaaaaggcaacttagtgacattaagccacttgcccaaagtccttcaccctgtggtgaagtaggcttgcccaacactcaagtttgcacacttggaatacacaattcaatattactttcctaggtgataccatatgacctctgtgcaatggtggtcctgggtacaactccaaaggggcatttccaagatgcgtgtgtccctctcagcacctaagatggctcatgggcccagccttcttttacgatattcccttcccttccccactgcacgccaagaccaaactttccagaaggcaaaagcagaggggccttcagatatcagcagggcataggtggtacccagtgctggacacaaagcaaggatgctggcttttctaggcaattctcacttctgttaggaaaagtgagaaggacgaatgtcaaaggtcctggagaatcacctcgccatcacgtcaagcatactttccaactaaggcctcatgtcatgtgtcctagagaccccaccagccccaaagtaccaaaaaaaccctctcaggtctttgttcctgttattctctttattccattaacagattaattacagatttcaacttttcaatgcaacaagtgggtaagccagaatattcacagcatcttgctggggcaccatgccaaagaaaccaagtatctgggtgcctgctctgtgctggggatacagaaaaacaagcaaagtacaaccacaatttggactttcttctttttaaataaaggggtttttcattcctcttttcaagctgtgaattgtccttagcttcttttatcaatattcacttcagccttcagaacttccttcctttttctggaactaatgtgctgttctgaaagaaaatggagacaaacacaaaattatcgatggttccaactcactgttacagctcttaacttggtgacaacagagaaaccaaggtcctttcccactatgagatcccatttgtaagggaataatcattcctctattagtcctatttatttatgtcccacctcatttcagaaaaagaaagacagctcaaactaaagctgagacaacttaaataaacaataaacacacctg

SEQ ID NO: 34755 - DNA, 1094 bp, Bovine  19866880982830
  misc_feature (1)..(1): n is a, c, g, or t
natgagtatggtgttggtatgtcccgtgtatcaaaatctgtgtctggctttgtgctgccattggcctgggtgtgtgtttgtgtgtgtgtgccagtcacttggtaaatatttattgggcactgactacctgccaggcacggtgccaggctccagaaatcaggcaggcgcagtcccagccacactgtcttcagggaagacaggcctgaaatgtcttcaggcaaaagacagacaaaaaaagacagacaaaaatgtagccagcaaggagaaggaaggggcgccggctgagtcccagggtccagggaggcttgatgagctgagttctgaaggaagagaaaggaactgttttctaggccaagggactggcctgtgtaaatgtcagaaggtaggaaggaatgcgaggctgggaggcagccagggttgggagggacaggggaaccaggtccaacagatgagatggcccagagggtgagcagagtgagctgcacagaatcttgaaggccatggagaaatctgagccttctctcaggctgcaggaacctagggtgtgctgctgctcacagatgtccgctaactgtgcgtccatgtacttaagaactatcacaggaaagatgctctctgcacatggaaatgggtctgtgtttgtctgggaatctcctaaccagagccccagctggtgcaggaatcgccagggattggggtgggggtgggcattgcacgatcatgctgagtacatttattttatttaactaattagcatctttgcatgcccctcacgtggggcccagcagccttgaattctaatcctctaagtcaattagattattttctcctttgtgttagatgcttcttaaaccccaagcaaaatcatcagtgagagagttgccatgaacagggtatattaatgtacacagaggtctccacctggccaggcttaactgatgggtgtttggacaagaaacaagatgttacacatgggcgtgccattggcagaggatgagggtaaggggccagggtcggtgggccagcagccaccgtgagccagaaatgatttacattttaccagctcagaaagggcctgagggtagatagcacaa

SEQ ID NO: 34756 - DNA, 2156 bp, Bovine  19866881048140
  misc_feature (1)..(1): n is a, c, g, or t
nacatttgagatggatttttgacatgcctctgagatcctactagaaaggatcctatagaggcaattcagattttctccccacatctcagatgatctgagtggcacagtggggtccatgaatgaggttctgggagccccaggctctattctccaactacctagaaggatgagggggctgcccccccacatctcggtacaacacgtgatatctggagggggttggggggagggcctctgccagaggactagaattgggtctccccaaagaatcctggattttggtgtctgccaatctgatgttatccgaggctcatgggttctctcatctgcataacagggtgacatcctgagctcacagagagcagaggacacatgtaaagttacctcctatgctataaaaggtctaccacacacaggctgtccaaaacagcactaagcttcatttcctcagctttttgctctgaaactcaccagggcataagacagctatgtaggtgcccatctttcctcacctgaaagcaactgtggcaaagaccgtgtcgcacatggagtcaccagtatcccccctcatggtatccatccaatgcctacactgtgcctgacaccatgctagacgtccatgtggattaggctgattactcttcaccatacaccctttgagcctccttttttctcacctgccaagttcctacttcatagaactctgggaattttaaaaaatgacatgtgtgtaaagagatgggtactgcacttggcacagaacaaacgaactgtaagtatcacttatcatcatcttcattttacagatcaggaaactgagaaacagagaagttaagctgccggggctcagtaaatgacaaagtcgggcttagattgaaggcagttggcctctggggccaacaggctttcaagcacccaacccagtgcctggtacatgacaggttgagctcaatcaatggcagccagatcctgagcaggatctagaaccaaggagacctgcatgagaagaggagcctgagaggctaggtgtaggtggagtggcctcttaacttctctgtaatggcagtgactatatccactccccaggacagtgctgagcattgagtacaaggatgtacgaaaggtcctagcacactaactggcacagaataaagcctctgtaagggccaactgtcctccttttcgtttgacagatgagaaaacagaggcttagaagaaacttgcccgatatcactcagctagtaaaagtggctgagccagggctcgatctgggcaatcttacttcaaatccctagccagctcctggcacacaacaggccagggcttgtaccctccacctggcgctcaacggggccgagagaataatagtcactagtgtcagaaaaagccggagggggaaaacgactggatgaactgagaatcctgagccccggtcggtggaactttagacaagcaccttaaaccttccgaggcctcggtttccttctccgagaaatgaggataacactgtttccaacctcagcaagcgcaatcgatcacaggcccgggcctggaaagccaaggctcagcaaagcagctacaggagccgcgggagtgggtgcggacgagggctacccggggtaggaccggagggggacggaggggatgtttacctttgcggagctcgcgatgccacaccgacacgatggggcccgcgtgcttgcggtggtggatgagccacagggagagggtctgcacgctctgctgagagttgctcagctccgagagcttcttctccagcgccgactcggagaaggaggacatggtggcggcggtgagggccggcagggagcggcctaggccgcccagtgcggcgggaagagtgacggcacgaggccggggcctcactccacccgcctgcgggactctttacggactgacagacggccggggggcccggcgggggaggggatgggtctccgcagtaacagccacccgcaccgccgccacaagatggccaccgacctctcaccccgccgcgagcgcagggtcaaagggcaagcgcagaagtgttgggacaccgtggggcgagagtcagagtgtcgaaaacaccctagtgttgaacgcctctttgaaactcgctcttgagtagtccgagagcagcagaccgggaaaaa

SEQ ID NO: 34757 - DNA, 2128 bp, Bovine  19866881111285
  misc_feature (1)..(1): n is a, c, g, or t
nacacacacacacacacacacacacactgggtcacgtgaccccacagactgtagcccgtcaggctcctctgtccatggaattctctaggcaagaatactagagtgggtagccattctcttctccagggatcttcccaacccaaggacataacctgggtctcctgcattttaggcagactcttgactgtttgagccaccagggaagcctcatgttatcaagaagaggcacaaaaggaagggaacttaaaccaatgaaagtagtttgggagcacatccaaaggaggtgaatttttttttccttaagagcattattgaagtataattgacatgcagtaaactgcacatgtttaaggggtgcagtctgatagattttgacacatggatgcacacatgaaaccatccacatagtcaagataatccatcaccccaaacgtttccctcccactccccacgtgctgcctttgggctgagaactgaaagacacatgagttactctgctgaaatagtcaaggaaaagcattcaggtggaaggaagagcatgtgcaaaggccctggggctggaatgagctatcagccatctctccttcttccagctgcctgctatacccctgccctggttgcaacttttagcacctcgttccttggtgtaggacagtttcagccaaccatgtattcactcaacaaaccctcagccctctcctgggtgcctggaacacacacatgcctcagatgctgtccctgtccaggagggacggacacggtgtctcaggggaagggggcggggtgcagttagggcttctgattatgaggcatttcttctgtgcttgaccttataccaaggaagccctttatgcgtgccatcacaattcccattttgtagatggagtaactaaggttctgaaaggtaacttacccaaagatatctctttgggcctcagttttcccatctgtagaatgagtggaagtgcgggctaaggggcccaggtagccctgtctgctcccagagtccttcacctcagggtcctctctagtctccaggaccatgggcagcaacaagagcaagcccaaggatgccagccagcggcgccgcagcctggagtctgctgagaacacccacggaggcggcggcggcggcggcggcggtgggggtgccttcccctcctcacagacccccagcaagccagcctcctctgatggccaccgcggccccaacacggccttcgcccctgcagccgctgagcccaagctgttcggaggcttcaactcctcggacacagtcacctccccgcagagggcggggcccctgtctggtcagtgtgcctgggagtgtgaatgccgggtgggcggtgtgcccccggagggcagcgatgcccgctttctgggctgctgtttctttctcttaatgatgggggaggagtctaggggttacttggtcttagggcctattgggagttttttggaggctttataaactggaaaatgtggtgcacacgccattgcctttagggctgaattctggtgcacagtataaagggccctagagataaagggctgcaggtggaaactgaggcccagagagccgggggcttcttggggaggcccgaggaccaggtctgaggctttccttttcgctctggttagccttgagatggatcaggactggaggcggtgagtggccaaggggacggggcaggttttaggagagagcgagctcgggtcttcagaggcccgaagctacgagatgcgcccctgcgccctctgctggtattgagcgggtacagcagccccgggcgagtgaggcttagtaagagatgtagatgtggttctggagaggtaagaccctcacacaaacacgggcatttctaccgggacaccttcagacggacacacacacacagtcggcagctcattcagagacacccatataggacacgtgcacatgttaggctgaagattccatcgtggacacagagacagagggacgcaggaatgggcaccctccaggcacagccacacacccaacgcagatgcacacaaatacaaatgcacatacgcagaaacgccttctactcccagatggagacagacacgtgcagtcacagcccttcagaagtgcacacatgctcag

SEQ ID NO: 34758 - DNA, 1232 bp, Bovine  19866881114905
  misc_feature (1)..(1): n is a, c, g, or t
ntggtcatcaggttccctgaagatgatgttccgtcaactgtcctgtccaagaacattttcacccccaaacaggaaattcaggtacatcccaaagggcttcttcgctaaacacagaggagaaatggacacatgagagagggcagcagagccccaggcactggctgtggtttagatgatacgttgtagcttggtctttgccaccctgtggatcaggcagggcaaatgtcagccccatcctggagcttaaaaaaacaggctcagattgcctgccggccagttcccagaaagcagataactagagacaaaatcagaacctatgtctgtttttcctaaacatgcaggaggttcattactcagatcactgcttgatgccacagcacagatgggtctggctttgctcctctgtgttcctgcatagaccagggccgatggagcccacaggtggccaactcagctggagcatagggctttcaccccctaggccagcccttcctctctccctgggattcaccttccttgcacacaaatattagaaatccctgcccagcccagtccatgggactgttgtgaggctcaaaatagttcccagataaggaaagaatagctttgaaaagtttctaaagcagtgtacaaaatgaacacaataattgttaaacagttggagccctggttaaggaaactgagtggatccactcagtgtactgttttggagtcctcagaaatgattatactgcagtaacagggaaactcacaatctgaaataatggtgaagtgttccaagcagactactgactcttactccacttagaaaaaagccaagggcccaaaaggtagagtagtagtagtatttttaaaattcttcctgatgttgctatagcatcatttaagaatgtggaatgcagttaaacactggaacgtataaccatgatgacaaagggtgctaactgattttgtagggtggggtaggcagcagcagctgccacgggccatattagaagtcccttcgtgacagtgacagcaaagaggagctgaggttaaaaatttgggaataggagtctcacatggagctgccttgtcatggagctgggttgactggacattggcaagcaagaaaatttcaaaatttaaaatcgttaatacagcagttagctaacttaagtcagcaaaatatgatgacaccaccctgggaactcagaaacattgtgaaatccagcgtcctgcctgggatgtgt

SEQ ID NO: 34759 - DNA, 1815 bp, Bovine  19866881275655
  misc_feature (1)..(1): n is a, c, g, or t
ncatggagctggggatagggcttcccaggcagagggaactcatgtgcaaaggccttgaggcagggagtgtgtgctgttctggagaaacaatgggaaagcctgtgagtctggagcacagaaaattaagacgagcagatgagaggtgaaacgaggggatgttatcagcagggctgggccatgtggggccacatgggccttgggaaagtttggcttccatcttcgcacaaggcgctgattggtgtcccctgtgtgaacagctccaacttggggaccagggaggtcagagctgaccaagtcacctgggagaagtaaatctgtgggctggactctaggtattctgtgggggcatagatcaggtgtcaagaggaggaggcactggaggctgggctttgagagtagagtaggagttcagtagcaggaaagcaggaaagggtgagagccaggggtaggggcagtgccatgcagaatggctggaggctgggagcaggaaggggtcagctggggagctggagactaaggtatggtaagggctcaggagtcagacaggcctgcattcaagttctgaccatgcctgcttgccgggtgtccttggctcattcatcttgtctttctgagacttagcttccttgtcttgaaaatgggaagagtcaatatcttcctatggagtgagggttcaaggagggctgcctggaaccatcaggtcctcgggggagtgggacctgccctgtgcggtgtgaacactgggcgtgtcaattgccctgatgagttgacctctccccagctgtcccatgaaggcttcgaggggatgagctcactaattctgaaggtgctggcctcagaaaggatgttggtggccaaggccatccatacactgggtgaccggagtcctgccttgcccttggtgtgtgaggaggctgagttggggagagctctgtgggtccagcttgtcccaacttttggaaagcttgccttcagtgatattaggccattttccacctgtgagtactgagacccggagggggaagacacttggtagggtctcccagttgccaagtgacagggctgaacctgggcttggggctctgggctcctagtccagggcagggcctcccgtgcctctgcaggcctaagagacccttcagaggtctccatcccctgccctgggccttttgaccagagcctcatttcctgccttagctgtgtggccacccagcctctatctctcttgggttcccccagccctttacttcccctccactgctcctccccacttatctccatggtaaaccactctggtctccactggagcccctagagggttgggggccacttcctttgggggcacctcaatttcctcatctatgaagtgggatggtatgagtcatggctcctggggtgtcccaaggggactgaaataaagcgtttagcacacattagctggatgaatggggcgggaacagctagatacatggtcaagtccatcgttttctggcagctgacacccccttcctgtgactcggtttctgatgctgtaaaatgggcatggggcttgcacttagtagggccaaaaggaggacgaggtgaggccataacctaggctctcacctggtggctggctctgcatcactatccctggggagggtgaccccagaggtacctcccctgtgttcaaggccccgttcccagctgtctgtccaaaggcagatcactcagcctctctgaacctcagcttgtgcacacctccctccttaggattaaatcaataaatgtctcccagcgcttaaactacggatatccagtaaaggttacgtcttt

SEQ ID NO: 34760 - DNA, 860 bp, Bovine  19866881275862
  misc_feature (1)..(1): n is a, c, g, or t
nagtgttagactcttcaatgagcttttctttatctgtgatactaactgcacacaccaaaagtgtgctgggtgcaatgtggtatgttattagcaaagtgaggaaaacgctgcattcactgccatcctgctaagttgtttggtgataacagacaaatttctcttctacatgttacacatctcctcttgtgacttataagccacactgttactgaactcctcccaccccagtggtgcaaagtcattcccctctatactcaagtaccctgctgggtccacataccaggtgcttcagtaagtctcagcaaacgacacagcttagaaaactcacattagacaatttggtttgtgggataccacctgctatttttcgctctgctcctgagtctccctgggatagattataatttcatatgatcacactctatttccataaatataaaaattaccaaaattgctgccattattacctgtcgacattttaaaaaggagaagaaaaaggaaatcaacatggcagtaaccacagagcacaaggaaaaggaggtggtggttttcatgtgagaaggagaaggaggtagttagctctgaaaggagggcaggctctaaactggaaatctgcagctccccagcaggtaaggaacttcagccctcccgggagcactaattctttcgggctcataaaataagccctgctgtggttctgattagcgtgagcctattgcagcagccaagtcaaagcatgaactccatagttctccacggagaggagatttctggattgtttatctcagagcagagagcaaaggcagcggaccacagttaaaggggaaagctaaatccagccacagttaaaaaatgcaaaa

SEQ ID NO: 34761 - DNA, 1378 bp, Bovine  19866881297771
  misc_feature (1)..(1): n is a, c, g, or t
ngcttgaaaaatatgacttagagctttacttcttttgtggtagaaattgtgtgctatggtgcttttcggttgtggaatttttgaacacttttggaatatttggtgtgtactcccttctacatattttccagctctaaaatcctgtgtttcttttttgtctttcttagcccaacaggggcacaaaacgtccccgggatgacgaagaggaagagctgaagatgcgtcggagacaagctggtactcgagagcgtggccgctatcgggaggaggagatgactgtggtggaagaagcagatgatgacaaaaaacggctgcttcaaattatcgacagagagggtgaggaggaagaggaagaggtaaggtggcagagatgggctgggggctgagatgctcagccttgatgcagtgtctgtagagtgtgatttgggattaaatgcttagtttctctgagcttcccagcttaatctgtaaaatggggttaagaatatttgtttcacagtgttggtatgaaggttaagtggagtttggaaggcattttgcaaagtgtgaagaacattacagatagagtttttaaattattctggattatatattataactgaggcccaagcactgaactgtggggctgttggtatggactgaggaggatcacggtggtttcctagcccatactgagggcacatagatggcactcatttttaagcacagtcaatagtctttgaaagaggaatagaattttatcaaacgagtggaagaagggcctttcaggcagttaaaacagccttaccaaagcaacaaagttgaagaaattacaggaggaggtaagggattgggtgtttatatgtgattgaaaaaatgctgtttagggaaagagctggccaagcctttctatctgctgttcctcaggtggcctccgggcctttgcactcactgctgcctctgaaccttctcccttctgtgccctcttgagagtaatcattctcttactctcttaccactttattttacatactgtcttcctatttgttattttactcatttgttgtcctctccccaatctcctctgaaaatggggacgggctgggttttgttcacagctgtatctctagcattccaagcaatgcctagctcttggtgtaagccctgaaccaatatttattgaatgaataaatgaatgaagctgaaaagaatagaggtaaaatatcagcgattaaaaatcaaatgaccttgcctttgtgtcttttgaaatcttgaagtgttaacttgtatattatttcaccctggcattttgttcaatatgaattatggaaatagattcttaagagccagctgttttttggttccctcaaagacatgatgctaagttggattttaaaaa

SEQ ID NO: 34762 - DNA, 816 bp, Bovine  19866881333959
  misc_feature (1)..(1): n is a, c, g, or t
ngttttccttttttctgctcccaactgcctgttcagaaatgaagacccttgtgtaaatttcatacaactgctgctttggttgggcttgcaggtaataaaagcagaaatccactaagtaggtgaccttcctggacaaaaacggctggcttctctgaataggccttttgcctctgcttctaaaagtcaggataaagtctatgcaggatgaattttttttttttttcctttggaaagtatgtattttaggatttttgaatccccttctagtggtttttcttcccatttctcttcactggaactacaagcttttgaaccactgtgcataggcatacctcattttgtgtgtgtgtgctttattgtgctttgcagatgttacatttttacaaattgaaaatgtgtggcaaccctgcattgtcagatgatagcattatttactaatacgatatttttaaaattaaggtatgcacattgttttttagacataatgctattgcacacttagtagattacaatatagtataacttttgtatgcacttggaaaccaaaaaattcatgtgattctcactttattgtgatattcactttattgcaatggtctggaaccaaacccacaatatctccaaggtacacctatgcctttataggacattttatttgaaaaatagtatttccttcccttcttatgtgtactttgccgtgtaaactgtgagttgaaatattgctgttaacttggctgtccctttatcatatgttcatttaagtagattcttctgcagtatttcccctcctcctcctcaagtctccccagtctttcc

SEQ ID NO: 34763 - DNA, 1597 bp, Bovine  19866881352478
  misc_feature (1)..(1): n is a, c, g, or t
ntttctcatagtctctgggaaaggggtgagactgcagttctgaagccacagacttgggagggaaggacgaaagaaatccccacgtggggattattacccccacttcgcagatgaaggaaatgaaattcaagggggtaaagttatttatccagacagtcccatctggtgaacaatgaagctgggctctaaagcagtggctcttggaactacctgggggcttagaacagcgccagcgccacagattctgacttcgtccttctggggtggggccaacatggatacatacttctaggtcccctccccaaccagagcaactctgatgtgtggttgagttcagaccgctgctcggaggatggcacgctctgtggccagccttgcagcgccacggaagcccttccacatgagccacgtgccccgttacaggctcagccccagagagacccccagtccacgcctgcaccttcccagctgcagacgggcagcctccccacgacccgcagggcagcagagtggccacctcatcactgatgatcacctcatcgtctgctctcagagcctctggtttctcactggaagggtgaggcccaccatccagcttccttggccgtgtcctgtgagcgctgcggggagaggtgtcggctaaaggtcagacggtacaaagaacaccaagcccggggataccaaaactagctttaatttgtccaaaagtcacattgagctccacaaagagtttccggaggagccccagggtggccccgctgctgagccggcctagaagttctccagcaaggccaggatgcgcttctgctcactctcccggaactccgggctccggccgtccccgatgttctccgcgtactctggggagacaaaggcagggtcagggggagtctggggagcgggggccatcgtggctgggtcatgtcgcacttctccctgaaccctggcgcctgggggtgtgtgcctccaggggcacccacagcggtggctgtgcccagactccttgggtcctgaccgcgaggtccatggtagaccaactccctggcccctgctcgcgttcctctccaggccgagccttcctccacttaacacacacagtgttaactatgggcaggcactgccccagagccggtggttctgagtatgaccccaaccaccagcagcaacgtcatgtaggaacttgttagaaatgctgatgtcgggagctccccagtggtccagtggtgaggactcggcactttcactgctgaagcaggtgtgcaggggagtatctgggagcgagcggcagggggcaagcagagctggggcttcagtggggagcagacctagtcccgctgagaggggagcaggcggggcgggcatggggcaggtgggcccctgtcggcacttccccagagatgagaagttacgagagagctgtaagcagaggaatgacatgatctgtctgttcaccagcgctcactctagctgccgcaaggaagacacagtgaaggggccaagggcagaaagaaggggatgtgatttgatggtggtctggcccaaggtcatggtggaggagagatgtcttcagatttcagatgtatcctgacagtgcctc

SEQ ID NO: 34764 - DNA, 1151 bp, Bovine  19866881367009
  misc_feature (1)..(1): n is a, c, g, or t
nagttcttattagtttttttttttttcccctaagaaagcaatttccttacactacatgcagtttggacctgggtttttgtgtgtttgtgtgtgtgtgtgtcttaatttccaatccctagtgcttcttgtttgtgtttttaaaattctggaagtggagaatcagaggcagagattaactaggttagtctttggtattctgacaggatgatctggacacagaccgaactggacaacacacttaagcctgcagtgcagagaatgctatgcaccaaattccaggcatatagacacagatggaaagaaagcatcatctaattaattccctggagccccagacacaagcaacatccaactcacccttgatgatgtgcctgacgattttgatggagcttccacgcatattcaggatctggtgaaccctctggcgaatctaataaggaaaagaaagagtggacagagaaagaaagagcatcgtttgtcctggtagacatcagaatacatcacgttggaagtattcagttcacccccatccctgagaaagaggccccacggagagtgaaggaattcaaggagtgtgtgatccacttccttctttgagagactctcccctaagccggtggcaggcaaggaggcagggatggatgggcccacccagggcagcccctcctacctggggcacgttggcattgcagatctctgccatgatgtagcagatgtgctggaggacaaagagcccagcatccaagcgccggaggtagaactcatcctcgatgtcattgtctatgatctctccacgccggaccatgtcctagaaaggaatgaacattggggaacaaaagtcagacggtgagtggaggaggaaagaataggtttctagtcctctcacgattcacaaaagaatagtaacgacaactacaacaacaaaagaaaaccactctgccttcatttgcctcctgctcgtctccttattctaaagcatcttacgttctcattgttaacggactagaggttcacagagtcaagactaaagtccattattttgtctatacaatgactcaaggccaaaatgatctcatccacacattcaacctgaaaaaaataagctgatggggacataaatctatatatctgcttctactcattctttactt

SEQ ID NO: 34765 - DNA, 859 bp, Bovine  19866881546390
  misc_feature (1)..(1): n is a, c, g, or t
nctgttggatcccacctcgtgttccctcctaatgcattcagagtgactcttcagtactgcgtgaggggtgtgctccccccttcccccgcaccccccagaggtgctcttcacagaccagaattcctctccgcagccaacctacggctgagctgcagcctctcgaggcggggagatgaggcccagaagcgctgacaagccctccccagcagcagtgatgcagagcgccagaataaactctgaagcggcttctcacggttgaaaggacaagactcaagctgttttctcacatcctctgcctcttaaggttacaacagaccagcctctgatccaattaaaatccctatagtttatgttttcgcaaagaaggacaaagcaaaaatgacctgtgcttgctggcaacataaccagccatgtatggctgtggttgataaatgaagagttaaaaaagattaaaaatttaagtcatgactgccacgaaattgtttattcatggtaaggtgttttgggcagttacagctgtacaacagtaaattgttaacaaccgtttcctgaagaaaaatttccattatagatcacagataagacaagaaacagagtgcagtgccactgggagatcaacgctccaacagattgagaatgtgttagatgcaagtcaagagggctgactcttccctgaaaccacgcccaggaaaaatggtactaggaggaagatgacatttaccctagttgctgcatctgattaaaattaggtaatttttaaaatttcaagtgcactttaaatttgatgtaaggcgtaattaaaaaatcagattaaaaaaatataattagggcagcaggggaagattagcagcaagagggg

SEQ ID NO: 34766 - DNA, 687 bp, Bovine  19866881590006
  misc_feature (1)..(1): n is a, c, g, or t
ntgggatgggaagctggtatgttggtgaaggagcctgttgaactatcccggtgggttttcctgtgtctgttctgtcatagagttgtcctctatgagaggaggtaaagctgaataccctgtgtgaacaggaaggaaattggagacgcagtgggtaaacctaaaggttgccctctcaggaatgtgcttaaaactcttcatgaagattagcaaagctattcttgtctctaaaatccattctcacagtctatcccaggtccccatttagacattaccctaatggaagcctgggaccggtactaggccaggctgatgactcgaggatccttcaagctttggagttctttaataagttatttgttgaatgaatggcctagcaaatactattttaacttggccgaggtcttgtatgacttaggttcatgggtatttgttctcgcctgaaagtccctcaaatctgtctcaatcagggttctggaatcatggaaattggcaaactagccagagatcagtttcaacttttagaaggtgccaggttgttgttacaagagtttattaaaggatctcaggcatcctgtctccctgcttataaaatggaactgttaattacttctcgtccccagagatggggtgaagatgaaaaggagcgctttaagctctgcagaaggaaagtgctatttcactgggaaa

SEQ ID NO: 34767 - DNA, 1348 bp, Bovine  19866881618553
  misc_feature (1)..(1): n is a, c, g, or t
nccccaaccccagacctcactcttcaaggcctggtggggcgggcggggtggtggtgcttttccagacagctgaaatgtctgtgggaaaacagtccatggggatgtgaccctgttagcatcgtaagcaaagagtaagcttccttctgtttctccttaagtaagttgcactgtcatgatgtccctgatgaaacttacacccccacttgcagccccagcacaacattctcctccagagaagccacgttagtccttccacatctatccttgtcgctgaggaatctctgttagacctcaagggccttactctcctagtttctatttcattattatttctatgtcttcaagggttatcagtgtaaaaatgctgacattcctcttctccccactcacccttcctcctgcactttttcagaggtgagcatttaaggctgaaggtccaaggatctgaaccgggcttgtgagcgccggtctgtgtcctggacaacagttcttccccgtcttccagtcggggtacccctccctctccctcttaacataaacagaatagctcagattccatgtctgaacagtaaacctgctgtctaaagtttgctttaatatgtatgcgttcaacgctgctgcctgtttctaagctcaatcaaagcctttattataagagcatttgaaaatgctggggaaggagagaagggagtggatgtatctgccccatctttctcactctctagaccgactcactctctccctctccctctccctaaccccgaagttgtcccttcatctagcatctcttttttcccctccagtctctccctttcttacacacacacagcaaagagaactctttcccaagacctctgggagggatctgttcaatatttataaactgctgcagcagccataataaccggaggtagctggcaccaccacagtttgctccaaataggattccactctggaaacaaagaacaagtcagggtcaggggtggagggtgagatgtgaggtgcacagctggtaccagctgccagggccagtgggagagcactcagggcttgtcaggtctgcttctggggccggctcgctgtgggcccctggccgctcacctgtccctctgggttgctgtacatttctgagagccctgtcagccctgacatttagtgaccgggcacgagggagcatggccccagccagtactccacatctcttctgattgctgaggccccttgaccccgggacatcccctccagagccttacctgttatgaggatattgacaccagatgccctgccagagctggactgccttggagacttttttccgcaaaggatggggaacaggcagggtagggta

SEQ ID NO: 34768 - DNA, 1047 bp, Bovine  19866881812985
  misc_feature (1)..(1): n is a, c, g, or t
ntcctgcttgaatatcctacttctggttatttattcgctccccactgctgcacatttccagccatatgctacaggaatacatcacctcatatttgcactcaaacatccaaagacactggcggttcagatctttaagaagcttagaagaaagtccatacagaatatagttttaaggttaaaaggcccaggaagccaaatgcatcttctttatatgctatgtgcttgagagaaggtgggtcatttcaacaaaaggacaggcaattagaagggtaaaggaaataaacaaaagactcaagagagtaaagccagcaaaaatcagctgaacactaaaggcctctgaataattacaatgcccctctctgtactttaaaataaattttttaaaacaattccaccaaggaagatttttcaatcaatccaaggtctggtacacactggacaaagcaagaggtctactgtgccccgggcctacacaagcctttaaagagaaggtgttttcaaaacacataccctggcgatcttaagtacaaacatagctttaagcacaaaaatctgtagaatctgtcactggagaattttttataacaacaaaacatgggaaataactacaatatcaataacaaagaaagaccaagtaagtcatattcccttagagtcaccattattcaattattgaaaactgtcatgaagattatgtcacaacataggaaacagcacgtttagttaaaaaaattaacagaacagaaacttacaagtgtggtaggcccaaaaagctgttaaaaatagaaaacaatcatgggggaaaagactccaaggaatccgcatccaaagatggatcgtgtttttagcttctaaaactaaaaatacaggagacaggaatcctaccattcatttctgtacaagccaagcacttaacacattaccgtatcagtgctttaacagttttgtatgtctatattctaagttatatttaagaggtatgtatcaaatttattaaaaatttttttcactgaaattttcaatctatccagatatgtttccaaacag

SEQ ID NO: 34769 - DNA, 810 bp, Bovine  19866880433705
  misc_feature (1)..(1): n is a, c, g, or t
ntccggaattgatctctgctcaacctacgcatcacccaccgcagtcaccagcacagattcagatgcagctgcagcacgaattgcaacagcaggcggccttctttcagcctcagtttctcaaccccgcctttttgccccattttcctatgaccccagaagctctgctacagtttcagcagcctcagtttctctttcccttctacatacctgggacggagttcagcttggggccggatctgggcttgccagtaggctctgccgcctttggcatgccgggcatgacgggaatggccgggtccctgcttgaagatctgaagcagcagattcaaagccaacatcacgttggccaaactcaactccagattctccagcagcaagcacaacagtatcaggccacacagccccatgtgccctctcaaaagccgcagccacagccgcaacagcaacaacaaccgcagcagcagcaggccagcaagttattgaaacaagagcaaaccaccgtggccagtgccgactgccccatcgtgaaggacgtaccctcttacaaggaggcagaagagatggccgagaagcaagacaagccaaagcaagaatgtgtaagtgaaggcgaagggctcaaggaaagcaaagaccttggaaagaagccgaagtcctcggaaccatccatcccgccaccccgcatcgcttcaggggcccgaggaaacgcagccaaagccttactggaaaacttcggttttgaactggtcattcagtacaacgagaacaggcagaaggtacagaagaagggcaagagtggggaaggcgaaagca

SEQ ID NO: 34770 - DNA, 1987 bp, Bovine  19866880445192
  misc_feature (1)..(1): n is a, c, g, or t
nattttggaatcccgtacacctccaccaaggttataagaaaaggttgtgtatgactacatccaaacacttttttctttaggtagaaagcttgtagcattgactcgatcttggagttatgatccccccaaaaattctaaaataggccaaaaatgtttttgacaattcccaaaaatagacattttgacttttcacttatgtctacacagaaagaaaatacaattgtcaacacagagaaaaccacaacgttaattctttaaaataaatgtaaaatctacatgcccctatttgattcaatctttcataactcatatgtcttttaacataaaagaatgtatacagtatatacattcttatataagaactgtatatggaataaataattctgaaaaataattaaataagtacatttaacagtataatggctaaaaaatggattaaatttcaacctgacataaaataaccagtttgattcaaatatgaaaaatatatgtacacatctgttttaggtaacataaatttagagctgcataggctgatcttttaaattatatatttaacccacaggttgcttttagtgccatgtcttgttaattcatagaaactagcagctttttacggagaaggcaatggcaccccattccagtactcttgcctggaaaatcccatggatggaggagcctggtgggctgcagtccatggggtcgctaagagttggacacgactaagtaacttcactttcacttttaactttcatgcattggagaaggaaatggcaacccactccagtgttcttgcctggagaatcccagggactggggagcctggtgggctgccatctatggggtcgcacagagtcggacatgactgaagcgacttagcagcagcagcggcagcaactttataagaagctgccttgccctgcaaagataggcaattcctttaagacagacctcttctgagtttaatgcttcatggactaaatattatggttcacatatgtcaaatagacatttcctagagttgcaaggtcaatttgacattctaattaaataatccgtaaaaaaaaaaaaaaaatcctaaagttccatgagctgaaactgatcaaagaatagaacgaaactttacctattacctgagccctgagaaatatactttgatgaaaaactgtgactcaaccaataagtcaggtctctgtcataactaattctccatgttgttaaataaaaaattgttcctcagaaattccatgatatagagtatttgcaggccgatctggcaatctaaaagtcatcaaagaaaggatgggaaaagaattttaagcaaacatttgaaacattttccttctaaaattgacaagattcaatgttgtctgaatgaaaggcctcaaatctgttagcaatgcatgatggagtgaaactcagttaatgcatttaaaattgtaaaattgtttttaaaaatgcctttcttattacattcaaatgcaattttcaagacagagtcataacatgactctgtgcacagtgctgtgtgtacaataaagcagcagaattaatcccttcccctgacgacctctagcaatgaaaacccattatagtaataatatttgtacttaggtcatgatgtttttgtgctgaatttgaatgtcatgaaattattatgtatagtggttgatggggacatgtatgcagataattacataaataatcctctttacataggtgcaaggtgactttctagatcaggcggaaactagttgcaacctaataaaactcataataatttttgttactgctaaggcatggctctaactctcccaaagggtgcttatacatattttccttttcacagggatccaatgagaggatttgagtagaagcccagtaccttcaaggctcctggctactgcattatatgtcagaacccatcctcaagatataagtatccattggcacatgaacatcttccatagggtcaaggatccttcag

SEQ ID NO: 34771 - DNA, 966 bp, Bovine  19866880474137
  misc_feature (1)..(1): n is a, c, g, or t
ngcatacatagcattattcaatgaactagatatttatttagacactttacttttcttaatggcttatatcaaaaaggccatatctattgagatttcaacttaattttaatgcatttttgaatgtctactctaaacaggtcatgggaagtagtaaaaataatgattaagaagataagcttaagatttagatgcttgagttcaaatcctcggttctttctctcatccactgagtgacattgggcaaaatatttaatctctcctcattgataacatgaaatgataatactacctaacttataatattgtcacctcacaaatattaattattatacttcataatattagctgttatagattttattataattacaatatgatgtgtcattcatgttaggcaaggaaaataaatgccaggtgaatgataaagtttgtctgccttgaaggaatgcacagaaatggtcctttattgaaatattttctattctaggtagaattttgctgttatatagttgctaagtcctgtccaactctttgcaaccccatggactgtagcccaccaagctcctctgtccgtgagtttctcagtctggaggaaattggagtgggttgctatttccttctccaaggggatcttcctgacccagggatcgaacctgtgtctcccgcattggcaggtggattctttaccactgagcccaccaggaagccctggtaggaaatgtcatgataaaaatattttatttcccttgagatttatcagaaaatagttaaaattcttgtttaatatgttaagtatgactatattaataattgagtaatatctgttggattttatccaaccttctcagaaagaattaactagggcaagattttttttagtataaaaatactatctgccttatgaaatgttcattttgattccatatattctgttcttttgtgagcaagtttctaggtacaacactt

SEQ ID NO: 34772 - DNA, 1146 bp, Bovine  19866880606879
  misc_feature (1)..(1): n is a, c, g, or t
ncaggattgtttagtggctgctaacacatactcctgttggagcaatctggtggctcaggtggcttcccttatgtcactgtcactccgcagagtttaataactggctcaaatattgtaaagccaactcagaatgaaaacacagagtaaatatgcagatacagtttttaatgtatcacaatgagcaacaaacatacttgatgaactatttccagaagaataagttcaaataccatctacaataaacatcatttcaactatgacaacaggtctgtgacaaaataaaaaaaaaaagttttcaaaaccatgttatttaccgtaatacggtgcatttgagacttcaaacattacagtaacaaaaactaatgagactactctctctatataaaacatcaataacatttttggtttagtttatttaaagttatagccataggggcttttattaaaacctcagggtgcatttcctatttaacccaggcgttgagagtacatgttgtgtagacaatgattgcgctgtgataatccctttgatatccaggaaaaaaacaattctcattctcaacctttggaggctgtcctttcatttctcaccctaacaacgtccatccagttaaagttttttttttttcttttttttttctcttttttttttttggctgctgtgcagttgtaaaagtttatgtcgacacactgtcggaatcatcatttgtaaaacagtcctttgttttgtgaaaagcgctctgttccatgctaacacactgttgcacatcgtgttaactgccaggacagatcgatctcacaatgctgctgcttaacattcatgaaaaaggcaaaagcaattttctgaagcctttggattcaggacattagctcactatagcggcaggattgcaccttaggaggccgtgttgtctcttacgaaacacaatcaaaaaagtgtcttcaggattaaaataaacgttaaaatactaaaacaaaacaaaacaaaaactccaaattaagaacattaaaaagttcacgtaaaatatctagaagaaagattgctgtgatcgttatcccaaacgaaaactgtacaagaagaaaatgtaaaatgaaatgtgacttgatttgatcattaaaacagtttgaagcatgattggagttaaa

SEQ ID NO: 34773 - DNA, 3207 bp, Bovine  19866880695668
  misc_feature (1)..(1): n is a, c, g, or t
ncgtataaaacatatctgatcagctgatattgttcatggcagaaaagctggtgctgtgtgcatcaacatggcgtaagtttgagcagtttctttgggctgattacttgaatgtttataatatcctgacagattttgttctttactgaagatttaaaacagaaaatagctactagatgtccatggtgaagatgctagggcagtgaaaaggtgagtgcagccatcagtggattggtaggtaaagagtaagcccatcccctgcgataagaagacagggcagtggttacaatcctctgcatgagaagcctccgggaaaaccttggactttagagtcaggaaacatggacttgatcctcagctctgttccttcccaggcacataaacttaaacaaatcatttgactctatcactctcaattctaacttttttttccccatccatttactcaacaaacatcaactggactcctattcacaccactagatactaaatagtgagctgaggggttacaagttagaaacacatgggcctcatcttcaaacaatgaaagcagctagtatgtgcaccaggcactatgtaaatgctttctactatccaatatttatcaggtttaatcctgggagcatttatcctgagtttgaaggatgataccaaaccttaaaatgattaaataaactcgagagagacaagaccttaacacaggtccatctgatgctgaatttgctgctcaagattttgtggagaatcttgaagaaatttttcttttaacattttacaagattttagtgagggtcaaacgaggaaagtgatgtgacataaagtgttcttaacctcaatgtactatgcaaatatatattgatattactgttaacatggaaataacaaagatttttgctccattactttgtcttgataatactcattcagatcatttggaccatcccaggtaaatggcacccacatacaaaaaaagaaaattctaactatattaacaaaaacaccatgggggattccctatcagtgtttctaagccagttgtatgtggctcctcagtgaatattaaacaaataaaacccaagtaagacattttcctacatatgaaaatttctggaaagcacacatctactgtttacattagacctggaacatcttattaattttttaatgtatcttagggttattcaccaattaagcaaaaataatggcattagtatagcacctgcagaccttataaatgtaaaattctttaaaactcaaccagaatattgatgccatataacactgaattttcatcgaacacacaatttttatatttttatcccaaaccagggctttaaaaccgaaacataaaaggttaaggaaaccaaatgaaaacaaatgaacacaaaaaagccctccatctctcagctttgccttctttacaccatttctaccatttgtattcttgtgtacctttaatagaacaatgtgattttatacacatttaatacaacacaaattgattattcaattggaaggaaggtttgtcagtttgtcaaaatttggggtctcatttttcgatttctcacatacagttagtaaatgcaattacctggagctctttatatgaagaacattcaatgaagggaatttttatttctacagtaacaacataactagttaaaaggaataaagtaaattgcatgatagttttttaaatgttatttgatatctactgacacaatataaagtttgattacttggatcttgatcaaagaaactcattaaagatttaaggatgaatggtaggtaagaaattcatttttttggcatacattttttaaaactaaagaaaaataatattttttaaaagagaacaaatgttgacccttggaaataaaatcgagaggaacttagtggttgctaaaactattaaaaaaaaaacaaacagctttttattaaagtcataattagttttatctccaaaaagtatctttttcaaaaacaatttttattgggatatgttatctaattagcaacatttaaacttgtatttcttccaaatattttcaaatgacccaaattttgtcatacaaagttaatagttatacatgctatggttctcaggtaagtactaaaagagttttccaccacgttaaaagcacacgttactaaggatggaatgcatttcagttgatattataatggaaatattgaattaaaattttaactctactgaaccagtataaacatgggagattggcctttatgtgtatcatgctttaaagtgtgagattaatggagtttttaaaatacacattggaaatttcttcactgaagaatgggatatttataaacattttccttgaattcagttcagttttaatttcctttattttttcaaaccagtcattggaaagtttgcccaaatttttctttatgttgatcatagcaccagatatgtttaaatacttaagtacttaccatctctcattcataataaagtacacaaattttgcatttgcttataggaaatgtaacattaaataacactaaaataatgttgttatactttttttggcaacaaaaagaaccttggaaactgaagattttgttttatatactactggttctcgatttcaaacataacaccagcataggaaggttagcagtgaagtaacgacaaccttttcaaagactgcatcattcagcttagtgacacacgcaggcttactttttctaacaaacttgcacagatatcatttataggtttattaaggacaaattggattatgatttgagctgacaataattaatgacatttacaaatgaggacatagaaactgttcagttcatctggggacatggggagtttctgtccaattaagagatttttctgtttaggtagcaaccaaaaaaaatcattttacaggaatggtactcccattctctaatagagtgattaagtataggcttttagaacttatttaccatcagcacaatcattaacgtgtaaatttattaaaatgattacaatggtcacttacttccaaaacaaacaaaacaatgaaataaatctgcaacagctttgaagtttgtgtggggttttatgacacagtaaagacttatatttaatttcactgtgtttccacaattaaagacacatatacacataatctttaacattgaaaattagctactaaatatgcatgtattggtttaactgtgtgt

SEQ ID NO: 34774 - DNA, 1209 bp, Bovine  19866880710291
  misc_feature (1)..(1): n is a, c, g, or t
naactgctactccctactacattcaagttatttttttctgtaaagaaatagaattttaaaaatcttacaaattgtatttgatgacataccaaacaaaagtatgaatattgaaaagtattccagtatctcaaatttgcatgtgactgtgggagggaggggcagttttcacaggggtctatggttttccagctgtagatactactttggtcaaagctttccacttaaaaccttgaaatcctatcttgaaggttcagacacccactttaggagtagaagtaattccatttctgtacttcatgtgcctcttgaggccagatctgccagtaaatgcttaattgggttggaagatagtggatagtaccagtttatcatacaggcaactgacacaaaactttttcacttatctgaggttgggctgtgtctgggttcagagatgaaaggtcagttctttatccactaagtcccctagacattccaaaatccccagtacattacaaatttgaacagtttaagctctcttaaataaagaatctcttctctgggtaaagtatacagtgtatatagatacagtggaaaagaaacatgtgaaaggtcgcagccatgaccttttaacatcaatagttttatttatagccaggctcttagtctatagggcttaatataaaagcaagaagaaagacaaaggtatctggttagctttataatagctatccagttatataaaatttggtctttttactcttgagctgagaataaaaaattataattaaagtgatggctgtttcaaagtaaagaataacatttctcaatcatttttaattggacacattccatttctctctttacgtggcctaaaggaatctacaaggttttaaagagatttatttcttcatttgtgtgattcatttttaaaagacaaaaaataacattattttatttttattgctacctgtctctttgtcacctatgtgatgtcttgctgtgttaaaagttacacatacaagagttgtagactacagtagctgaaaccctgtttcattgaactttagtaatttcagaaatttagtaaacatagatgcatgcatgtttttggtttccaagatagttctcaaggactttgaagaaataaatgtctaaggtacattgagaagttcagagaggtgggaaaatccacagtgggagcaaagtgtgaaacaaagctggagaaca

SEQ ID NO: 34775 - DNA, 2030 bp, Bovine  19866880728368
  misc_feature (1)..(1): n is a, c, g, or t
naattctaggcatgaagaacagaaagaaaaagacactggtgtggaaagtgtttggctggagaagaacactatacactgttcttggtggatgagttgtggggaaggggatgccggggagaatgtgagtgtgatgttgaatgaggttggagagataggcatgagctggtaaaccaagcaatttaggttttattctaggtgcaaagggaaggtcttggggtgatttaacatgggtagtgacataacctgattcatgagttacaaaaataagttagaaagagtgtgagaacgaaaacaatgagaccagataggaaactaatgtgaaaattcaaacaagaaacagcagtggcctgcaccagtggtgtcagtcaagatgaaaagatatgagtggattcagattacattttggagttacaaacaccaggattcatgtgagaatgagagtgtgaggtggtggagaaaaggggaaggttaaagggtgttgttggattttctatttttggatcaagcttagagaagctccaccacttggttttaagcacaatattctaagatgttttagacaccaaatagaaacattaaataatcaaggaaatttacaaattctaaaggtcctaagcgattcttctttcctttttatgagattaagatataagttaaatgagaacatctgcatcatttcatcaaaaatgaaaaattaaaggaaatcatagtcaccttcagatagtctgcaaatttaaagagcactgtgtgatgttaagaaagatgatatattgagattacctagaatgatttaaggggggaattatgagaaaaattaattttctaaaatagtctgaagagctacaattgaataaaagagaatataagttaaacatcagaaataattttctgggcaagagtaattcaaatcaggatgtcttttaaagtcttatgaaagctccttcaactgagaccattaaaaatgagatgatataaaaccctagtttagaaagggagaaaaaaatatattacaaaggagatggaataaatgttctagcaatgtttttaaaagtattttttaaagtgtttttaaaagtttttaatatttatgaaaccagatctagtgagttaagtgtttcacctttttccaggggaacagctttagctttttgtgtaatttcttacaattggtggaaatgaagttaaatgggccaatgtaattttttaaatgccctttctggaagtttttgtaatgcagaacagaaaatatttatgtgcatgtctcatgtaaaatggaggtgtgctaaagaggggtaggagaaaattgataatgctctgggaaaaaaacagatttgcctctacttaagtgaagaaaaaccagattttagaagagtataatacaacattcaggtgaaaaatatgtagttgttgtgagtaaatgaatttgctcttagttacaaagaatttttattccaaaatggctttaatacatacagtgtgcatgaataaaatttagtcttaagaaactgatacatcatttttatttttaaggttagatattgagatgacttggatttattattttcccattaatcattatacttctgcagaaaagttgtttgaggaacattgtattcttgaatcagagcattggtaatctttttttattgtacaaaggtatttgaaatatttttcaacaaaaattcttttcatatactaattttatgaagacagtaatttccattaataataaatgtggcatcatttatatacggataccctaatttgtttccaaaaggatttaaagcagagtgtagcattatgaatctgggaagcaaaacatttctgccatcatacaatactcctctgcagtagtaaaagaaaagatgtgagagccatttaaatgccatgaggagaaacatgagaaaaatcaatgctgcaatgagtaattgaatgatgttttcaaaggctgagtaggtcatcattagacatgacacgattgaaacaaaattcccaggggtttttcaacctaacattagtggaatccagta

SEQ ID NO: 34776 - DNA, 3645 bp, Bovine  19866880728701
  misc_feature (1)..(1): n is a, c, g, or t
ntaattaatgaaatagctgtgtgcacgtgaaaacttcctgtactggcatcatagatgatctgcaggttacataatttgtccaaagaggtatacctgcaagacgactgtacaggatactcattttcaacatgaaactttcttaggtcttgtagtgagattttttattttttccactagtgaaaagcaatccctgagatttgaaaatactcaacacttgaattacacatatattcgattgtaccagaaacaacggcatgattttcttccttcaggaagccagcaggacaccttggaagctgatagaggcagtataattgaaatatttagtttgtgctgaaaagaagtacacttggtgccatcttggccagtgggccaaagcaaggcaagtgtctgtacggtggcactgtgaaagtacaatgtagtgtttaaatacagccaggcagaagccagtggataatgctcagtaatgggttaatcaatacttattatggttttattggttcactaaagagagaacagaatctagtgagcacagagtcgaaaaaaatcactgcatctgatctagataacatctactctccctaagggatttccctattcaagaatccaatttaccatgcctgattgacaaggattggatcctagggaatcacataactctttttaggacccaataaaatcctaatggatttgtctgactggccaggagacttctagttttactaaactgagggtggtttgttgcaattagcctctattccacttgcagttgaaaaactaggctattaggagtcatccttgctctgtaaatgctggagtcatgctgggatgtgcccgctgaaaggaagtacggggctgtatgaaaagaaagtccttatgataaattataaacgtttgaaagcttctgaaaaatggtaatcaaaacaggattcaaatgaaaaggggggaaagcacaactaaattgcatgcttaaaaaccatttgttggtcagttagcctttacaatttatttttcattcaggtaacagtaacagaaagaaacctctctgtttgaaagcagctttgaactatgtaacatttgctatctgagcttccccttacctgaagtttgaaaaaaatatcattcacccacaacaaaaatcttgtagatagttgtctctggaccagttcttttcttcctagaagataatgttttacaaagcagttaacttgttcgagcacactgggatttgatcatggcacactatcttggcagctcttaagtcagaaaacagtggtagtgtgatgatggtttgaagtcagggttgaatcatagctggaaaagaacttttaaataatacaacttgcattttgaagcaaatatccctttaatgtaagaatcattggtgcatccctctagaatcatgtctgctctgccaataaggcacaaattacacttcaaacatgtctaaattgaatggatttcacaatcagaaatatgtttacttatgaagtgtctttgaatagacctcatgatttcctctttttcttagacttggagagaagttagtgatgtacagagagctcacataaacccccattaccagcatcctagattaaagtttccaaaatctctagctaaagtgctatgctaattgagtgcaaaaattcatttccagtaagaccatctatgataacagatgtttaaatatatgaaatggacacataaacttcctaatgctaaatgattcttatgaaattatttaaatataggtataggatattgtcacatttaactatctatacattttttaatcatgacattctagctcagtgattgttaagaagacaaaaagtgtcgtgtatgataattacagagaaaaactggaaaaaaggcaaaaatagagagatggaagcaagtagaagaataaggaggcaattgaaaaggatattgataaaaattgtagcatgattacttctttaagtgagttataagtaactctaatttgtttggctttagtttgaaaagaaaacacttttgctgtggaattagaaaaacacaaattttgttaaaagttaaaaatgttacatggtgaagtatgataatgcaggaattgtatttgaaaacatgataattctaaggaaactccagataatctcagaagtgttagagtgatggtacagatgagtgcagtttgtctttctgcatttaccaggctagatttacatagggctcaaggttatcccatggacagaggagcctggtaggctgcagtccacggggtctcaaagagtcggacatgaccgatcgatcgacttcactttcactttcaaggttattttgcaagtatgttgttaaagtttgtagggtaagttccatataattctgacaccctaatggtgaaatatcttatctagaactgatatatttacttcaccttagcttcccaggtggcgctagggataaagaacatgcctcccagtgcaggagacataggagacctgggtacagtccctgggttgggaagaccccctggaagagggcatggcaacccactctggcatttttacctggagaattccatggacaaaggagcctgatgggctacagttcatagtgtcgcagagtcgaacatgtctgaagcgatctaccttgcacacacagtacacattgaattgttttgtttccagagacaaaggaatacatttaaagatgtcattagaagttactgggcttattttaattagcatatagatgaaatattattgaaatattatcataatagagaattattcagtggataattaaaaggtccttcatatgattttttacatttgtttataattataactctttttggtgctctagtactttaaatgattttttgcttttagttaagaatgtagtaataattttctcatcttcagtaatattgcttattcatgtataatttgctaatgaatatttaattttttatctactgctaattttatttcatttatagtacaactagcagtgtctcacccacacattatataattttcacttttaatataaaatataaatataattttagaaggctaaatatttttattcaaaatcaatatatctggttagaaattaaataaaaagtaaaagaaaatgaaaagaattcctgtttaaaattatgatctcactcatttgcttaccttatctcataaaactcaacgcaggctagatcacaaaaggtgatcagtcttctgtccatctctcctcctaggatgattgcccatagaaactatcccccctactgtgaggaggttgggtcaaatggagaggctgtgtgtaggtgttctagtcaccatccccagctaaggtctcagctgacaaccagcatctactggcagatatatgaacgcacaggtcttcaagaaagaacaatccctaacctttgccccagttgatgtcaaatgaaacagacatgagctatttttaagccttcacctaatgggaaaatcatgataaaaattaatgatacttctcttttaagtcaccagattttggaatagatttcaggtagtaatagaaaaccacaatcaatttagctaattagaagtaggatgctatgacagcaaaatataaaacatgcttcttgggagctgggtaatggggtggaagctggaagga

SEQ ID NO: 34777 - DNA, 1226 bp, Bovine  19866880799912
  misc_feature (1)..(1): n is a, c, g, or t
nttccagacttaatattgcaggaccagaagcttttttattctgcaatatgaattgtgcaaatgtctatctatatacaggcacaatccattttaaatatccacaaatttccctaaagtcccaagtggtttccttggcaacagggctgctgaaatgtaaagggctaaggtagttaggatgttgcctatcgttcttcctctctaggttattttaaatagctgcaattttctttgcacatctaaaaaaaaatccacagtggtgggagatacaaaggcgaatatgagagacattagaggatagtagtacatcagagtctaatttgtgtggacaaattattactttcactgctccctgatttgcagagcaccattttcatgtaccaaattgtagtacaaaagaagagcaaaccataaatacatcagaataatttttagatagaatgagataaaatatctgcaaatagcttttgacaatagaggcagtgattaataatggcaagatatctttgcaagttcttttcagttcacaggggatagcatgcatctgatgaggccaggcattggtacaaagagcagaaggaaattcaacagcagtgggcaaggaatattctccacaacctacaaccctagtgcatgctcagtcgctcagtcatgtctgtctgactctttgagaccccatggactgtagcccactgggtttctctgtctatgggatttttcaggcaagaatactggagtgggttgccatttgcttctccaggggctctttttgacccagagatcacacctctatctcctgcatgacaggcatattctttactggaaacttcaaatgtttattatgtgaattattttgtcaactattggtaaattattgaaggtattatttgctcttatttattaatctgcctttcgtacttcctcacatggttgagcatgatgtcctaattattgatttttaggtgtgtccatggagtacccactacagggattcccacagcaaagggacctcttccactagaggatcaaattgcaaagtcttctgacattttcttagggtttgcctccattccttctatctgcatgaggagcctagaaataaaggcatatgtctagcagcaactccctcgatatcactgcttcatgtaaataacttgttacaaggtgagtgcatgctcagttgctcagtcatgtccagctctttgcaaccccatgccctccaagctcct

SEQ ID NO: 34778 - DNA, 1344 bp, Bovine  19866880804686
  misc_feature (1)..(1): n is a, c, g, or t
nctataacgcaggagacccgggttcagttcctgggttgggaagatctcctggagaaggaaatggcaacccactccagtattcttgcctggaaaatcccacggatggaggagcctggtaggctacagtccatggggtcgcaaagagtcagacacgactgagcgacttcacttcacttcaatcctttcttctgttacagatctaacttttataaaactgctaggttgacagttgattcaagtcttcggagagaaactattcacagttttaagggtatgcccctccctggtttcctggatccaggcttcctgaatccttctgagagaatcattctagtgagcttctggagatcttactgcccttcctctggtcgttttccttgaaccccagtcactgtttctgagcaaggaacagctagtacactcttctctaatcctgtctgtaaggacagctaaacctgggtgcatagctctcccattacttattgcccagactgacctccaaggtcttgtttttctgctcatattgttctaccctcttctgtaaaagcttaaccttgctctgaagaaaatctctctcttcctcttaaccaaacattctttatttctctttcatttttcagaagatcatgttctgatagcttttaaaatccaattcaactcttccttgtcacccaaacaaactttgtccttaaagataagagtattcccagcctggacttttctatttgccttagcttttatgtttgaataaatttcattaggtagcttctctacctcaagcaaagatggtcgatctctcttttaaaaaaggctcctctactggggggctattcactgatggaatcactacccctgcgagtccgaacgtagttacctgaagacaatgggttggggaaagattttctgagacaaaccatgtgaatgcaggcagttagccttccacacattacccccttgacaactaaacgcagaccgggaaaaacattgactctgattcttacctatgcctgctgtgaagctctgttacccaaaccgaacttaactgctctgaaatctatgtatgttctaagtcacttcagtcttgtctgacttgttgagaccctatggactgaagcccaccaggttcctctgtccatgggattctccaggcaagagtactggagtgggttgccatgccctcctccaggggatcttcccaatccagggactgaacccgtgtttcttatgtcttctgcaatggtaggcgggttctttaccaccggtgccacctggggagcctgatatctatagccctagcttgaaggcctttttggggaaaaaaaatacaataaagctaaaatcatt

SEQ ID NO: 34779 - DNA, 916 bp, Bovine  19866880897439
  misc_feature (1)..(1): n is a, c, g, or t
nttttgcagcaattgttgcatatggattatatagattgaagagcaggggacatactaaaattctgttcacctgatccacatgcgtgtggcagcccaaggctttgttgtgggagcaatgactcttggtatgggctattccctgtatcaagaattctgggggaaacctaaaccttagaagaggagatgctgtcttggtcttcttggtggtgcttgctttagttagacatctcatattgaggttatatgtttatgctgaaaataaattgtttgggtcagacaagaacatggtaatttgaaaattggcctcctttcttgcaggcttggtttgcctggtgaccaaattactggtgactagttcactagctaggtcattcaggggagtcagaccagcacaaaagaaacatgtcacttttaaatacacttgatagtggtacctgtccaccttcttaaactcttctgttgaaattagttctaaagaagacaacatgccaatcctgaaaatgctcccagttgctgcagaatatcatatgcttttgatgtaatgtaggaatcctatttaccccagttaatgtaactttctgacggccttgtggactgagtactgttttaagggctggttggctcttgaggaaccctttcagaacagtgcatggaatacaacattataaacctccctgcaagtctgtgtgtgtttttaaaccaaaactaaaaagctggtaacagagccactttgaagtagtatttattttagaatcataaacatgagagtaacttaacttgtggatcccttttagctctttagtaattgcagaattatattttgctgctgttatattagaataattttaaattattttgaaacatgtattttaagtgctaatgcaaaggtaaatgaaaaacactttttaaatgtgtg

SEQ ID NO: 34780 - DNA, 979 bp, Bovine  19866881053717
  misc_feature (1)..(1): n is a, c, g, or t
nattgactctttgagccttaactgtgaattttaccgaaaaacaaaacaaaaacaatgcaattaggaaagatgaaaacaaattgtgaacctcaaaataaatttaattataaaattcttccaattgacacacagtattttcacctaagtttaagaagcagcatctataatcaagtggtcccagttggcctttaatttaaagcttccagtctttaatttcagtcattggtggtgaaaaaggaagaacatttttcttacagttattgatgcaaccaagatctaaatctcaataagtaatttcctagtaatttttccaattgttagctaaccatgaaatagtttcattttggcacctgtttgttaattgattttaaatagttcagtattataacagctcaccactggctcaaataatggcataattgatctgtgggaaatggttatgtagttttgcctgtttgaacactggagaatgtcagctgaaaacaactgttttatttttgacccatatgatgctaagcagttctttagcacaataatttaaagaacaattttcattgtttactggaatccattcagaattaataatattataatacaaactaaacaatgatgcttatattcctaccgtttaggacatgtatatacatagtgttttgaaaagcataataaacatttttgatctgggagataaacattaaggtgactgactggaacataaatttattctgtcaaaatactttaacaaaaagtcttactattttaatcattgttacatagtaatatctgttatatattttttcttcctggcatgagttaactacaatatttacatattgaataaataaacgaagtcttgaagttttgttgttcgatgaaataacaccaataaaaataacaaaaggaatgttgcctgaatggcagtagtctttttggttgaactgtttctgcagtaatcatgtataaaaaagtataaaacaaa

SEQ ID NO: 34781 - DNA, 843 bp, Bovine  19866881060806
  misc_feature (1)..(1): n is a, c, g, or t
ncaggaaatatgaaggatctgagattttattctgcttggaaattaggaatgtagcttgcggcactgttatgcaggctagcagaagacacaaactccaaggtcagagaaaaagaccgtaattattcctggcacatcagtgagcagaatggacactggcatatttgcaccagttttccttggcttctacttctattgtgcaatgtgaatgggcccagatggatgcctgtatatacagtatatgttactggactcaaagaggtaccctgagtttagggaacctgaatctttataatggggagtcaaatgagccttctggagggagacacatctctacctgtccagactgcaagcaaagctgtcttttgttttgaagggagacactatattttccaaggctgcttgccttgaaaaaataggctggaacaaagggtagtcagtgacttgaaatgaaggtcagtgtctcatttcacaagatgggcagaaatgtgggaaactgctcccggagaattatctttcaacaggctctaaaaattcatctttctttacaaacttggacattttgctgagagctgtttccattttaattgctcagtacactatgccagttagtcagcatcctagcttaggaaaacacattttgatcttattaggctgtgggtatgattatcatatgaatcataaatgatggtatgatagactcaccaccttaaagcaggagcagctcttattttcttcaattacatataattactcttggaaaattgtatgaaaagactcattttacactggtgtgtcacttaattacacaccaggaggacataaaaactcaaaatattctataaa

SEQ ID NO: 34782 - DNA, 945 bp, Bovine  19866881089951
  misc_feature (1)..(1): n is a, c, g, or t
nataagtttgattagagaggacaaggtcatgtgctgaatgaagataggtcaatctcaggcatcagagcaaaaaaaaaaaaaaacaaaacacccacttgttaaatttacatttacatgaattactgtccttttggaaattattttgtttcatatttattcagactacatacatagtttttagggggaaaaacacactttgaaaaattgatgtgtatttatgttattttgtagtttatagtccccgagcctatattgctttttgtgttcattacagaatagtcatttgatcaagtgattttcaatacattgtcaaaataaattacattcacttcattagatgtacaggaagtgtagctaaagcagggacaagtattaatttaggactctgcagaaactgacactccatcttatgaccctgaggctgtattattcaagatacctagtgatggaaggaagtctgtctccatagcaattacctaaatcttttatcagtcatttctggaaagaaaattagagcaattgtgtcaggatggtcatatgggcagaaattgcacactcattcaaaccacttatgtctctgactttgtccttgcttgatcgctgcttttgtttactactctgcgtttgaaagcttgattggacacgagcagatgtgccaaactgtaaccacaaaaggtcagccttttgttttcttctcatttctttcttccttccttcctttctttgtttcttccttctgttttctttctttttcttattttatttttctttcttagcaaaattactggattgtactgtttcactctagtgaacaaattactcaaattaggctaacaatattaagaaaagtcaattagatatacttaaaataagctgcagcatcttttcttgctcattactattacactcagtaatatttaatagtcagggaggcaaaaaaagata

SEQ ID NO: 34783 - DNA, 1827 bp, Bovine  19866881129491
  misc_feature (1)..(1): n is a, c, g, or t
ntgggtggcagcgatgaggaacagaagcctggttttagctaaaacaaggatttgagatgaaagaagggtcaaagatgaatacagcctgagttgctctagctggggcagcctgagcagtgaagcatgcatttcagtctaactttcaagagaatgttcctacgccaagatgagaatgttacactatgccaagatgggtgactaattctcagagcatccaacttctctaaacaaattcaattctggatttgagtgctgggaatactgactgatggcatcaaagcagcactgccaatattaagaaattgcttgtgaaaaaaaaaaaaaagaaagaaattgcttgtgatacaaacagcctcattcacattactttcttcctattgacttttatttgtgagcgagagtgggagttttgcatcctctttctctctatctcttctcattcaaagtgactccatctactcctgtggtctttaagtagccatccatcctctgggcagtctcagttttttttgttgttattgttgttgtttttccccctgtagcccagacctctccagatttgaattccgaactctgatgcggaaaacttctcatagtttctgggtggatatatgtaaaatgcatccaaaactcagtatgtctaaaacaaactcctgatttcaactctgtttccttgcacaggttcccagctttagtaatgggtaactccactcttcctgttacccaggacaaactcattcttgtcgattttcttttccttacatcccacatgtaataccattgcaaactgaattcaacaatacagttgtaattatcctcccctttgtgtgttgcttacccaaaagagtaggcctttaaaaaatctctgtccctcctatccaccttgtagaatgtgaactcaggatctttctgctccatcatcttggccacatctccctaaattaattttttttaaatgctcaacatctgaagaaagttttttgtcaaacccaatactccaagactaaatagagagaagtaaaataaaatgtaatgatctggcagtaaacaggtcttgtttcattcttatttcaacttgactggctgtgccactttgggtaggtttcttaacttctctaattttcaattttcttatctcaaagtgtgattaagaatgttgtgtttctaatggtgttgtctgggttaaattaaaaacacatgtagaatacttagcacactccttgtcacgtcatcagtgttccataagtgttaaccaccatcactaataaagtttcctcattcaaaaaccttttttcaattttaaaagctcaatgaaaatttcaaagtccattgaaaatttagcttgaaagactctgaagagtgtactaaggatatttaccaccaatattttttcttctgcctatcatttgccaaactgtcactaagatttctcaaaaatacacttcaatggtttctacattgaaggcaatttatttgactggcagcatgatagaggaactattagtaaaatacattttaccaattttacaactctctctggtagcatgatatcaagatttgatactgtgatcttaaataacagagccaacctttggaaaactgtaaattagaaattgtttaatttactttcttttcactaaatccctattccagccttagacagagctgcagtcttctggttttggatatgatacccactatcacatgtggcttatataggctcaaattaaaattaaaaaaaatttttttaattaaaattcagtcactcagttggactcaccacatttcaagtgcttaaaagtcatgggacttgtggctactgtactg

SEQ ID NO: 34784 - DNA, 870 bp, Bovine  19866881225910
  misc_feature (1)..(1): n is a, c, g, or t
ncgacattttataatgtgcccaaccccaaatgaaagtgcgtgtttattaggacaggtcttgatttaaatagaagtgatgaaaataaagcttggcccaaaatggaattctttctattttggtttgaagggaacaataggctgggaacagaaaagaagagctttgaagcacctggttctaatgcttgcagtaggcctttattagatgtcataaacagaatgatgcattcctcgatgaaggacttgcagcccacagaagtggaggtaaaatggaggacaaagagtcctgctaaaacaacatggttaaatggtccctttcaatcaaacactatttattaaaggcagaaatcttaataaccttatggagatgtgctcggtcttctcattttatacacgactgcccttccttttccaagctaaacctttccactggatttgaaccctgaatgacatcttgcagggggaccaccggaagtcagctcgctaattgacaaacatgctgtgagagaaaggagacatctcagtatttttattttgttcaaggaaaattagaaggctcagggacccctctccggagtcagtggagttagacattcctgtgagctgcccagccagaggaccacaaaggtaatttcggccatcggaaactgttttaaaatcaggtctgttttgcatttaaaaagataaaagaatgttttctaaaatgacaattgctggttggccatcgattcggagctttaatctcatagccggctcaaatttcccattatgtctcaccgaggcttagaaggctcgagaggccaaactatggcctccgacaaaagtggaggggggttgcagcattaagaaacacagctgtgctcgcaaactgca

SEQ ID NO: 34785 - DNA, 714 bp, Bovine  19866881406274
  misc_feature (1)..(1): n is a, c, g, or t
ngagagaggtgcctttaagcattgaagggtgtgaggaagttaattaccatgtgtgggttaaggtttgattttcctggtatattcaaaatacattaatcttataatagttcacattcattttttaaagtttttaaagattataggaggaccagtgtagctcttgacttatgaaacaattcagttatgccattctgagtcattgtcactggtctactcataaccattcttaaaatacttgaaatgccttattttaatatctctacggattgactgacttcaatccttcatttgattctgaaatggtaaaataggaaaagtcatagttacttttgtataagttcagaaatatgacctatgtacagtattatatctatcctatagtaatatatctataacatagtaaacaatcgggtgaaaaatgtaggctttaatttccatgtttggttcagtctatgtgatgccaaacaagtgagtaattggaaacatttgtgcatgacttaatttttcatgcattaccccagaatcttgggataagattcagaatcttgcaaacagaggctacatctatgacctattaacaaactctcacttcttgccatccttttttctctgcagaacccatcactagtagggaacaacaaaatgtgttagatcagccttgcaacaaacttacaatgaacatctgaataatggcttttctttttaaatctgtag

SEQ ID NO: 34786 - DNA, 964 bp, Bovine  19866881505086
  misc_feature (1)..(1): n is a, c, g, or t
nctgaattgtggaacctatcacacaatcccaatgcaaggaatgtaaggattttttttgttaaggtctgtgcttagtctctttaataggattgaatatcatttgctgtctcatcagttttattttaaaaaattaaatattcagtctcctattcttccctttcctgcatatgttgattccacacatggatagaaaattcaaaacccacagattatttgacgtctgaaaacaataacatttactccttttcccgaggtcaaaccagacatacggagagaaacaaaatttttccaaggctaaatcctttttctcctcaacaatgtttactttctcttttcaaccccacagtgaaggaggagtttaggggtctttctattaacaatggaactcctggggacttctctggtggtccagtgggtaagactcaatgcagagggctcaggttccatccctcatgggggaactagatcccacatatccaactcagaagtctcactaaccacaactaagatccaatccagccaaaataaatatcaataaatacattttttaaaaaatgaaattcttgacagtgatccttggaaaaactgtatccacaaattcttgactttagttttgttcaacatttcagagtagaaactagaaaatgggtgcacgtgggcttgctaagtcacttcagttgtgttcaactctttgcaaccccaaggactgtagcctgccaggctcctctgtccatgagttttcccaggcgagaaataatactggagtgggctgccatttccttctccaggagaccttcccaacccagagatagaacccgtgtctcttatgtctcctgtattggcagatggtttctttaccactagggtattcaagtataaaataaggagcgaaaaggaaatgcgggcagattctgtgatggtttaagaccatatatgatcaatgaaacatttcttagaaatgctg

SEQ ID NO: 34787 - DNA, 1199 bp, Bovine  19866881643975
  misc_feature (1)..(1): n is a, c, g, or t
ncagcagcccaaagatttgaacttgagtcccagcccttgccactttctggattccggatgttgggtgagtcgcatctcctctctgcgattctattttcactccaacgagacagctcggtccgtgtcccacagtccttgtggtaacgtactgagctaactcatgagaatgcattctgaaaaattgttatacgtaagagaaatctttgtgatggaagctaagaactgtacaaataaataaataaacagctttactgtttttactgtacatgtctacaaatctctacttttcctgaatttacttacagatgcatttgttcattcctggtatttctttgtagtttattaccatttaaaacaatatgtttatctaaaaggatgaagatttttggagtttcttccagacatattatatttcaggagtgataaatattgcaaagtatatgcttaggcttgaatcatgtcttcatttttcttcaatgaattctaatttcacttttaaatactacagataatctgggcagagggaaaaaaagcaaagcaaaaatgcaaacacatgttaacagacagtagtttttaatcattctgtatcttatctgtctttggaagtgaatctaattagaaagtcattatctaacttgttctatgttaccaataattctgtcttttaaagaatgtagacctggtacattttctggtaagtttttggatccgtgcctttacagtgtcagtgatattaaagtcatagtatgtcttggaaatgagaggttgattttaactaaaaattttgcatcttgggtgctgttggaacttatcttttctaatacatttttcccctaaaactttcgtaatatccaaaatcatacaaagcctatatagaatgttagaaaaataaatattttctaagcattcatgatccatgtgctacattaggactgtaaattaagggctgctgtgttgcagaaatcagccttccatatcatagttttcctccacgaatgaggcaagagtcagccagtaaatatatgtggtcaacctcagatttgcctcactgggagttcacatgtatttttaactgccttcaattgttaatgtattcctcaaatgagatgcatcaccttgaagaatgactttttgccccctgggaacaagccaaacaagtatttcattcgctatataatcagttctaccttcagcaacat

SEQ ID NO: 34788 - DNA, 3941 bp, Bovine  19866880361590
  misc_feature (1)..(1): n is a, c, g, or t
nttgattcctgggtcgggaagatccgagggagaagggataggctacccactgcaatattcttgggcttcccttgtggctcagccagtaaagaatctgcctgcaacgcgggaaacctgggttcgatccctgagttgggaagatcccctggagaagggaaaggatacccactctggtattctggcttggagaattccatggactctatagtccatggggtcgcaaagagtcggacatgattgagcagctttcacattataattaactgtttttattatgtaagtttcaggtgtacagcattacagttcagcatctgggtactctaaccagtgtctgttaccataagcgtggtttccattcatcccaaatgagtggcccccagtgacccattttgcctacccctcaactccattcccctctggtaacctttaatccattctctatctatgagtttatttttgttttgtttgccccttgggtttttttttgttgttgttgttgttttagttttattttacattccacatatgaatgaaatcatgcagcgtgtctttctccatcttacttatttatcataataccctctaggttcatctatgttgtcaaaaatgatgggatttcatgttttttttatttatttattttttaattgaaggataattgctttacagaatttagttggtttccaccgagcatgcttttttaatggctgaataatattgcatcgcatccatatactacatcctcttcatccatcagtggacacttagattgcctccctgtcttggctgctgtaaataaagctgtgaagacttcttttccattcttttgggggatatacaatcaattctcattatttgctgtagttatattccataaagccacatcaaacactgaattagcaaattctaagtatttccctgaggagcacctcagggaaatacttagatatgtatcacacagatgataatcttaaatcctaaaagcaacctatcctggcagattctgtgttctttattttacaaaaggacaaaatgaggttcagaaaagtcaaatgacttgtctgatgccaccccccactaaactcacccaactggcctcagagatgaagtttcttgttctacctggcaccacctcccactgtctccatccttggtcacctctgtaggagaatgagaacaagaaaccagagcctcacattgtttgacctcagctgagaatagactagcctggcaactcaattttttttttttttttgcatgtctgtgtcaataacccctactctgctacaagtgctgatgtgaggattacaagtaagccttagccaataggtggatttgcaaacacagaatccacccacaagaggatctgctataccaaggagcagaactgctgagtcatagggtgatttggggcttcccaggtactgcagtgataaagaattcacctgccaatgcaagagatgcaggtttgacccctggattggggagatcccctggagtaggaaatggcaacccactccagtattcttgcctagaaaattgcatggacagaggagcctggtgggctacagtccatggggttgcaaagagtcagatgtgattgagcatagcagcactaggtaattttatgggcagctttctgaagaaccaccaaactgttttccactgtgattgtactattttaccagcatgtaggatttttatgacaggtaaataagttatcatttgtaggacgctaagaacagtgcctggcaaatagtgttatggattgttaattaaattcattaagtagatcatgccaccagggttagctgccaagttcaattccatcccattctcaagagagaagctcacaaaataggtatatgttagggacaccagtgagtcagatacaaaagagaaaatggtccatcctctcctaaagcccaaactactctcaaccagagggggacacttcatttttcacgtttacatagatatgcctggagcccacccactcaatcactactcaagaattgaagctctcctctgttaaaaaatcaatcacttttccttatgatgtgctaatacaagttcactgcaaatatctgggaaagcacagattaagtagaacaaagatatgactcactttactcctatgctgttgtacttcctttctatgttttatgaaactgaagacataatatatgtgatatgtgtgtacttttgaaccctgcattttacacttagcattatattagcttgagattttgtgtcacttaaagtcttcaaaattctgatctctaaataccacctggaatctcattgtgtgctgatgccaaatcttaagtattctcccagtgatgaatattgttcccaaatttctgctattataaacaacacgataatgaaaatctttgtgcatggagatgtctataagtcaatgattatctccaaaaaaacttgatcagactagaacagttgaatgaaaagtacattttaaaatactcctttctacaatactacttcctcaggaaaattttatctttttaatgtttctaatttttaataaaattttacctggactacaccagatttctttgttatattcacatttggtacatgttttttttttttttcttaccactcttattttcaagtatcgtcctacatttatcattattggacaactggcatctattatatattccccccttatcctagtactaatacctagtactaataaaattatttgattaatgcctctcaccagtatgggcttcccacatggtgaagtggtaaagaatccacctgccaatgcaggaaacacaagagatgcaggttcgatgcctgggtagggaagatcccctggaggaggaaatgggcaacccacttcaatatgctgcctggagaatcccatggacagaggagcctggcaggctacagtccatggggttgcaagagtcggatgtgactgagcatgcatgcacgagtcacatttagtgagtcacagctctcccttttcctctatcgtgccttgaataaaattctcttttgagactcccacgtagaagatgcaggcataaactctcaggctaatggcacaggaaaagtatatgagacctctttttgtttctcaaatatccatttcatggtggtagatcgactcaaggaacataatcagggccagattgtgttcaataatcctgtgagtgtcaaattcttgggatgaacatggaaaaagaaaattgggagaaacaagcaaatggctgcatcctgtggctgtgcatcaggcctcgatttgacctgggttcccatcccagctgcccttcacaagccgtacgacaccagcaggaaactaaggaattttccttgttggtaaaatgtagaatattggcaattcataggtcgttataagggttgaatgtgatatgatggagcaaaggaaaaaaagaaaaggagagagaaaaaagaagagaagggagggagggagagagaaaaagaaggtatattttctttctctttccgttagtatggcttgtgtttgaacacttcctgtttgctcaatgagcgtggttcctcacttccagggcagtctacaatccatcactgttgtcttcctttggaagctgttatgaggagttttaacagtccccgttctctgtttgctggaagctgatggaaaaactctccttatctccaatattagaacttgtagcaaatcgatacgagggtataacatccttcaccatcatacttggtaataaagcctaactagaaaatgtgcagaaatgccgtgttgtctggtgcgttttgccagcctgaaaatcaaccctgttttctccaggacggattcgccctcattgatcgaagcgttaagaggcagaggctgtgtttcagccctcattaagaatgcaaacctcgtctgcaacttctcacttgaaacctgaccataccagggg

SEQ ID NO: 34789 - DNA, 1884 bp, Bovine  19866880479919
  misc_feature (1)..(1): n is a, c, g, or t
nccccccacaaaaaaaaaaaaagctatatatggacacaggataaatggcacatttttggttgagattttaataacagtgttttcaggtttgattctttacaataaacagaagtttaggatgtgtcttcaattggtgacaaggggaataataaagtctccccccaaaatgcagtttgctagatgatggcttataaaaaaggggatctctgaatgtgaaggaaaatcacagaatgagattttaacaggacaacttaggaaatgactggaatttttcctgattgggttttctttccttttttgattttaattttttttttaattataaaaaattttaattgaagtgtaattgatttagaagaagggggcgacagaggatgagatgtttggatggcatcaacaattcaatggacatgagtttgagcaaactctgggagatagtgaaggacaagggaagcctggcgtgctgcagtccatggggtcacaaagagtcggacacgacagagtgactgaacaacaacactccctcaaaagcctatcttaccacgtccacatgtgttaaaactgttagcatctatggtgttccctgtgcctgcctgtaagaaactccttcaaaggtgccatctgctttagcatcctcagctcatggagctgagagaggcaatgttaagctgaactggactgcaagaaagagagtcaaatctagaaactgggaaaccaaaggaccctgaagatgaaaaactgcaggaaacccacaccatccccgggaacacctgaatcctgatgacgtcacttcctggaaagagacgtgggttttgcaacctctctgctacttgcttcagtcaacagagatcagggctctccactccagccaaggtctgctctgtgtcctccttggtgctctttttttaaggataaactgctccttctgcccctcctcctatggactccttcagcttaagacaatgaaggaaaaggagccttcacggaagatgctgagttcacactttttcacttggtaccaatgtactccaggcaatttataatcagtgcactccaggcagtttataatccagcaaaacacccaggcaactggctgaatttccttcttttgaccagtgctctgctctaataaaacatgcagacacgagcatacacatccctagcctttctaaatgttctagtcctcttgtcttgagaattttatctttctactaagtatgatttcagaattccagccataatattgccagcaaagaggtacaattctaccattacaaccaaaacgattaggaagatggctggaatattaaaatgaaatcatgtacaaagcagtcaccaacaatgtgttttatcgcttggagtcaccctaagtccctggcaaacgtggcattcattagttatgcctggttattcctagcaaagagcaagttcattacaagttagcaaatttcaattttacagcaggtgtgttattcagagatttttaaaaataaattgctcatatgaggataagccatataattttattttatttttctgtctgatatagtaatgagatatcaagggtacatagaccgaaagcgacaatttccatcttctgaggtaagaaaatgattttcagacaaactaatatgatataaatatgcaattttacatgtatggcttatgaatcttgcttcagtcatcacatgagcccagagggtaattctttcttttcttcattactcattatgtgaccttggcaatgataaatcttagtttctgcctttctggatctataaagtgggctcaataccgtggacgggagataatcactatatacccaatgattcctcacaacacatggtcagatataaaaggcttaggacgcgcagatgtattatt

SEQ ID NO: 34790 - DNA, 1549 bp, Bovine  19866880504043
  misc_feature (1)..(1): n is a, c, g, or t
ncgtaggttagttttgtctgtgtttgtgttttacataaataaaaagaatgggtgtcctattttgtgtctggcttcttccattcacattatttatacagttgctgatcattttttctcattgttgtttattattccattgcatgaatatgctacgatttatttactcacctactgttgataagcatgtggataatatctcattttatcttagaattttgaagactctgtttcattttcttctggtctgcattgaggtggattaaacatttggtttctccatatagtactacttggacatagctcccttttctttatagggatttaacatttttctctgaatatctgctattttgatttttcaccatagtgtcttggtatgtatttacctgcattgatcctactcactcagacccttttatcaataaccatggatgttattgacatcatctgctcttccttacaggtaatcacgcttcataattacctcatttacttctcacagcattcctgcaaggaagggatcattgtacacaatttacaggtgagcaaactctagctcaaaatacaaaactcctctgccccaatttggaaagaatcccaattctaataactgcaatatcctagtcatgatttaatacattctagaaacaatacattcttatgggctacctgcttctacatgttaatatggcattctgattgtgtagtgtaccataaagagcagtaaaaagctaaacatgcaacaccaatacaagcaaaaaatataaataaaaccaagggtttcctaacaaaatatgttaaggaaatattagactaaacaaagtttacttattttgttttaactacaagacttaaagcctttaatatgtttctgagctctaaatgaccccaagggaaaaatgtgaggaataagcagcattccgtatttcctaaatatagaacgctttttaagattatgaccagtttatttttacccaacattttatcatgaaaatttgcaaaaaaaggaaaagttgaaacaactgtatagtgaatacccatgtactcatctttcagcttctacagttaagactttgatgtatttattttattatttatccatctatttatccctccatttgtccctttatccactcatttatctgtctgtatatctatctatctattgatctattcattcatccatccatccatctatccatccattcagctatccatctatttactctttgatccattcatcaacccatcatgttaggggaagcacactgattgaaactgcccaccctggccaggcaccatagtaaccattggcatgagttgttttatgacaggagatcctgataaggaatacggaactaataagccaccaccaaccagaagagttcgggaaaggtcgaaaggagacaccatgtgtcagtccacttcccagaatccctctcactagcatccattttggctgagcgatgcgtgtaccaccaggaaactggtggtggtacattagaagatggccaaagaccacccggaaactatcctatcaccataaaac

SEQ ID NO: 34791 - DNA, 1616 bp, Bovine  19866880521694
  misc_feature (1)..(1): n is a, c, g, or t
ntctcctagcaccatcatgaagctgtcaacacccatggtgggtgctgcaaagtataaaggacagtttatccacacagcagtggcagcatcattgtttgtaagatgataactgcttcaggtagcagcaagttccaacattagcacaacaaaagctttgagccgaaccatctgttgccactgtggacaatctggtgggcttgccaaagccatttatccgcgtagagtgcatatccacactggccagtcctcatgctgagcagaaaggaaatttaaagaaaggcccatcatttatcattgtagacagctgtgctggagtgtgggcagagaatacttttttttttttccttgagaaaaacaaagaccctgaagatggtaatgctcactcagctccaagcgttttgcaagctacagtccctccagctcattcctttcttcttgcttttccaggttgcaaatgaggagttggaggcatggatgtttgttctgtgtgtgcatgctcagttgattagtggtgtctaactctttgtaaccccatggactgtagcttgccaggctcctttctccatggggattctccaggctagaatactggagtgggttgctatgtcctccttcaggggatcttcccaacccatggattgaacttgtgtctcctgaatcgcaggtagattctttaccgtctgagctactagggaagcccatggttggttgtcacacgagggcacctggaattctttggttttgagctgcgcttggcacctttgtttgtgtctctaaaacggaacctctctgccatgctcaggaaaaggccattgattttggagctctcaaccctcaacgagggtgcagactccatctgctgtatgtgaagaaaacaggacatgggaggggtctccccacctcagctcttgaccctgggatcagttctgccttgattgtgcctgtgaggccacactgtgactttcatcggctctctctccttctagaaaatgtttaatagtgtattttgggactgtgttggtatacagagaaagacacggatattataaattcagacatttcctttaaccaagaagttctttcttctcttcttctttttctttaaagaaattaacacacgttcacggaccctgaaaatcatcatgggccctcggcacgaagtctgcagtgtctaatgagtgaattggtcccacatgtgtgtgtttgaaataaaataccagggatgaaggtgcctgacatcattgttagtgtcaatgtaaaaaaatgaacaatgtgagaactgtgaattaagtttgtatgtggggcaaaatgaggactattgcctgggagatggcatttcagaaaccgattctgggctatcatcctcatcttgcccctcataaaacttaactcacaactctcctgtgcacaactttttttcagttgccattaacaatagcttaacaaaggagctaaactcacagcttaagaactggaatttctgagtttcaattctgctggcctctatgcttacaaattaaatgagtttggacaagctacttaatttttcatacatatttatttttcatgtgcatgcgtgtatgctaagtcacttcattcgtgtccgactctttgcg

SEQ ID NO: 34792 - DNA, 5307 bp, Bovine  19866880543010
  misc_feature (1)..(1): n is a, c, g, or t
ntcccatttcttttgtggctttgtaacttggttattcctttactatatgatgagcacatttctaaataaaatttattttatagataactttctttttcaagttagaagagtttaggtaaagttgaaatctccttgaccaccacttctaattctggtcctctcccctctgccttgagataactactgtttggggtctttatttaagtacctttatatctacgtatgtgtacttgtcctggaggaagaaatggcaactcatggcagtattcttgcctggagaatcccatggacagaggagcctggtgggctagagtccatagggtcgcaaagagtcagacacgactgaagtgcgactgagcacacaagcacgcaccactctgatgggcgggtatttttgttttaatctgcatgtttctgcttacctggcaggatgagctctttccacaaatttactggccactcagaattcctcctctgtgaattgcttcttctcacattgggctgttcatctttccttattgatcggtcgggcttctttatattctgggaacacatctactcttggccttctgtgttgtgaatatcttccccagctgtggctgctcttttaactttgcttctggtcttttattattttttttgtcatacaaaatattttaaagattttctttgggctcataggcctttaatccactcagtatataactctttatatggtgggacttagggatctaattttgtcttccacagtgtttttattatatgttattgattccaagatgtactctctgcccccacactttgccatctctcagatggaggtgcatattattatcagtgtaatgtcataatggttttttgctcttttaatggtatgtgaaatagtatgtgtcttactatcagtggcaacttagattcactgaaaggtggaaatagtctaggtttatcctaattcttcatacctaagtaagatgaaccttctatttctcttattcaggcacttatggtctgataatatttcataggaatattacaatcactttgtcaaattctgagaagaacgcagagttttgatttgctcttaaattggaattacattgactacagtttctttgggggtgatcatcacggtgaaaacacaccgtcaggaccccaggctgatgtcccaggttaaggacttggatcaagtgacaaggtgagaggctacagattcaggattctgtcctctactctccttccccaaagttgtagttctttttaagatcctgcttgctggaataagccacctcctggaacagtgagaccctggcctgctgaggtgctggtgctccagctaagtggccacttgatggagacacgattcttcaggctagtggaaatgaactcttaggctcttctgagtgtaaaacgccatgaacattggacagcacagtgtgatctggaatgctgaaatgttaggtggaggtgagatgctgctgctttgtaattttgcctgggaccagccctgagccaggaggagcaggaagaaaggtgcccatctgtccattcacttgctgtggctcctggggaggccagggaatgtcctggttcctcttagccttggctctcttttcttttcatctcttcttctcaccccaagtatcagaaaatatttcaagtggaagctggcaaacaatagcctgcaggtcaactccataagcctctagattttgcaaatgaaattttattagcacacagccccagccactcatttacatactgtccaagattttcgcaaatgaaaagttattgagtagtttgaacagaggtcatgtgacctgtaacatctaaagtattcactatctgaccttttatggggaaaaaacaaaaaaaggtgtgaaatccctgtttgaagcaagagacagctgacccaaaacctatttgtttcccggattccgaaacttagattgcctctgggatttgattctgttcctggtatagattttccttttctttggaaaaggttagctggcctctgatagctcagaacaaaaatatgaaaacatgggtgaaatggaccccagcaaaatgcaatcactttcttctggtttaaggtggtccttgaaaatgaagcagtggatgcagaggctgaaaacagaatcaggagacagaatttcagggaaacttcccagcagagttaattttcccttccccaggctcagtggggagaggacgccaacggagggttattacagccctttctcagaaactcctttaggccaactaagtgagccggtgaaaggtggctcttcaaattgtttgtgaccaaattattggtttttgacaagaactctcttggatctgaaatttctgactgcctttctctgctgctcttcctacctccatccacttcatctccatctcttcacactatgcttttatataccatctggcccctgcctctgaatgtgaagtgtctgagagccaaagcttatgaactgtgaatgtttccttccactgtgaatagccacagcccagaaggatgtcctcaacatactgcaggtggaccactagcacgtggacatgggtctgttttagaggacacgacaatagacttaaaaaataatttattattaataaattatcaatgacagaaataaaattttagactaccagaaatttgcaaaatcattctagtacagcaaacccaaatttcttgagtagttctgcttgggtaaaacccacaactcaataaaaataacaaccgttgtggtaggctgaataatgtcttcacctcaaatatattccttcctgcggaacctgtaaatatattagcttatgtggcaaaacggactttgcagctgtgattaaggtcaggatcttgagatggagagatgattctggactatccagatggacccaccctatcaaaaggttcttatgagaaggaggcagagttcaagggaaggaaatgtgatcgtggaaccagagaggagggactgagagagagagagagagagagagagagagagacagattgtgaggttgatgctattactaataactttgactctgaagatggaaggggctaggagccaaggaatgcaggcagcctctatgaactagaaaagacaaagaaatggattttcctctagagtctctagaaggaaaacagccctgctcacaccttgatttcagctaagcgaacctcattgcaggcttctgacctccagagctgtcagatgataggtttgtgcagctttcagccaagacatttgtggttacttgtcacagcagctacagaaaactaatacaacagataacaagcatttcctaacttcctggcaccgtgttcagggtgtcatctgatttagattcacaactgcctgacaagtgaggaattatgcttcctgcttttggatgaggaggttgagatgccaacagagaagttacagagctatgcttcaacccgggtctgtctccctgccaagtttatattttccctaagaagctacaggttttattttcttgggttccaaaatctctgtggacagtgactgcagccatgaaatcaaaagacgctagctcctttgaaggaaaactatgactaacctagctagtgtattaaaaagcagagacatcactttgctgagaaaggtctgtctagtcaaagctatggtttctctaatagtcatgtatggatgtgagagtttgaccataaagaaggctgagcgatgaagaactgatgcctttgaaatgtgctggagaagactcttgagagccccttggacagcaaggagatcaaaccagtcaatcctaaaggaaagcaaccctgaatattctttggaaggattgatgctgaggctgaagctccaatactttggccacctgatgtgaagagccagcttactggaaaagacccttatgctgggaaagattgagggcaagaggagaagggggcagcagaggatgagatggttggatagcatcaccgactcaatggacatgaatttgagcaaactccgggagatagtgaaggaaaggggagcctggtatgctgcagtccacggggtcacaaagtcagacacaacttcagagactgaacaacaaggggctacacgggatatctcactcctgagtggtttgctcaggacctgatatttaccagggggtggtccctcagatatttcttttgctattgactctcagcatagtggggagattgcaggggtggttgatggataatcaggtattgtccttggttgagtgacctttccccatttgtctttctcttggctccagtctctctatctacctaggtagagggtgcaaataatgtgacatttattcattcattcatctctatgagacttcagcatgatatttccagttcatccagatctgtggacacaaacacgggactgagtcaccacctccatccctcccttggagtttgaacatcgaatgtaggcttctccaccagaggaaaatggctttaaaatttcagccataaagtgttcaatttagaggcagagagtgaataggaaccttcacaaataaacccgtgactgagaaaacttggtatctcacagaaatatatttatcttgttagtgttcctggagaatatttgcatagcaggaaaaagagcttttaacttgtttccttatctcgccttcttactgtagagaatattttccccctgaaggtgtatctcgctattgaatctggcgtttaaaggaaatgtcatcaggacctgtgatgaaaattgaattttttcccaatgcctaaggatgactttctttaactaacttagccgactcccagcctgaaatggaggcagacattctggtctgctttgaatctgctcttctcttcctgtttcaacttcttttatgcctcttgccttcaccctctcctcctatgctgtctgtatgcttcccccaccctgcctttcttctctgttcatctctctccttgaatggaaaagtccctaatctttttcctcttgtgcctgctttggtgcagggatttcaaagtctgggaaattggcaggtctttttctcttattgacagcatgattctgtattccatcccaattcctggatttccatgaacttttctggggagaatggcagctgccttctgcacaggtgagagagtaggtgtggggggaggtagaaatggaagggctggcatttttttttaacccttaagcaacctaaacttccactgaaacttcttcatatgactgtttcaagagacgttcccgattgtgatctggggagatgtcagcttatccaaggaataaatgttagaggacatcagat

SEQ ID NO: 34793 - DNA, 908 bp, Bovine  19866880567392
  misc_feature (1)..(1): n is a, c, g, or t
ncttccttcctaaaggcaacattttatttgtgaaagtgctttgaaaagagagggggatatcagcattattttagagagtctttctaaagaaccataacaagtctatttgaatcttttatttggtattaactagatattttatcataagtgagcagggagtttctggttcactagtctttattgctttcttgaatgcatctcaaccttttccatagttcaagtccatataatcctcaatccttttttccttcaaattttaactccttccctgtgttccccgtaactcttcttgttaatatctctgagaatgcactgttgagctgtcatcttgaatgtgaaaatgctttgaacttacggtgaattgtgccttttaaacagtactgtaagaacttgagccattcagcttggtatacccttagccaaaaatacatgtcccaagattttcacccctttcttttctgagtgcctgagggagccctgtcctgaagcaatgcatctgttttaggtttatgtttaaaaggagtccttatctctgactctgacataattattattttttaaaagttggttttggtatgtaccatttttttaagtcttttttgaatttgctacggtattgtttggttttatgtttttttatttttttggactcaaggcatgtgggatcttagctctccaaccagggatggaactcgtaccccctgcattggaaggcgaagtcctaacaagttgaaccagcatggaagtcccttgattcttgcataactaaataaatgttcttgggggtcctttgggcttcccagtggcactggtggtaaagacgggcctccaatacaggagacataagagacatgggtttgatccctgagtcaggaagattccccggaggagaaaagggcaacccaccc

SEQ ID NO: 34794 - DNA, 2115 bp, Bovine  19866880573220
  misc_feature (1)..(1): n is a, c, g, or t
nttccccacataagtgacgtcacgtggtgtatgtcttcgtctaacgtacttcacttcatatgatcatctctagatccatccatgctgctgcaaatggcgttatttcatttttcacgactgagaaatatcccactaagggcttccctgttggctcagcggtaaagactccgcctgccaaagcaggagacatgggtttgatccctgggttgggaagatcccctggagaaggaaacatcaacccactccagtactcttggctggagaattccatggacagagaagcctggcaggctacagttcatggggttgcaaagagtctgacatgacttagcgactaaacagcaacaacaatatatgctggtaaagaacccacctgcgatgcgggagacctggcttcgattcctgggttgggaaatcccctggagaaggacatggcaacccactcccgtattcttgcctggagaattccatggacagaggagcctggctgtctacagtccatggggtcataaagagtaggacaggactgagtgactaacattttcattttctgtgcatataaagaggaaaaacacacaggtctcctcactgaaggaactctttgtctcctgggaagcagtcatgattacagcacagtgcaggaacctgacatgatggaggcgtgtcctgggtaccataggagtaaagaaagcaaaacatgaggcttcctgggggaagttgggaggggcttcttgcagggggtggtgttgagtggggtcttaatggacacataggagttcatcagtttgcttcaagaaagtgcagcgatattacagggggaccacatacgagatggaggggtcagtagacgaccagcctgttaagacaaggaaggctagatcatgaaacgcgcagaggcagaccctgctgctgagtttagattctatcctacaggccactggcctataataactgttttgcataccaggatcctgtttcaatgttcagaaatttcacggcagtagtttcattgcaaattgtctgagaaaacatatcacagcaaaagttatggtaagctcagtgatgcatttaaattaatttgtactttgatcagcccaatcaaatctacagacgtttgagaaatagctgtacccagcaaaacatacgctgttctcctcgtagctataaataaaatatgactgggtctattctactcagtaacccttctccccagcatcttacatggtgaggctcaacactgaagtactacgatctctgtgttatgtctttctacgtggtacccacttgtggactgcttctatcagatgctcctctcttttatgtaattaggcctgttccgcaccttttctcttctttataattgctttctgctttctttcacgttctttctggataatgtgttgtcaaattgcactctgaggtgttcatctaaatcagtggttctccaactttcctgctcattggcatccccaaagggctggttaaaacacagagagcccaaacttccctggtggtccagtggttaagaatctggctgccaatgcaggggaaatgggttcaatccctggcccaggaagatcccataagactcgggccagctaagcccatgcaccacagctaccttaagccctcaaggcctagaacccactctctgcaacaagagaaagaaaatgaaagtgttagttgctcagttgagtccaactctttgcgaccccacagactgtagccctccaggcccctctgtccatggggttctccaggcaagaatactggagtgggctgtcattcccctctccatgggatttttgcaacccagggatcaaacccaggtctcctgcattggaggcagattcttttatcaactgagccaccagggaagcccaaacggctacaccccaatacaagataaaaagttaaatgtttttaatttaatatagaaaattaattaattaatttttaaaaatacagattgctgggcccacaccagagttcctagatcagtggactgggacctggaaataagcatttctaacagaattcccaggtgatagtgatgccacccgtcctggagccatttatttacattatttctcttctactttattatcagcctgt

SEQ ID NO: 34795 - DNA, 1072 bp, Bovine  19866880583510
  misc_feature (1)..(1): n is a, c, g, or t
naaaatggtggtccggtggttaagaatccacctgccaatgtaggggacacaagttcgtcaccctagaacctgtgctccacaacaagagaaaccaaccgcaatgagaagacctcaccactaaaactagccagtagcccctgctcgctgcaactagaggaagcccatgcacagcaatgaagacttagcatagtcaaaaataaattagtaaaagagagagagagagaatgtgatatttgaactcaaacccgatggattagtcaaaacttgcttggtttgggaggagatgaagggcattcatagcaggaagaccagcacgtgctgagttctagaggcaagcaagaacaaggtgggttcaaagaatgatgttaacttcaagactggagtttagagagtgtgtgtgtgtatgtgtttgtgtgtgtgtgcacatgcacatgtgagacaaagccactggggtgaaactgtgcagggctttcaacaccgtgctcaggacttaggagccttcagttagatcagcaaattgcagcctgaaggcccaatgcaacctgcccgttttcaggtgattcattagctacgaatggtcttcacgtgttttatgtgttgaaacaagtccaaagaagaataatacttcgtgacacatgaagatgatatgcaattcaaatttccatgttcataaataaagcttgctggcacaaggccactcacgtttgtttatttattgtctgtggcagctttcgctacagcagcagagtcgagttgttgtggcagagaccatatggctggcaaaacctaagatatttactgtctgcctcttgacagcaaaagtttgtggatgcctgagttaggaaagagagaatgatgtgatcacactacagaaatctctatcacgtcgtccaggtttggaagataaccttggaagtttagaaatcaaggtggaaactattggtatcctagtaaaatacttatggaggaaatgcatcagtcaggataaagcaggttgtgctgtggtaacaagcaagccctcaggtccccaatggctttcaaggtgggttctcattaaaaatgtgttcacaga

SEQ ID NO: 34796 - DNA, 1929 bp, Bovine  19866880583999
  misc_feature (1)..(1): n is a, c, g, or t
ncctttccctgcatgttcccttagcaccctgcgcttcccctattagaacacacatcacactttactggaaacagaccaattaactaccgatcgatttgctgcatgacaactttgctgaataatcagatcgccaaaatggaaaggagagacctttagatgaaatttgctgaaggatcaattagaggaatggtcaatttagaagtttcttctaaacagtatctgaagccttagtgcggctgcctgggtgtgcaagtatccgtgtgtgtgttcaggttagtggggaataaaaagatggaagggggtagtgatactccccactgtggccccaagcttgataaataatgtctctaataaaagtggacagcaacccactgcccccaaggagactggtttcagcagcgtttgcaggagtgttggtccaggcttcttcccaggccccacgtgtctgtatcaagtgctcaaaaaggactgagagtctgtccctgggctggcttcccaaccaacatgatggtacctggcatggtagaaggtgtgaaacttgctgccagatggagacccagcctcacctgcatcccagagacacataaacatgtgcacaagctgcccaaagcagggggcaactggtagccaaaacaacaagctcaaagtgtctggtactttccagggcatggtttatcttctctgttgatttttagccactgcttttcagcaaaggaaagatttctggagaactgctctaaaacaccattggctggtgtccccctctgtccccctggatgtgcagaattttctctttgccactcagtcctgcgcccctaggcctgggccccacacgtcatgtgctcagcacacacgagctgtatgaaggagacggggccaaggcaaataaactcccactggaccatctgtttagagaatcatttagttccctggtggtggtgatcagttgcttcagttgtgtcataataatctattgtttaatgatattatattttaatctatctacccactgcattgttgggtactcaggttgacagcaatttttcaaaaatattgaagaaaataaatatccttgtatatacctagttataattgttttaaagaaaacaattaataaatagctaatcctactgcatgtgtgttcagtcactcagttatgtccgactctttgcaacccgccaagctcctccatccatgggattctccaggcaagaatactggagtggattgccatttccttctctagaggatattcccaacccagggatccaacccgtgtctcctgagtctcctgcattgcagaaggattcgttaccctctgaaccacctgggtccctccaaatttgaacaactatgcccactccccagttcacaaatactagttttctagaagcaagacagcacgactaaagaatgcagaattccacctggaggtgaagaccaagcgtccaaggtcaagatgaaaggagcacttgggggcagtgcagttcagtggaaggaacagtggcatcagatagactcctgtgtaaccatggtaaccatggccaagttaccaaacctctctgggtttgagcatattgttcttttgaaatttgcaaataacggtgatagtaacgtctgccccactcagatactgtaatgaattttatacacatgtatacatacatacatatatatatacatacatgcatatatgtatataatttatcatacttgctagtacatggactatgcacaataaatgacagcaagttatgactacaacctggggaattcaacaaagtttatcttggaagtgaaagtgaagctctcagtcatgtctggactctttgcaactctatggggctgtagccagccaggctcctttgtccatgggattttccaggcaagaatactggagtgggttgccattttcttcctcagggggat

SEQ ID NO: 34797 - DNA, 3946 bp, Bovine  19866880600744
  misc_feature (1)..(1): n is a, c, g, or t
ntgggcctttgctcatcttttatgaacacacagagacatgtttctgcctcaggacctttgcacttgctgcaccctctttccgatgctttgcctccacatcttcctgtggctgcctcttgttggtccagatctcagcttaaatgttccctccactgtcagagaggataagcctgagcgcctaatctaaatagcccatccctaccattctccatctcgtcaccttattttatcagctcttgtttagtccctcagtcatgtccgactctttgagaccccatggattgtaacctgccaggttcttctgtccatgggattttcccaccaagaacactggaacaggttgccatttcctcctccaggggatcttcctgactcagagatcaaacgtgcatctcctgtgggagaacccgagtctcctgcattggcaggctgactctttaacactgggccatccgggaagcccattttatcagctcttatcactattcgagcttctttgcttgcattcatttatatgagctttacttgtttgttgcctgtttcttccattctaatggaaaccccacagaggtaggaacttgatctgtgttgttcttcactgcatcttcactgctttggaggtagcccgtcacactgtccgtgttcagagcacatctgctgaatgaatgggggttatttctcgagcatgtatgatgtgtaggttgggtgctgggaatacagctttgaatgacactcatgtggttccttttggttgttattgtagttgctaaattgtgtcccactcacgatcctctggactgtagcccatcaggctcctctgtccatggaattctccaggtaagaatactggagtgggttgccatgcccttctccaggggatcttcccaacccaggagtggaacctgggtcttctgcattgcaggcagattctttactatctgaactgagcaagtctcagatggggtttcttcagttgcgaagttgaaacaagcatgtgctgaagaggctctcctagctctattttcttagtgtgccgactcctccagggtccactccttaaggaaagcatggctgcccctggtgatgattctcagagccgttccctacttggccctaaaaggcagtacttgagatcttggctgaaccacttcttttcccagcgtcctaaagagggagttggaatgggataagttatgtgttgtggttttaggcattaatgaatatgagaaactaaattattggattttgcaatgcaaattacattttgcacacaaattcttcatttctgaatgctaaggactcataaagaatgtcaatggtttatgaattagaccattagcatgcaatttgtgattcaaacagcacaccagcaccgtgtaataagcaactatataaagagtcgtgttgtctacagtttcaaaatattttacttgatgccttagaaagttctcaaaggactccaggggtccatccttcctttctcccttccctcttcctctccctgcctccctcccttccctccttcccttcttctttccttcttcctccttctctcctttccttcctccctcctcccattttctgcttctctccctccctcccatccttcatctccgtttgactctcctccccttccctccttgtctcttaccttcctttcctccttcccttcttgtctccttccttctcctccacacctacccccatcattctctttctatcggtcatctacatcagccattattcccacctttcccagattggattgcaggagccgaagatgaatctagatgaacccttccttgttttaaggtcagaaactctgaagcccagagagtgaatgggtcacatccaagatcctacatgagtagaaccagctggcgccaggtcactgacatgtaacactcacccctccaacaactccttcatgccaaggtgcagttgactcatctctgacactttccttgagagtgttttcatggagggagagagattaggaccctggcttccaggtgggattagagggtggaaaagaggtgagggccctgagagaggaaatgtaacaaggaaaagtgagtgcaacctcatcaatttcagcaaatgtgagtttcatcaactctagagtttgtccattgagatgactgatctcaaggcggttaggaccagcaagtggaattgaggtgacatttcagctcagttggaggtataaggtctcacaatcagacgatcagtcaagggatgaacaaccaggtaaagtggggagcgtgccattacttagagaagttcaagttgaatgcagacatgaatttaggggaatgtaagagcctaaagttcctctgcttccatagaggtcaaccttggttgcacctcagctgggggcagcttttaaagctcttcacatccaaacaacacggagcattgattaaatcaggatttctgagggctgggatctggagcatcagtactttttaaaacttgccttttacaaattctaatgtccagacacagttcttcagaagctctagtgttcttcagaagctctgtagctcagaagttctaaaattttagtgtgcatgagaaccactgcaggagttgattgtaaatgttggttcctgggcttgtcttcccagatattctgattccattcctccatggcccattgtccagccaccacttctcttccagtgacagggaggagccagatccaaggtgatgggttgacatccacataacagggtgttacctgaaaactgggttcacttctttgtggatatcgagtcaaaagacacagtcagccaaagatgggaaaaggaaaagattgatcatttgcggcaagtaaggagaacattggggatctttcccaaagcagtatcttcctgaatggcaaaattggggaatttttaagctaaaggtgccaccgtggtaaagaatctcttgccaatgcaagagacgcaggagactcaggtttgatccctgggtcaggaagatcccttggataagggaatggccactcactccagtattcttgcctataaaaatcccatggacagaggtgcctgccaggtccatggggtcacaaataggggtggggtcatggggtcatgactgaagcaactgagcacacacacagaagctaagggtacctgcatattcatgaaggggcttgggcagagggaagtatagcctagaattagggcaaaggttgacagaatccaagctttagttgattcaagtcacaaagatcagaaaaggtcaacatcatcagcactgaggttctgatcaacctggggtctcagcctgaagttacctccacctgggtaggggccttagttcttatggaacccaaagatttgtattggattgtaatgtatttcccttgaggaggaactaggactctgttttatctgggaactgttgtttcttaattgctttttctttgttcctgagtccttttgttcccttaagatcattaattactgagacctgttcaagggcaagcattgagaccaggcttagatcacaaaacggtttaggtcaaaactggcttgtcttggggcttccctggtggtccagtggttaggacttcccactgtcagtgctaagggcccaggttcaatccctggttggggaactaagatctcataaaccacatggcaaaaaaaaaaaaaaaaaaaagagaaagaaagggttctcttatgtcaagaaagccacatccggttctctttcttcctgaacctctcccatcccatcggcctataagagctctcacttgagtcccacagacaaagatggctttgggagtcctgctcagaatcggtgtgggacaacatttagcttcagggatatgcacaggaccgttgccttgactaagaagttagtgatataagaaaacaaaacagcagctacttatttcaagaagcgtttcttctctccccagtttgaggga

SEQ ID NO: 34798 - DNA, 1752 bp, Bovine  19866880728476
  misc_feature (1)..(1): n is a, c, g, or t
ntaagactctgttaatactcccccatcctatgtgttctaaacactctgaaagctttttaattcctacaaaaatatggcttatgagctgactgtctgactgaacagacggatggatgaacgagtggatggatgaatgcaaggatgaagggatggaagagtgagtggatagatggatgaacagctcaattaataaattaactttccttcccatttctgaaagtttttagccctttgaaagtgaaaagtgaaaacgttacttgctcagtcatgtctgactttttgtgacccccatgggactgtagcccacaaggcgtcctttgtccatgggattttccaggcaagaacactggagtgggttgccacttcttttgccagaggaatattacttctcccagagactgaaccctcatctcctgcgtctcctgcgttggcaggcaggttccttaccactgaaccacctgggaagcccccacctcttgagctctatatattaaaacgagcaaagatatgaaactcatgatacctaaaacgcatgtgtacgtttatgtctactattgaaagaaagaaataataggccagttatacttcaatatagaaatattacccaaaacacaattattattttcatatctattgaataaatgtcctaccccagtccaagaccatagacccatatatttacaacatggcattaatattacccaggtcattttgtgttctgctttgttcatttcataattgatcaaaaatatttggcatatttccacccagttttcataattatcgcttttaatatctgcaaaatatcctatcatattgatggaggatcattcagttcatgattcccctatggatggacattttaaactatttctatgtttttgttgccattgttgtcattggcaataatgctgcaaggactaataaaagatgtgaatatagaaagtctgattaaaatttttcatcaatttttcccttccccaaagagcatttgattacctcagagctcattatgtccttaatctctattatcattttcttttttcaatattcatacctattggttacctctcaaaattttgtaattctcccattctccccttcactgggaagctatggtggctcagttgtaaggcctgccaatgcaggggatgctggttcaatccccctagaggaggaaatggcaaccactccagtattcttgactggaaatcccatggacagagaggaatctggcgggctacagtccatggggttgcaaagagtcagacatgactgagtgactaatcagcaacaataacaaactccctttctctagccttgaccttaaaaaccatgtgcaatcatttgtataataacacagatatgaagtcgaaccaacctgaattcaaatgctgtgtacccctttgtagctccatgaactcagagaagtgactgaatatttctagctttcaatgcttcccaagtggctcagtggtaaagaatccacctgccaatgcagaagacccaagagatatgggttcagtccctaagtctggaggatcccctggagaagagcatggcaacccactccagtattcttgcctggagaattccatggacagacgagcctggcgggctacagtccatgggcttgcaaagagtcagacacggctgagtgcacacaactttcaattggctaaatgagaacattgccttcattataggtttattttacagcaaactccaagaaaactttcgctgttactctta

SEQ ID NO: 34799 - DNA, 1257 bp, Bovine  19866880755952
  misc_feature (1)..(1): n is a, c, g, or t
natactggagtcggttgccatttcctcttccaggggatcttcccaacccagggatttgaagctgagtctcttatgtctcctgcattggcaggagggttctttaccattagtgcctcttgggaagcccatccaagccacatatttcccactaaatatgaattcccaactctttaaattatcccaccatagctgttttcagtgggtgaaatggtaaaatgggaagagaatgagttgaaaggtcaacatactgactgcaagacaaggcaattagatgaggtgcaggctcatgaaactgaactagaagtcaagcaacaaaatggaaaatggagctaatgatggtctaattgtccctcccctgtaatgtggttataaagattaaatgaatcaatatatgtgaaatgtttagaacaggctttgggcatagcaggcactgaatgcatattatctattgttgttgtaagtcagtgccaagggtgtgttgggtgtgggagaactcaagatggaaaaacaggagataatggagttctatttactatttcagtgtttaaagcttagcctaaagtgctattgatgaagtgactcctgtataatgagaataataaatactaaaaagataatgagcttagaacatccctcaaaaaaaaagccaattgtttactcaattatggtaaattgcttatgtagttcccacagattgtgaattaagtctcctttgtcaagcaaaacgccacataggtatgtgtgcttgtatttttctttcaattgttgaagataatgatagggatataaaacttcttgaattaaaactgtatttctggaccaagtgaagcatacttatgcaaagtcctacctcatgacttgaaacacaataggaacttgatacagtaaatctcctccattcgaaccgtcatgttgcaaactttggaacgatgcgaacgcgtgttccatcagcatcaggtatgagtgagactgcagcttgtcctccgtctcctattgctgacgatccttcagctgtaccatctcccaccacccctccctcctccagtcagtaattcttcttgcctgttcagtccatgccagcccccggatgccagttgttggactgaattactgtactttttaaggtactatactgtaagattaaaaatgttttattttttgtgtttgctttttatgtattattttgtctgaaaagtgtcataaatctgccccaaaatagtaccatatagccccttgtgttagctgggaccaagctaa

SEQ ID NO: 34800 - DNA, 1729 bp, Bovine  19866880827500
  misc_feature (1)..(1): n is a, c, g, or t
naggctctgtgtgatggctggtggatagtaggggctcacgtgcatgcgggtttctggcatttgtcctcatcagacattatagagagagactcactctgtttgggagggattagagcagaaggggaggtatttcagtttgctttgaaggatgaatacataggttttcaagaaaggaagggatggctggatgctgggacgttgccagcaggaggaacaacatgggaaagcatctggggggggggggcggcaggcagaacactgaagtccttgcatatctgaagagtctggttcaaatgaagtgtcaggggtgatcgtcccttcctgaggtcatgctgtttgtagatttctaggttgtgcccagccatggttaacaatagattccgtgctttcggtctcgtgtcttgctcccaccgtgtattttttctttgcttcaacctcagcctaaggttcggacccactgctcctccatccagctgagcttcagcctgcatcacgcccatgcatttcctctctctcttcatcctctctgacctggtatttcagcaaaggaacccatgaaaggccaactttggctcatgtctgtgttctttgtctgtttccttatcgtttttaatcattctcttttgatttgataaatgagccttggcttctcccagctttcctaaagacccagggtaaaacaacaagaacaacaaaaacgtcctttctggtagctgttgcagttgtgagggaaaaatgagcctcctctatagtcaataaatcactttgtcaccttaatcttttattgatctcaataaaagttgtattttgtttcttaacaaaaatccaccagagaggacatctcgtacaggtgagggtacgatggaagtagtggtcaagccattgcctcatgttgttatttatgttatttatggattcgagggggccaaaggttgaggggaagagatcaagaaagcattcttgcaagtgatgcctcatattttaaaagacacgcttgactccaggtagcctactaacagatatgactctgaagctatattttatgcagacttttataaacagatcataaacatcccacttctccaagtgaggaagggaaaggctctgtctcgctcacaagtaatgcatctactcggtcggttaaatttagaagatggcaatcattgtatccagacatggcttcgtctctagggaagggtcatccaaacaggttactcagggaagaatgagtaatgcttcatcaaggcttggaatcaagctttggttaaggcttgcaaaaaatatattcccccctcagtgcagaggaaaagatcgtaaaaaatggtctctgatgttaatgtttatgtcctgcacatatattaccccagggtatgggaagagggagggtttggtgactcaggcacgggaaaaaaaaaaaaaaaaaaagaggcaaagtagggtagaatgtgcacacaatccttttctctctcacctactattttctttaagactcagtagccatctctgtgacggcttcaccccgggacccagattttatttatttatttctttacttttaattttgtattagagtatagctgactaacaatgtttcgatagcttcaggtagacagcaaagggactcagtcatatgtctgcatgtatccattctcccgcaaagctcctcccatccaggctgccatgtaacactgagttgagttccctgtgctatacagcaggtccctgttgg

SEQ ID NO: 34801 - DNA, 1075 bp, Bovine  19866880827981
  misc_feature (1)..(1): n is a, c, g, or t
nctgtaatacgagcaaaaagaagatagaaagctttgaagaaacaaaactcagctagtctaatattaatgatacaagattcctattctgggaaatatatctatttctttttacatcttgttgtttcagactatgcttgcatatgaaatagccaaataaatattgtttccataataaaaatactatcacttatacaacttacaaggaaagacaaaaattaagctagtgatattattgttcagttgctaagtcatgtccaactcttggcgaccccgtgggctacagcatgccaggcttccctgtccattatcatctcccagagtttgcccaagttcatgttcactgaatcggtgataaatgaaaaggaactttaccttgctaaacattttttaaaaacctccatgaattgggctaaaacacaatacagcttgatcagattgagtataattttgtgtacctaacaaatgtcagccaaagagttgattgctcaaaatgatattctgtgctgaaaggttttggatcaagaaaacgtttgcatataattgctattattaaggaaaagtggttttcctttgcttatagtgatgaggcttttctagactagcatgtaaagggtggtgggactgtctaagcctggttctccctgcaagtttcttcctctctctctcacccaggcagccgatcgccccctttccatcagatgctcacctttgctaatgagtagttaatgggttctggcatcattgaaggcataagcataaacagagttgtaggatcccggggtgtcctggtgttctgtaatcatgcatgtaagatcctcagatccagcccttgaaccgtttcccactccccttaatagtttcctggagcatcgagtgttcagaaatacagctctattttaaaacctccaagtcaccactttatctggctccatcctctcctcttggaattgataacgtgttgactcagagtcataatggtaacttcctcatgaacagctgatgttgtgaaattaacaaagacgagaactccccgacagggcagccaagaaataattataaaaatgtacttcagtca

SEQ ID NO: 34802 - DNA, 974 bp, Bovine  19866880835553
  misc_feature (1)..(1): n is a, c, g, or t
ntaacccaaaaatatgacagccaaaaatcatctatgttagattactttttcaatagtagatgatttatagttgattaggtaattaaatcaaatacaagtggctgaaagtaaatctatttttatcatccctgtaaattaaaagttctgcatcataaaaaatcatgaccatcttgaaaatgactagtcaagtaccttttagaggcaagcaggatttattgtcaattaacgtattgaactgtagagtcagcataaccctgtgcttgagacttttaaaattattggcttccgcttctgaggctgcttcctatcatggtaatgaaatgtatgtagttatcctcatattgaacaattctgtaggttgcgtttatatctcactataacaacatttcattttattattatctccaatcccctgtaatgaatacaaatacattccttttctccatcatgagtttatcaattttcattgatttgcctataatgaatacagtcaggaaaagaaaggcagacagatcatatccattaaagtgtctttggcttcaaaagtttgtctgtggtactgtttaattaaaaaagaaaaagaaagtcatcaggaaactaattaaaaagagacatttactttcaggcctgcttataaacatgaagtcaataattattatataaaggggcttgggagctatcccacttagagaaattgggcatttatatccagcccacttgaagaataaaatgattaatgcttatcaaatatttaatgcatatggataatcccatattactagttatgatgttctacattttaaagtccaagtggaagcgtagaagctaaggtgcattcatgacaaattcaatttttataaacagatgcatttggtagttcatatgcatactgatttttgggcaaagtcctataaacccacactagctgggtgacattgagaaatttgtgtgtgtttctagctgcaccaatcttc

SEQ ID NO: 34803 - DNA, 1726 bp, Bovine  19866880837740
  misc_feature (1)..(1): n is a, c, g, or t
ntctgccaggaagatacacccatggtcccatgcagctcttgcctaggtagaggcatggggcaagtgtgaagaagagcatctgtatatggtggtcagagtcatacctgggcataaagggggaggccccggaagcaggaactgagccctagaggcccacatctgaccactgagaaaacattccatactgcctgcccccttgtcaatctctccttggggatgacttggtttcaaggtggcagtttagggagctgggcaagctttcagcttggctgcccaaaccaaacgtaaaacaaagcccatctccgtgctccagcttaatgggaagcatgagccatctgtgggtgttccttctagttcatttgctgcattggcaagtattaaacagcactgtaaagatccagagaaattatggaaatgggtattagcattaaaatcagagtacaattagaacatttcactgcgtaattgtttggcagggcctgcgaggaagcgaaggatttccagcactatgatttattgctcacaggtctgacttttcagaagcctctgggccaggcacacattctgggggtggcgcccctgacatgacaatacagttggacgctggttagaaacttacaccatctttgtctgactcctggcaaaccttctttggagcgggtacataggctttgcaaaggttgaccagagctccatccagacgtggtgaacacacagggatgtgggagaaaccttggtgccaggctcccgtgtctttgtcagaggaagcgttctatgtccgctcgtaattagcactaggacaggtgtcagagaaaatggttaatcgctgacatggcccacagtgctttgtaagtaaacaccatattgcaatagacacgcaattaattacccaacactccaattaaacatgttcaaaatgaaaatgggggtgggggagaaggtatcggagccgcactgccaacatcctccctatttttttttcctctaagaaataataaatgactccaccactcctgaatgtcaccaagctgtttcccagcatcccttggctccaggcccgaggctgccactgttttctgggaagttctgagttgctggaccaaaagcttcttaaatatattccagacccgatgtctccattggctcctgtagcatctattatgggaggccttgctcgtattcattctcaccaggtcgcagccccatgacccagcttctgcaggttttggctgatcatcactcacagctatatccctccctgaaaaatgaccttgactggcaggaacccccaccttgaggatgctcagagaacagcaagatttcccaccggagtgatgctcacctgatgcctgagtgatgtgtgaatccagtgcccagcctcctttcctggtgctgggaaaacttgtgatacaaccaatgctctagagatcctcgtggggtcaggtggtggctccactctttgtctaatcttttgccttgccctgttcttcttcccttgttctttcagatgtttctctgcattccttcactcaataacttactcgcagggacttctctggtggttaagaatctgccttgcaaagcaggggacacaggttcaatccctcgtcagggaactaagatcccacatgctgcagggcaactaagcccacttggcacaactagagaacccatgtgccacaaccagtgagcccaggtgccactgctagaggatccgtgcaccaca

SEQ ID NO: 34804 - DNA, 1283 bp, Bovine  19866880851616
  misc_feature (1)..(1): n is a, c, g, or t
nctggcttgtcctgttggagcccagattcaagctatgttctgatatggattctcatttaagatttatatttgtctaactttttaatgctggatgaactaatgaacttctatcagagaaagatcaattggcatttgaactcaggagagttactgaatgcactgctaattttcagtcttttgacatgggccaaactataaacctgtacatccatgtagcagtaagcagaagctgattggcagaaggagattcggttcccaggaagcaggaggaagctgccgttgaaagtctatcagacctttttgtagacctcataagaaattccattattccagaattctaacatgattgaaaacctagggcatcagttactttcagaagctaatcatattcttaacagccagaacagtgtgactttggctcaagataggtcaaacttggttttttttttcccttttggtgggggtcagggcagggcagagggagatttaactagattgaaaacagctatgaatctgaaacatacttgaataaaactttgctaccagcctgacctatgtcttcattaaaaggggtcattttcgaagtttctacacattttgttctggccagtatgaagagacaataggctgtggtctgtctctagcacagtctcatgttaaaaatcaccttgacatacacaaagggtatttattgaatcgaattgaatatgttgttgagaaaggccaacccgtacatccaaagggagctgtccaagacccaggtgctgaaaccaggagcgacaatattaagaagttcacaaattattaatattcagcttatttgtagttctggcatcacactccaggctagatgcacacaaaacacattatgttgtttatataataaattggcctattaaatacccaggtcatttcttgagtcatttcactttctatgatggccagaatggggtcacatgatgctttaaggagagaatcaactttcaaacccaggaaattttacttcagaaaccatccttttaaccctcaataatcatatgtctcctagatttaaactcacatccaattaaaaacttaactattatattctactacttcaggtaagatcaaaatatgggctggaagttttctatacttttcaagcatgcatgtatttcttgtctttcagaatcaaagaggataacatgctggcttaatctctcaatgctgtagcactgagaaatctccaacctcttaaatgtcatctcttcaagactctgggaagcgattgcaaagtggggatt

SEQ ID NO: 34805 - DNA, 3900 bp, Bovine  19866880857445
  misc_feature (1)..(1): n is a, c, g, or t
ntacaaaatagaaacagattcacagactcagagaatgaacttacgattgctgaggggaagcacggggggatgggatagttggggagtttgggatcagcatgtagacagtgctacatttaaaatggacaaccaacaagtactcactgtgtagcgcatagaactctgctcagtgttatgtgagcagagttatgtatgtaactcagagttatgtatctgggaggggagcttaggagagaatggatgcctgtatatgtatggctgagtcccttcactgagtccacctgaaaccatcacgacattgttaatcagctataccctaatacaaaataaaaagttttaaaaaataaaataaatgttctccttatacaaagcactcagtcaatgtcagggagtcaggaaaccctctctgatcattgtatcacaaatgccatgctcctggggctactgcaacagagttaaaggcttcttttcccctgttgccttccacggtcattcccgaccagcttaaaggagacaggcagctcagaaaccaaagaaagctgaatatacagagatggtttcagaagggccagagtcaagaggaaaatgtctatgtctcacctctgccagcttaactttttgggtgtttgtttcaaaaaaggatagagttaggaaagccaaatcactctaggagaatttttcaataattgcctttttttccttcagatgttcagaggtgatctccgccaccatcaagatccagataaaaaggaagtcaagtgtctcagtgcagagcccggcctgcctcgtgagcagggaggttataacgagaagacagctgtctctaaggaaagctagtccaccgttttctcgtccagtctttacggatcaggcccgtgtggcagaggttgaatcactctctctgaaaacaaatgcaaaaacctttcaagttcattcaaagtcattacagcactttccagaattgaatccattaccgtaacctccgtgggtgtgtaaaatatgaaattaccagcaccctcacatagccagagaatgggcaagttagcagaaactgattatggaagctttgggagcagcccctggtgtattaagtgtctcgatgacaaacagcaatatattatttgtgaaattttgtttgatgaaattgtcttgtccgctaatggggcttcgctttgctgatcacagattctgccgtctaacacactgacgtgggggctgagcttaccatgttgtgactgatgaaaacaagagagcgccatggtggtgatacgcccgatatccattttgtgtgacagtcaggatgggaacggactcattccaaacaagctgagcgtggtttctcctccctccaccccgtgggtcatactttcagagcagactatcatttaaacttttttgccctgctcctcactcccttgtcacgccctattctttgcttctcttccctctttttatcttatggatccacttctgagccaactttgttagcaggcaagatcaaggtaccctaaaagataagtcagcccaacgtggtcctttctcctagctcctggtttctggtttatgttttaattttaattaaacataatcttaattgtttttaactaatttatttattttagctgtgttggatcttctttgctgtgcaggcttctcactgcactggcttctcttttgcagagcacaggctctagggcgtgatggctcagtagctacagctcatgggctcagtagttgtggttcctgggctctagggcacaggcttgatagttgtggcacacaggctttgttgatccgtgatatttgggatcttcctggatcagggatcgaacccgtgtcccctgcaatggtaggcagattctttaccatggaaccaccaggaaaacctctggcttatgtgttgatttgaatcaaagctagttggtctttgctgggaacggagaaggaaaaacagcagtcagatgaagcattccaacattccaacactagcttgctgagacctcttgggatgtcttcctggctcacaataatgtaccctctggaaagaggtgcgactctgtgacctccccttctgccaacttgctgctgctaagtcacttcagtcgtgtccgactctgtgtgaccccatagacggcagcccaccaggctccccgtccctgggattctccaggcaagaacagtggagtgggttgccatttccttctccaacttagccatgactgaaagacaccaggcatgagcacctgagcaaagctgggccctttggttcccttctaggactttgctacttagaaggcttagtaggggctgtacatctctgaagctgagtcatggcactccaggcttccctggtagctcagctggtaaagaatccacctgcaatgcaggagaccccagttcaatttctgggttgggaaaatctgctgaagaagggataggctacccactccagtgttcttgggcttccctggtggctcaattggtaaagaatctgcctgcaatgtgggagacctgggtttgatccctgggttgggaagatctcctggagaagggaatggctacccactccagtattctggcctggagaattccatggactgtatagtccatggcatcacaaagactcggacacaaccgagcgactttcactcactcactcatggtactctaagagaagcatcatggaatcttgagcttaggtcatgtggcacacctggttggcttgtgtgagcttagtttctgaatcagggattgaacctgggcccccagcagtgaaagcaccaagtcccaaactctggaccaccagagaattcccagttcttgcctttattgattctttgttatctactactttctggggttccttatgttatcacctagttcctcctcaataaaacccctcttttttaactgtttgctacagctcatttctgttgattataaaccaaatagctttaatacagtaaatacagagaacatataaacaatcaaactggactgagcaatatggccagtgatttccacactgtttatatggtgagtgcaaaagagtctgggctttcaaatcagacccaggtttgattctagttcgactgcctgttggctgaatattagagtcggttccctcatgtctctgtgcctcaatttcttcatctgtaaaatggggataaaactgctaagctcttggggctaatgtcttttaattgaagtatagttgatttacaatgtttctggtgtacagcaaagtgattgcatttgttgtttaaaggtgcaggaaaatggtacctaacagaccccccctcttagaaaggttagtcctccagagaatagcatgatccatactgaggaagctgacatgttcccctaaccactggcatgtccctttagaaagacatctgggcaccttcgagcaggaaccaaaagcagaaagaagagctcaggtaatgaagctcaaatcactacacacattcagagccatctatgaccacctgaaacctacatgtctagcctccccatctctccaacttccaccataccctggaattcagccacataaaagcaatactcccagttccctggtacgcaaggaaagttaatgggtgtgggttaagttagaacacatgaacattcttccatcgatattttaaacttgggacatgaagacattatgtgagagaaaccagacacaaaggaacaagcatatgatcctatttgtatgaaatgtctgtagacacagaaaatagaattgagattgccagggctggagggaggagggaatgggcttctttctggggtgataaaaatgttctggaattagatagtgatgatggttggacaactgtgtgaatgtactaaaaaccacagaagtgcatgctttaaaggagtgaatttttttttttt

SEQ ID NO: 34806 - DNA, 1223 bp, Bovine  19866880907473
  misc_feature (1)..(1): n is a, c, g, or t
nattctgtgagtcattcactcattcatcaaatatttatgcacatctactatgtgccaactactattacccatgttggctggatatccagcaaacagaccaagccagaaaaaaagccccctgcttccttgatgtgtatgttctccttggggaggcagatgataaagatggaaatatataaagaagaaaaaaagacatctagaaataattgctgctaataagcagggtaagggatggaaaatgagtggaagaagatccagttacaggaaggtgtgtgtgtgtgcactcagagcagatggtaaagaacaagagggagggaatgattttgcttcttcaaggcatgtccaagaggactagtgcggatgagtccgggagacagtccggggaggaggtgacattctggaggaagtcagggcctttggaggtcatgctaaggaactttataaaaatacattttccctgcctagtctcctgtttgcatgagcaacatagataagaaatacataaaatccttcaaatagcagctgtggggcttgcttgagcacattatttgttattatgttatttgaattgtaggatgcagcgagcatgaacactgctgtttgcacagccttatttgcctgtatactgtggtcctggttaatgcagacatctatgcaatcttcctgtgttctatggcttccccagagaagcaccatcgtggattcaataaagctagcaataaagcccatattaataatgtatgcagagctatatatgtctatttataaggtgcagaattgcagtccaaatgcttcccttctctcccctcagatgaatgtaagtggccccaactatgttagatgaggtttctctctcaacccgacacccctttttgccacactgcatattaagagctgagctaagtggtatgccagccccgggaccactgcatacacattaccctttggatccaggatgattatttatgcaggaaatgggagataaagcatgcctagaaacatgctatgattcacagctgaaaagaggaataagtaactgggaaaccgtatgaataaggagatgaataagcttgcttggaaggcacactttataagagaggcgcttagggaggcaggagaatgcagggaaaagcacctgatgtgtgatgagcacctactatgcgtcagaggacatgctagagtataagcgtgtgcatatgtgtttcctgtgcatgtgtgtgtgt

SEQ ID NO: 34807 - DNA, 1430 bp, Bovine  19866880921703
  misc_feature (1)..(1): n is a, c, g, or t
naaaaaaaaatgggataaaaaaatcgttaggtcattgtaaggactgaagaaagtgtcttgcaagcactattgcagtgactttcacgcagggcactgagtgtgtaatttctcagtataaaatagacaaccagctagcccttctaagcttccattttctcatctctaaaatgagggcttttttactctttcagtggttttcagtgctgactgcaaactaaaaccaccaggggagttttaaaatatacagatgcccaggctccatgcccagagatactgatttaattggtctgagtgggggctctttgcactgacagcttttaaatgctcccaggtgagtctgatgtgaaaacaagagttgagaatcactgcaagagatgaggatcgctttacaagttagcagtctaaacctcttattaagaaaagaacaatttaagtaatcattaaaggtataaattttcctgcagaaatatcccaaggtgatgcctttgaaagtgggcaattaacccttcagcagaaaatgtttaaaaatttaaattcaaactcagcaaagtcagtctgtttaaggagaaaattaattaaaagaggaaaaattttatcactctaagattgttcagcaaactcttttattgcctctgtcatgctgttggaaggactctcatccctaagtattaaaaaaaaaaaaaaaaaaaaaactcaggcaaaagagatatcaattttattttgtgaaaatacttggaactaatgagtatgtgtgcttttcatagctcccttaggaaatgctgtacagtaaatataactgaaagtaggaggtagagtgtttattcatcatgtatatattttataaatgcaattaggaaaagaacaatgcaacacggaacatgatatggctgctaagaattcagtatattttcgaaagtgttttagagacctcgccaatgcctgagactcataaaattatcaccttgatcttactcagtccttgcaatttgcattgttgcataacggtacaaatgaacttacttaaaaaacagactcccaaactaagagaacaaattcatccttgggggagatgggtagggagttggggatagacatgtatacactgctatattttgaatggataaccaaccaacaaggacctactgcaaagcaaaaaacaaaaacccaaaacagaatggaatatatcttcatcccaaaacaaaattcctgtaggaaaaataagttatattctcttaaaatatgaaccaaaaagaaaaaaaaaaaaaaaaaaaaaaccttggagaactcacactggaaggaatcttcaaaaccagtggaatgagaactgaaatatgacatagtatacggagatgtgatcccaagctgtaaaacaaattaactgtgtggccttgggaaattatttagcctgtagaggacatctgcttccagac

SEQ ID NO: 34808 - DNA, 1305 bp, Bovine  19866881142522
  misc_feature (1)..(1): n is a, c, g, or t
naccttaatgtaataattgtgagtcctattatgtggggaaatgagaggaatgagagaaatgaggtacttggtgtgaaatgacccacaaagcctgtgaaacagtgtggtcttggcaatgagagacagctgagctctgatgccagccctgctgtgtactgttccataaacttgggtgaacaagtgatctaatctctttaagccccaatttcttcatgaatacaatgaatctaataaaataacaactcatgagctccttatgagaaacagctgagataacttaaagtaaatgcacataaaacatctgtttagctcctttttaacgttcaaagtgcatgggtgctgcaaggcagacgatgggcgggagggaaccatgagcttgccttgtcatccactcacctgcctgttgtcattcccaaggaaaatggggctggaataataaaagagtgcctggtgtagatccaggcaagaatactggagtgggttgccttgccttcttccaggggatcttcccgacccaggaatcgaacacaggctcttgcattgcaggtagattctttaccactgagccatctgggaagcccatacgtgtacatatatcccctgtattttgaatttccttcaccacggagcactgagtagattataagcttcatgagcacaagaatggtgcttatatcgcagataaggaccattcttgggctcatgaaacttataatttactagaatggaggagactcactctgacttagtaaatacacaagtgatgaatgttctgaaaagtgatggacacaatgtgacatcttttccagggagatgaaaaaagtctgcagagtcaggaactatttctagaagcaagcaatttttttaaatccaagccctgaataatgaattcattcatctcagtggtaaggcatggggagagaggaaaaggccagatcattggaggaataagaatgagtttggcacatctagggggccctcaaagagtagccaagttttcattttgctaattgagtacatcttttaaagcagctattgaatatcataatttcatggaagaaagaacatttgaacaccaggaaaataaggcgacaatattagattaatgtcagccctttgaattgaataaattcgcagttataaaatagctacttcgttttgcgtgtttttatttaaaactgtgtctgtgaccattgtaggtttccaagagcggtatggtgcatgctcagttgtgtctgactctttgcagccccttggactgtagccccgtggtctcctctgtccatgggatttttttaggcaaaa

SEQ ID NO: 34809 - DNA, 1502 bp, Bovine  19866881165550
  misc_feature (1)..(1): n is a, c, g, or t
nagactgaagctggacacagtggatggtgtgagcccaaagtaggatctgggacttaatcatttatttatcacatggttgctgcacattaacgtggggcaaggaagaagggcagctgtgagaagtgggaatttcagtatcagagtaatgacctgggggagatactttcaaagaggaagggcgttgcgactattcatctcagccatgttagccagactggacttctctttagtggcagaagttctttctttttttttaactaagaaaggttcagattaataaactgggacacacatatgaataaaaaaagtgtatctggttgtacttttatttttaataggacaagcttaaaaagaaagggttttttgttgtttcagggcacttggtctctcttattatgaataaagcataaaccagcccacttagatcattgtctactgtgactgaatttctgtttctctctgggcaaggctcttctctctgggctaactgaagtgaaacagaaatttccaggattctattattttaaaatttctgtctcggaagcctgacttgagaagggttggccttcgtatgttctaaattttaagaagagtaattattacaatgataataaaagaataataactattaatttatattagctattaaaatagattgagtgctaacccctgtgttaaactctttaaatattttcttttatttaatccttgtcacaactctgtacttatcccaaataaggaaactgaatcttagactaagcaacctgccaaggggacctgctttacttgtgccatgtgggtgaacaaagctctgtgtggaaaggacatctctcttcatctacgcccatctagtcctcaaaaccacaaggaaattaggagccacccccgcccctatctccctgccaagtcatcctaacatggaagcaaagctgtatgtttcatggggttgagtctctgcttccacgtgagattatagcttattctccaattaattatgcatagcctctttggctaataaagtctaaacaaagagcatttaatccaattcatggtttttttttctctccatcgtgagcagcctgtcaaacacaatcagattccccatgcaaagcagagaggaggcaggcgtcagccacacctgcttagcggggttgcaagagggaagctcacagtcagggaacagttggcggcgcagatggtagagatggaaaggcttcgggaaaagccactctaactgcagttcagcgctgggaggggggaccatttgggggtttcaggcaaagaaacacttcctcgtccctcctgacttggtccaaccaatagggggtgagaccactcagaaacaaaaggcacagaaatttaccaggcttccctggtagctcggtcagtaaagagtctccctgcaatgcaggagacctggctttgagccctaggtcgggaagattcccctggataaggaaatggcaacccactccagtatccttgcctggggaattccatgg

SEQ ID NO: 34810 - DNA, 1138 bp, Bovine  19866881206682
  misc_feature (1)..(1): n is a, c, g, or t
ncggcaaagtggggctaactgtcccagttgttgcgtgtgggcttctcattgcggtggcttctcttcttgcagagcacgggctctagggcacgtgggcttcagtagttttggctcccaggctctagagcacagacagcctccatagttatgacacacggcctgagttgctccgcagcacgtgggatcttctcagatcaaggactgaaccccatgtctcctgcactggcagatggattcctatccactgagcccaccagggaagccctcagcataaaatttttaatgttcatccatgttgtagtgtgtgttggaatttccttcctttttaaggctaaataatgttccattatatgtatatactacattgggtttattgatttgtctctttaaaaaattatttatttacttggctgtgttgggtcttagttgccgtacgtaggatcctcgttgtggagcactgactctttagttgtggcgcgtttgctgagtttctccgtggcatgtgggatcttagttctctgaccagggatccaacctgcattccctgaattgcaaagtaggttttcaaccactggaccaccatgcaagtccctccatttgtctcttgttggacatttggtttgttatttagcgcttttgagcaaaagacggttgtgtctggacattcatggagaaaaatgtttggggggttgaggggatgggcaggagtttagaagggagaggcactttgtggccaggcaaggaatctgggatctggctaaccaggaaagataaataaatttaatgctactattaactggtgctgagtgcatgcctgctctgttgctcagggggtgaagaactctgtgatagattggctatgtttttcatgttcatggcaggagggggagatggtggccatgtatttacattcccatctaaattgtttggctagtttcatagtccctctgggtaaggcgctagctcctccagctcttttaaccagcgctgaggggctgctgggcagtgtctgaagggtcatttccagcttcagatgatagcctctggtttaagaggcttgagcaattcagcctctgcccttggcaatatcttgaactctaggatcaatagtattttattttgttttctctttcctccg

SEQ ID NO: 34811 - DNA, 1664 bp, Bovine  19866881293401
  misc_feature (1)..(1): n is a, c, g, or t
nccactgtttccagccaaagcacaatttgtaatttgtgtttaaccccaagcagagattgcactctaaaatatcttcaggagcagagactgcaccttaaaatatcttcaggaggaggctgtgagataggtaaatgaaatgtgcaaattgaaagagatactaagtgttttgcacttacttcccactcttaagatgttttccattaattctgttacatttagcattatgttgttggtcaatcaaaacagtatgtttttgtggtttaatcactaagtcatgtcagattccttgcgaccccatggactgtagcacaccaggctccattgtccatggaatttcccaggcaaggatactggagtgggctgccatatccttctccaggggatcttctcaacgaagggatggaacccatgtctcttgcattggcaggcagattctttaccactgagccaccagggaagcccccaatcaaaatagaatagtagttaccaatttgctactactgtattaaacaaacaaaacgaagggaacaaaataagtccgcgatggatcatattttgagattccaaatagtagtgattactatttctgttagtattactgagatcacttactgattagctactatttgccaaaccctttcgtgtgataattttaatccttacgacaggactcaatgaaattgatagtttgtccctgtttggcagatatgaaaactggaggctcaaggttattaaatgatgaggtccaaagaaactgagcaaagctagagatcaaaactaagcctgaaagtttcctaaaaccatgctttgccagctactctatctgagcttaaggattcactatttctcctctgtttccttcctccttgtcttgtttctattttgccagtgggattttttcttatctacagaagatacaacctccccacagacttccttggttggatttaaaaccctaccgcagattcttcaagttgatcaggagcttctagatgtaaataacatctttagcctggaagagtcagatgttttcagccagaagatgactgcagaatctttagacatagttttgttgaaatgagttgggtgaatatttatcaggccttgcctggaaaattgcatggacagaggagcctggtaggctacagcccatagggttgcaaagagtcagacacgaatgaatcgagttatacacatgcacacaggcacgggttatttatcattccaaggttagagaggatattttatcaactctaaaccaagtatcactgttggtaagtttcatgagagagtctgagcttcagagtcatgccaggctggctcagatttcgattttgtctgatgtttttctgcctctcagcctcagattccttgtgggtttaataagaaaaaaaagttccagtgcttgtagaacatacttggaccaggagcagaaactcagtgtcatcttatcagtcttattaataccagctgtatttaagattgtttatatagttcttggatttcccaggtgacacagtgataaagaacctgccttccaatgcaggagactggggttcgatccctgggtcaggaagatcccctgtaggaagaaatggcaacccactccagtattcttgcctggagaatcccatacacagaggagcctggtggtctgcagtcca

SEQ ID NO: 34812 - DNA, 894 bp, Bovine  19866881335869
  misc_feature (1)..(1): n is a, c, g, or t
naaatcccagggctgatctccttcagaacggactggttggatctccttgcagtccaagggactcgcaagagtcttctccaacaccacagttcaaaagcatcaattctttggtgctcagctttcttcacagtccaactctcacatccatacatgaccacagaaaaaaccatagctttgactagacgaacgtttgttggcaaagtaatgtctctgcttttcaatatgctatctaggttggtcataactttccttccaaggagcaagcatcttttaatttcatggctgcagtcaccatctgcagtgattttggagtccccccaaaataaaatctgacactgtttccactgtttccttgtctattatttcccatgaagtgatgggaccagatgccatgatctttgttttctgaatgttgagctttaagccaactctttcactctccactttcactttcatcaagaggctttttagttcctcttcactttctgccatacgcaatagcatgggggacaaatgcagggactctgggacagatttgtttttaatccaagctctacgatttcatgctgtgtgggacaggtgacttagcatgctgttactcagttccctcatctgtaaaatgggactcttaatagtaccacgtcatatgagagtcattaagattaaatgggtttatatccaccaagaaccacaaagtgatcagaggagcctcaatacatgttacatggtttttattacttttgaaataagtaaaaattcactcgggaaatgagacaagacggtaggcgagaaaacaatgtgccgatggagccgagagagaaagattttattttttattttttctgagttgaaggaagaacagaaagatgtagcacacacttccgtcttaaacca

SEQ ID NO: 34813 - DNA, 1440 bp, Bovine  19866881421201
  misc_feature (1)..(1): n is a, c, g, or t
nagaaaggtgtactctgtgagccagaaaaaagcacctagctgctacctaagcctgaaggttaaagacatccttttcagacttagcgatgggtgaatggattctgatagagaagacgagagcctgccaggcggctcaaatcaaacgccagaggggaaaggaggggcagggcacttcgctctgcatgatgatctctttttcttctaagggttcgcacccctggaactctgtcttttcaaatatcctccccagcctcctgggctctgagttggtgtaccccttcccactgagtcaaagcatttgcaaggaaaaaaaaaaaatcaaatccgacttggcatataacctttcaaggcactaggggaccaattccaacttcatgcactcagcatctgtctttttgtgaagaagaacagaatgaggactctgggaaaaggaaatggatctcaatcctcataaggttggcattattgcccccaccgaggaaactgaggctgtgatattgcgatttataataagaaatatgtgtatggtcttcttcccacatctggcacagagttcctaaaacccctggaatttcctcctgatagagagctttaaagatgactcttgttatattaataaggtgactttgggggacctcacccaaggatgggaaaagtgagtggcagaggatgagatggttagacagcatcaccatctcaatggacacaagtttgagtgaactctgggagatagtgaaagatagggaagcctagtgtgctgcagtccatggggttgcaaaagagttggacatgacttaggatgggagctggttgccaggaaaacaagccacatgattagagggtttcagtcctccgccgacacacacccccatttctgggctggaggttgaatcagttgccaatggccaataatttaatcaatcatgcctatgtaatgaaacctccataaaaactcaaaaggatagtgtttggagagtttctgagctggagaacacatggagatgggaaaagagggcatggaaactataccttttccccaccccttgctctagaggtccttccatctggctgtccagaattatatctttttgtaataaactggtaatctagtcagtaaaatgtttctctgagtcctggggcgctcgaggaaattaatcaaacccaaggggagggttactggaatctcagatctatagctagatggtcaggagtacaggtgataatcccgacttgagcccttaacctgtgggatctgattctgtctccatgattcagttccactccagtttcagaatagagctgagttggaggatacccagctggtgtcggagaacctcttgggggtatcggggaatcctccaatgccctgctcattccctgccattcactgtagttggttccagaaccttagctgggatcagaagggaatcagggtcagaa

SEQ ID NO: 34814 - DNA, 1394 bp, Bovine  19866881459377
  misc_feature (1)..(1): n is a, c, g, or t
ngggaattcttatggcccttgctgcattggcacgccccgttgtcttgagatcctacccgctatttgcagactggaaatgttggaatgcgagtaggattaggggctggaagcaattaaaatgagcaaaccatctgtggaggaactggggctggagctgagtcctcccatttatcaatgtcttcagcaaggagccctggcctcctccggtcacccagtacagctccctgcaccatttcagtccccaccacagcggctggtggagccctgcatgctgattaaaaacctggtgagtaatggggacaacacacgtctctattgcttaggtagatctaagccagttaataaccttctttaaagcgaaagcaaatcaagtcctattttaaacattttattgacaagcacaaaaaggctgctgtcggtggcccaggtaaatttatcacttggttttgttacttgtttctgactcatgcaacggacaagaggatttaaatcatcccaagcctcccattgttacaagacaaggggaaataccggagcagggaaaatgggatgaaaaggagggacctcggacttcttaagttccttttgtagcaccaggactttgctgggtacattccttacgtggactcatctgatgctcagatagcttttcatcatggtattattttattcctgttttacagttgaggacatcgaggcatcaggcgtgaaatgctttgctccaaattgtatggtaatggggagcaaggtttcaaagcttcatctggcatttgcattcatactctgtcactcaaggtcctaagacaaaacaggcgacaaacacaagttggggacatcctggggatgtcccaggagacttagttaagggacctcttctatttatttattttatttggaggataattactttaataatactgcgatggtttctgccatacatcaacatgaatcggccataggtacacacgctagggagcacttctatgaatgacagtgagatttagggaaccacggggatggttcagtagcccagagctaggaacagtaagatggctgttgctgtttaggcactaaactgtgtccaactctttgtaaacccatggactgtagtctgtcaggctcctctgtccatggaattctccaggcaagaatactggagtgggttgcatttcctactccaggggatcttcccagcccagggattgaaccaccatctcctgcattggcaggcagatgaccactgagccaccagggaagtccagtagaatggttaccactcctaaacctggaggggaagggaagggagtagttgttggaaccttgtaaaacatcatgtaaaagaggctgtttagagaggaatagtattttcagtccaaggacagaatcagtccagt

SEQ ID NO: 34815 - DNA, 1089 bp, Bovine  19866881501397
  misc_feature (1)..(1): n is a, c, g, or t
ncagatgtttcttatgtataagaagatacacacatgcatgcatatgcacaatcctattgacaataactattttattaagataatgtgcatgtacgtttgtgctcagtcgctcagtcatgtctgactctttagtgaccctgtgggctgtagcccgccaggctcctctgtccatgggattctctaggcaaaaatactggagtgggttgccatttcctcctccaggggatcttcccaacccagtgatgaaacctgtgtctcctacactggcaggtgaatctttaccactgagctacctgggaagcccattttactaagagggactctagaaagggactgaaggggttctttacttttccctttcaaccttccacattcatttcttacttttcttttaaagtaatggtagtgggtcttatttaagtggtaaacttttcattgttaactttataggaacatatttctatatattttaatcatatatgcattattatacacttacaaaaggaaaatacctgcctatatactcatgcattacaaaccaaactatattgaaattatcagcttgtttatcttatgctttgacaacggaatcacctagcacagccccggaatttatcagattacccaggaaatatgtactattattgaactgaggaaacaagatgtccattattttttttacaggtcaactctcaatatcatttttgccaagcaagcttcttatttcttcatattctttatctaccatttcaaacagaaagacctttattcaatgattcattcagccacctgacaagcgtttttcatgctcttcaagaaggagagaaaagaccaataagtcgtctaagtcagttgctttctcctacacttgatcttctgggttatgttctcctttgggagaaaggactttatgggaaaagattttgtgtcaccataaaagtgatccagcacccaggcaagacagcacagtgacctgaggccggcactgcaaatgctgactcatgtttcatctggggacagccagtagttctcctgagatgaaagatgaatacttcagatttatttgtggaaaataaccatacagacccc

SEQ ID NO: 34816 - DNA, 886 bp, Bovine  19866881538242
  misc_feature (1)..(1): n is a, c, g, or t
nccgcggaataattaacccccaaatgagcaggaacatctctgtcttaaaacatttcaggggtgggggagggggaaggtggcattcacgaagcaaaaaagaggaagaacagacaaagagagagcttcccccacccgcatccatcctaaacagcgcaccttttcagggcatctggcaacctcatgcaaattcaaacccatgcacaaatgcaaagaataattgcccgttaaagcagttgtatatttttatggttttgatgcagagtctgcccccccccgtcgggttttgcatctgctgttcttccatctctcccagagctctaaaactttaatatgcagtttataaccctcaagtattttccatgggttttgttgtgttccttctcttgggatttccgggcttgctgagatgatctcatttgtgtttattttcgaaggtaagcaccacattcgtaaaagagacagagggaagggctcacgcattcgtagctgtaaatacattgaactcgaagctgctcggaggtgggaggtgggggcgtctgtcttgcgggggagacaggcaataagcagttgacactttggtaaatggcccatttgtctggttgatacacccacacatcttccctttaaaaatgttgatttgccttgatacttgagcacatcacagcatgcctctggttacatccctgaagtttccgtttcattgagttcagcggtggagaactccttattcctaagagctgagacggttgctctgctaacctcgtccctctctgctctggatataaatctagctgaaggttgggagtgggtgggctgcggatgtcgaggtgtcaacaagatgtgcaattggcatttgctccagaagctcaggccctgttttcttgga

SEQ ID NO: 34817 - DNA, 770 bp, Bovine  19866880805830
  misc_feature (1)..(1): n is a, c, g, or t
ncaagctcacttgtctttggatcaaggtgttaatggcagttttgttgctatgagttgttttccaaatctttatcaataaacttgatcagtgacctgcaaaattcattaagaaaaatgctttcactcacttttattttgcttaaccatattgttgtttatatttcactattcccaccagcccttttatacaggtatttaaaaagagatgatttatagactgattagaaaatatataatattttcccagtattgagttttgggattcttaactaggatgatttacctctagctatacaatcggtcaaagaaaaagacataacaaaaatgtgtagctgaagaacattacagtacattgcagcatagtgtctcaacactcctcccaggaaattccctggagatggtccacggggttagggcatgggcttgattcctggtcagggaaataagatctgtataccagggatatagcatgaccaggaaaacaacaaaacaaacaaaaactgcattccaagaccacatcatctaaattattactgcaataatttaccctacatccttgcatttttagccaaataacaaacagaaaagacaacatttatgatctccattgcacaacagaaaagatgcatttttctaatttcataagaactttgatggtcagcaaaaacatatacctaggacttagaattatctcctaaatactattcactggctttttttcccccaaatgaattgtgaattttaatagaacacagactaggatttaaata

SEQ ID NO: 34818 - DNA, 755 bp, Bovine  19866881068154
  misc_feature (1)..(1): n is a, c, g, or t
naataactcccttagatagctcttcacagatgtaacactcttaaccctaaaagtcccgagaattgttaactatgctccccagggattatatcctttctcctcccccaaggaatctcattctgacatcaaaacaagcaagcaaacaaaactcaaataacttaaccctagctaggttccacaccatacggcacgtaggatgcaggacgcaggatcttttctccctgattagggattgaagtcgtgcctctgcaccgggagtcaggagtcttaaccactggaccaccagagaagtccccgtgattgccttttaatgtcctactgacaattcatatttttctttcagtagttaaatataaaactgaaactaagggaaattactttttcaatatatacagatcatacttggttaagcaacatatatcatgctcagggtataaacattcaagattaacagaactgctttgaaaatgtaaattcatatgacaatgagttgctttctacttttcatttaaatttttaaataagctaccttatattatttattctccaaaagatggtgatgaaaggtcagtctatgttctgctttagagatcttaacagtacatgttttcttttctccttgccttcccatttctcttcctttttcttcttccattaatatacacattttctgatgataatataatttatgaagtagtgaattatgcctagttgctagttactttctggccatagaagttgtatgaatatttttt

SEQ ID NO: 34819 - DNA, 1473 bp, Bovine  19866881076210
  misc_feature (1)..(1): n is a, c, g, or t
naatatgaaaaaggcaaaggtatgattttttaatagaaagaaaagtaaattttgagcagagacactacatgcaaaccaaatgaaaaagaaaggggtaaagttaaagtactttgagaaagagtaaatgaaatataccaaaaggtaaataaagcatgttcaagggctctgcgtatcatctagaaataaatatggttttagttagaataaaagtcattgcagagaagagtctaaaactaatcaaagccaagaaaaaagaaatgcacaggataaaacatgaggtatagagaagcaccatgatgatggaatgaagtcaaaagtgtaaaaaaaaatatgataagaaaattaagggtagaaaatgaaaggaagattgcatgagagtttgagataaatcagaatcctttcaagtagagaagtaagaaggggtcagggctggagataatgggacctccgtgaaatggaaagtgtaatttattcactgaagtggtggatattgctatcaattttaatgacttctttgcatcagctttcagactagagaattgagaaaagatattagcaaagagacatatatttgcatatctcagggaaggagaatgaaataaatatcaagctaggggaattattaagttattaaactatttaatttctggcaaactacagaaaaaattgaaaatcaactggattttagaaagcagtattaataaataagaagacctttatcaggtaccttttaaaaacactatagcatttaaggacttaaaaaaaatagccaagctttctagactcacttatttttatagccacagtctgaaataattcttaaaaacataatactccagcagctatgtatatacatttagtcaatcacagaaagcttgattaactttctcagagaatgttggtttgaatacacacacgatgcacacatacaaacacacttgcattcattttaactctgttttactctgccaggggaaagaagaattttctcctccaggaagtcttttcacctcgacagagtataagaactcatggaagtgcttggaggcagtcattcatatacccaccactgtgtgaatgatgaaaacacacacagagacaagtgatggagtatagagcatgctgtagccatcaccgcctcatgctgcctaacagcttgaagaaaccaaaagcctcacgtcaaattatcctagccagaacctcacacttaccatctcctgatagggaatacagataaaaatcatcttttccccatcttaagcagtgtagagcaaagtgatttattaatgggcatgaaatccaaacaccatctgtgtcaaccaaaacaacgttctagttatgatttctgttaaaattttgcctgatttgatctcagaaaatcatctgtgaaaaatcacctctgaaggtctcatcaaaggctgaagttggaattgatctctgcactaatgagtttgacttcacaggagaacatca

SEQ ID NO: 34820 - DNA, 1411 bp, Bovine  19866881104134
  misc_feature (1)..(1): n is a, c, g, or t
ntgtgatttgtgttctttacattacattatagtgccctattcttctgcctcatacttaaaatcttgtaagttttgtctataatgaaaaatgggttttctttatagattcagattaatgcttcattaaaaaaaaaacataaggcaatccaaaatatcaactatgtagtgtaagtcaattccatgttcttgtaaagtctattgttatattgaagtccatttccccatacttaaaaaacagttctaggggtcaggggtagcaaccagccagaaactaaccattcctttgtcttttaaatccttgaatattcttctatatttcttactccagctatgttctaagtcagcttctctttaccactaaaatattgcccacatagaatgatatcttagttctgtttaaattctcatgagtattttttttccttgaactgactctgtaaaatgttcacacagagcagacatgcctactgttccaagggatcattcaaaaagccagcagactgtaaactgaatggactcttatcttagaaggatgaaggacagagcaggcctgctgggatttgaagagttggttccagggagtctagatatttcaaaccagacgcttacacaacccatttctctctggccttatgactgaatgcactaattcatttaccattcaaagcgcccttctataatttatgccacatactgacatgtatttaactctctaaaatgccttgaatataatttgtttgaaagatattatacacaataaactataatgcattttaagaggcaccttggaataaaaataaatataaattgaagaaaaatgcttattaataagcatttatatggcacttcatgtttacagatggttttacagtcagtttttattactttaatgtgccaagtctctttgggatcaaagtgctacttaagtacatctccggattttattcccctggagtctagacttgtggggtcaaacgttgtaaagacagtctttctggaaaagttgtatcctaaagctattaaagaaattttaatgtgatgaatgagagtacattcaagacatggttttcactgaaatgcctggttttgaggaaatcagaagaataaatttgtatgacctgtaataactttatgcaactgaagttaacataagggctgtggtagctcacctgacttcttaccggtatttgtagaactagatcttatagaccagcatccatgggctctatgaagtgtttcctttgttcgagtacgaaagcacacctaaagagctgtgtcttttttatttccatgtcaggaatcctcctggaaattgccactgttccagaagtgatgcagattccagactgatggcctatattttcggtcttatggttcaactaatgtgtcactccttcttctaagatgtcag

SEQ ID NO: 34821 - DNA, 1071 bp, Bovine  19866881281233
  misc_feature (1)..(1): n is a, c, g, or t
naaatactttctggaaatgtgatggttatttttaacgaacaatttggttttgagcatcagaataaacacttctgtttcttcatcaaaatgacataaaatgccttctatatgtgcttgagctgctttagataatttctctctgaactgacaatttttaaaactacatttcccaaatgttttaaggtaaatactattatttacttttttacatcactgtggtagaacatgtatctaagtaatactgctttatctatgacacgtctttgataattcatccagtttgacaagcttaagctctttagttagcatcaacactgatacaaaaggagacttgaacaccatgtaccattgaagcaaaacaacatacaatcattgtattgttagaaaaataaagctttttaatggacaaaaatagctggtggagtggagtggtatctttgcttcaatcattgattttctcccaaaatatccagaattaacttaaatattctttgtccaatgactttaacctataatgaaaaacaggactcatgtctgtggtataatttttagagtgacattgagaaggattatggtaatacacatatgataaaattgtcgacaatgactgagtcctataattgtgaactaaattcaaggaggctgccttcatgatgataactaacagcgttttcattttgattagcttaccttttcaagtattctgctaggaacctctataacacaaatagaagcaagaactttattatcatcactatagcaactgcagggaaatttatctcaaaacagttggctacctgaaaattttttcaggacagaaagaagagcagatgatccataatattttaattcatttttaaatattgttctgtggtctaaactaaagcacttttacaagaacaagatagtccagtaactttgtaatttttttttaagcaataagagcacatgtatctgtataagtgtatgaatttttctttatgaattaatgtttagcatctcttttgcatttttgaaagtagattacaaaactcctttgttaagaatagttttatatgaatcattcaaatt

SEQ ID NO: 34822 - DNA, 876 bp, Bovine  19866881288792
  misc_feature (1)..(1): n is a, c, g, or t
nctgtcttgacttaattttaatactaatcaattataattgataagtataaaaaatcccatgctgtagataaactggaaaatttcatgaactatcacttgatttttgaaacaatgaataagtgaataaattccatcaagatttgggcattattctggacagtcacaaatgacgcctttcttataatttttgatggctcatttccactaaggggtcagctaaaagatactaacatcttgtatctttttgcacagtgtgtagtataagtttttattttcaagagagaatacactgtatctaggactattcattgtagtcattcattttggaaagttgtggatatgcattttgtcatgaaatatattcatatattgcatcaaactaactgattctaaaaaaattacagtcctcactcatgattcttaattgatttagctcagcataatcaatattgatcaggtataggaaatatgcaaaaatgtttctaggtagagttgtcaatattctatcatctccttcaccttttcatgagtcccaaaataaagaaaaattgttagtataaaaattgtggtactatataaattaacctctttgtacccacttatttagatgtccctatcaattctcagctcaaacaaatgaaagaagttgaacatttaaatcatactttaattttaattttgaacttttagatccagatttctttttaaagactaaactgctttaaaatagtcattaaaatatcatttttctttttaccaactatttctaggttttgaaagagtctaataaaacctcatagattaattagtcatgacctgaagtcataatttaaaatattagaatattatgtaatgtattattacatcaaaaacaca

SEQ ID NO: 34823 - DNA, 1728 bp, Bovine  19866880442958
  misc_feature (1)..(1): n is a, c, g, or t
ntctataagggaaagaatctgagaaagaatagacatatatatgtctaactgaaccactttgatatacccttgaaactaatgcagtattttaaaccagttatacttcaattagaaaaaaaataacatttctgaaagcaaagatgatgtttcaaataagctgttttctttaggacatgggtcagcaaactacaacctgtgagccacatccagctaccatttctatttatacagtctatgagttaaaaatggattttacacttttaagtagttggaaaaaattacaagataatattggtgatgggtaaaaattacatgacattaaaattccatgtctacctgtaaagtttgttggaaaacagtcatagggatgcttttttgattccccaacatttatctagagggcgtttgtggttcctgcaaataaaatcattgccacagtcaaaaaaaaatgaaataaaataaaaggtttattttctttttggctgtgttgggtctttgtggctgcatgcaggttcttctctggttacggtgagcaggggctgctctgtagttggggtgggcacacttctcattgaggtggcttctcttgtggagcaccagctctaagttagcatgagggcttcagtagctgtggctcagaggtttagttgctctgtgacacgtgggatcttcctggatcgggaatcgagccctgcattggacctcttgtctcctgcattggcaggcggattctttcccacggagccaccagggaagccccccacacgcactctttcacaaactgcctgtggctgctttcacagaacaaggatagagttcagtggttggaaccagaaactctatgccccccaaagctgaaaatatgtactatctggccttttacagaaaatattttccaatgttcctttaggtctgcagcattattttttcttatgtatgtgtctcatttttttcccctccaaatgtttctctataatctctgttacttctttctttcttcaacacttctccaaagattacacggcaaattagcaaagcccactttaatactgaattgtactttcctacttgccaagtttctgaaggtaaaatgtattttagggaaaataaagaacaataatttttacttcagtctaaaattaatttgggtcacaatattaacacaaggctaatgaatttcagaaggaagggaatttttttttttaatgagtgaaacaatatagctctgaatacttctagttttatctttttctggagaaacagatttaattttatggtaggaaccagaggaatcccttcacatttggggtccattgaaacaaacaaaaaaacattaactctttccgggccagaattagtcagaggctgaacagctgctaaagcacccctgaaaaattctatttctcaactcagggatgcagggaagggctttgtgcttttaggtgaattccctgactatctggtgattgcttgtaaggtgacagggtcccctttagcatcaaaagagaggaagtgagcaggaatcctggtggcctctttccaaagtggactgccgtgttgagagagctgtctggggcagtgggatgggaccatgttgatggttggcttatggagccagagcttggaagtgaggtgactgcctgagagttagcctattaaatagatggctccaagtgtgttcccaggaacttccctggtggtctagtggggtaagactctgtgcttcca

SEQ ID NO: 34824 - DNA, 1496 bp, Bovine  19866880473944
  misc_feature (1)..(1): n is a, c, g, or t
ntggctccatttgttttcctgcccagggttttttcctcctcctgatgtctgttagggaagcccacttgtggcattgttctagctcaccgggtatggatgattttgtacccggatccagtctcgtgaaccatgctgttagagttctccggagaaacagaaccgatagtgtgtgtgtgtgtgtttctgcatgtgtatgtacgtatgtattcatctccggagatttaccttaagaaaattggctcatgtgatggtggaacttgacgtctaaaatctgcaaggtaggcctgcaaactggaggcccagggaaggactgcagttcgaatctgaagacagtctgctgacagaatttcttctttggggggagaacgtctgtgtttttctactgaggcctttaactgatgagctgaggcccccctggcttatggagggtgatcggctttacttgcactctcctgacttacattttaatctcatctaaccaaatgcctccccagagacatcaagaataacatttggtcaagtatccgggtaccgtggcctagccaagatgacacataaagttaaccgtcacacctgcctgtggttctttccctgggccttttaggaaatgctgtttgcattttctgtcactctgggcaagcgcatctccgagttgcttcactccatgagtcagtttgtggcctcagacagttgttgctcttgctgctggaccagcgccagtgaggggaggccagctttcgagccggggcagccggcggcattgtgatgtgtgagccacagaacagtgcagcctgacctttacaggctcggccctccgaggccgctgggcctcctgtggactatggacagctgctccctggcataaagaggggatctcgagccaacatcctgcagagcatcttggggaaagagcagtgatgagatggcctactgagtaatgctttgattttgcttctaagctaggttcatgtgaaaggtttaggaacctggaggggccgggactttagagtttaatagcgcagccaggtttgtgggagggaaggggccaggtcgggagaagcacgtgctgggtggcagcggcctctggcaaagtcagatgctctgattgtttttcgttaatagatgcgctgttggccaaatactgggtttacacctacacgtgctggcaattaaaccacttcttggatgactgagcaaagatcttgtgcctcctgcctcagtatttagaagtggttcagttcagttcagtcgctcagtcgtgttcgactctttgcaactccatgaatcgcaacacgccaggcttccttgtccatcaccaactcacgaagcttgcacaaactcatgtccatcgagtcagtgatgccatccaaccatctcatgttctctcgacctcttctcctcctgccttcaatctttcccagcatcagggtcttttccaaggagtcagttatttgcatcaggtagccaaagtattggagcttcagcttcacatcagt

SEQ ID NO: 34825 - DNA, 2810 bp, Bovine  19866880486590
  misc_feature (1)..(1): n is a, c, g, or t
ncccgggcacctccctttccgtggctccccactgttaaggacaccccctagatgctcctggggggtggatccacgtgggacagccctgccccttactccacacggagcctgaacctgacagcacagtgcttcctgcacccctccaccccagaccacacaaactcctccccaggaggcagcttcatgaagccacttcccacctcaagagggaaagcaaatataaaacagacccaaaatagtgcgggtctgaaaagctgaaaaccagccaccataattacaagtatttttatcccttgcccaaaaaggagtagcagatcattttccaagtgtctctctaaggagcttcatctgttccatctcaagtgctgcgggctccagagacgccaccagaaaggaggctgtagcaggaaaggagccaaagagaaatcccagggtggagacaccaagcgaaaacagggcctatggtatcatcatccatggagggcgggggccacaccatgagatggagaaaagaagtccaaagatccacgagagggaccaggagatgatggaccaggagatgggcagggacgtgagagagctaacaaggctgggatgtgggcgtgtctgcacaggagcccggctgtccccactcaacacccctggccaactgcattgagtgatgaagggccaggggacctgcaagaaataaagaggtcccactcggcgagaagggcatgctgccccaagtggaaccttcccctctgctaccctggagggtcgcctgagcacaggaacggttggggacatatgatgagcaaaagaggcatcagaagaggccctctaagccagcacttgggctttcagcagtgactataacagccacaatttcttcctattatccctcctcatcccttcattaagtccctcaggcttgacaagctcagagctagcatgctgggaaacgctttcatagccatcatcccccttagagtgaaaagttgaaccagccagctaggaaggcctggttcctgcttctagccaacatgatacaaagagcactaactctggagtcagacagccaaggccataacctcattcaatatgtgaagcctggtgactgtgggcaggtggcttgtcatctccatgcctcagtttcctcatctgtaaagacacagctgtagttttccagtagtcatgtacagatgtgaaagttggaccataaaggaggctgagcatgaagaattgacactttcaatctgtggtgttgggagaagactctcgagagtcccttggactgcaaagagatgcaagccatcaatactaaaggaaataaccctgaatattcattggaaggactgaagctgaagctccaagactttggccacctgatgcaaaaagctgactcgctggaaaagaccctgatgctgggaaaggttgagggcgggaagagaagggggtgacagaagatgagatggttggatggcatcactgactcaatggacatgatttgagcaaactctgggagacagtgagggacagagaagcctggaatgctgcagtccatggggtcacaaagagttggacacgactgagcaactgaacagcaacaaaatatgatcacatatttcacatcatgatatgacagaaaaaaatatgcctaagaaaaatattaatatatctgctggaaaatagtattacaaaatgttttaaatgggtgtattcaaaggtacatctctctgctatttgcccttatatacctaccattcccacctcagcatgaaaataatcatggtcccaggaggaggaaaattaggaataccagctaacttacagccagtatcactgggacatagaaaaaattcattcctgccatgcacccaagttgtgtgcaaatgggtgtcaacctgacatatgtgactacgtgtttgtctctaccacatgaccctgagtggtattccagacctgagactgcatttccccagaaatacttgccttgatctcctacagaaacatcaacttgtatataagcatcatcatgaccttaaggagagcatgaattcaaaacacaatgagaattaggtcttcaatgaacaaacaatgaagtgtactgcaaatggaaattgtttataggcaaaaaaacaagtctacatttttcaactggtattatcttatgtaattaactggctgaaaaatattttaggatatagtaaatataatatgatatctcttttaagagacttttaaatatgaaaaataaagcaatgacatccagtagcaatacgtacaccaaaaatccaaatgtcgattgctaagtatcattcttcagtaaaaagaatcagggctccttggagaggtagctgataacacagctggggcaggaaaaatataagatgagccaagagcatcttgtggtgccagaaagaaaagaagtgcttaaaaagggggaggcatgattttctggacacagaaaccaatctgaaagaaaaaaaaaaaggtaccaatgctcaaaactggaaaaatcggaccaaaaacataaacaacagtagtaacccaaataataaaataagtatccttgagtccatattgatagagaagatggagagacagatggttgggtggatggatgcaaatcataaatccgacacaggcctaggctacaggatccataaagatttcttacatttcaacaataaaaagtcaaataacccatatttaaatgggcaaaggatttcattagacatttctcatacaaaaggccaataagtacatgaaaagacactcgatgtcattactcattagggaagtacagataacattacagtaagaca

SEQ ID NO: 34826 - DNA, 983 bp, Bovine  19866880658872
  misc_feature (1)..(1): n is a, c, g, or t
ntggcttattctttgcctgatgccaagcatgccaaagcgttccatcttgctatattgcctagttccacccattcatcacggaatcagagatctgcagtggggaaagaatcttgacagtcatttggccagggctacttgtatctggacctcggcccagcccttcacatctaatttaagatggtgtgtctgtgtgtgtgtgtgtgtgtacattagttgctcagtcatatctgactctttgcaacctcatggactgtaacccgccaggctcctctgtccatgggattcttcaggcaagaatactggagtgggttgtcattcccttctccaggggatcttcccaacccagggatcgaacccgggtctcctgcattgcaggcggattctttaccacctgaaccaccagggaagcccctaaattaaggtgaggggctaccaaaccagatgaaatagaatcttccaggtctcgcgggaaaacgcaattccacatgtcagcagttctgctgttcacttgcatagtgtccccactcctaatcaccacgccactggtccctataaccctccagcctttcacagccgtatctgcagaaacccagtcttctctaccttgaagtgaagacttttccacctaagtggattatcctgcagttacctgtagcaaacatcatctttgtgcacggaccctctttttccatttgtcagaatcacttccaaattcaatttcattttcatattcagtcactctggtcccaataggaatggtccccaaacttcaaatataagttgcctgggaacactttcaactttgaaaataaagtgtggccactgtgcaatgggtgtgcagaggtgaacttgggagacgacattaaacaggagggaaggaagagctttctgcttctagtgatgaaaggttgctttatctataaattccataagatcaacactgcaagttcacacgttcttatataaaatgctttgggccagag

SEQ ID NO: 34827 - DNA, 2483 bp, Bovine  19866880728840
  misc_feature (1)..(1): n is a, c, g, or t
naggaccaagtgctgtccatctttctgttctgccatcctcactcttaagctgtcattctcaaggaccaaaattgatgctgaagctccggctatcacatctgaattttagacaataggaaacagacaaaaatggcaaagcaggcagcacccagatgaattatctccctttagcagccctcctggaaaaggcaatggcaccccactccagcactcttgcctgggaaatcccatggacggaggagcctggtaggctgcagtccatggggttgctaggagtcggacaagactgagcaacttcactttcacttttcactttcatgcattagagaaggaaatggcaacccactccagtgttcttgcctggagaatcccagggacggggaagcctggtgggctgccgtctatggggtcgcacagagtcagacacaactgaagcgacttagcagcagcagcagcagcagccctcctgggaggccacccccaacatgtctacctatatctcactgatcagtgcttagtcacagagtcatatgcaggtgcacgggatgctgagaaatttcgtgttctccccttgggcacattgcccccactgctaaaagataagcaaaatggatatttggggcaagcaactagcagattctgctacattcctatatacccagctgctacatcttgatggaagaccagcagacagaaagaatctaaagacatcatctctgctctctaagtacccacaatctgattgaagactaagacaaatgcagttgagataaatggcactatccagcaggactgaaatggactacacgtcatggtgcagtcttggcagggtaagttttatgccgaaaagaaggcagttagctattgagcacttactgtatactgggtgctatgctggtcactttatgtatttttacatcttagtgttcacagcgaccactgaaaggaattattattatttcagttttgcagaagaaacctggaagggttatgtttaatgtgtccagggccacacagccaatgaggatttagaacaggatggcagatttgccaaggcgagggttgcttgcctgctctagtccattagtggtagctgcctggggaaggcagtggctctgtggaggaggattccaagaatgggtctgagctcattgagaaaggccgtgattgattagctatgtctgccatggacacggtaatggggagtggtggcacgagtgacatgcatttcacagtcctgctttcgagacttctggtggtcagtttacctatggaaatgctgcgctggcactcggatgtctacatgtgcacagagggtgggagcggggcacacactgccattaagtgagatggtctcaggtgtgctgccaagaatcccttctggctcccctgctttcagaaagtgggagctctgagactttctaagatgaagaccacctctaagcctccagaatctgaagctgtggttaggaagctaatgtgtcctttaggggaatgtggcgtggaggaatgaaggtgcacatctcagagttttagcggctgctgccgaataaataaaaatagctgtaagtacttctgcagctcttctattcaaggagaaaagtggctaccctgtgggtaacagatggactttctcccttgcttgtggaaggtaagcactcagtttaaaatcacaggtaaaagccctgtcattcccccggcactgggtctccaactgaccgcttagcacagagcaaatcacgtctctcaccaggcgaaggagccatccagtgtggccgagtctgcctcctgtgtgtctcaggtttgttcccccttcttcactcttaagctcagtccttcgtctactcttgctaggatccccaaggggccccaatccatgccacctttccctctgccacaatgactggcctggatcactcccctttatgtgtcactgctgtctctgaaacacttggcaggttccctatctccttctgggcactgcctgagctcccagcacagcagacaagggcctgcttccccagcctgcactggacatgggctgctctaggccagccagtaagatcgtgccctgattctctagctgctctgtaaggcatctatgacccaggcctaagccagtcagctcattccctcactcccctggccacagacaatggttcaagaaagagcacatgaccccctaggatgcagtgaggcttttgttgggatgaacgggcaagcgattcttactcctctctcactggctaacagttgatcgtattagagctgctacagctgacttgacccatgagaagagagtccgtctgagaatgtgtccccagagaataaagcagggagctgtcgagagcaggtggacctcgtgtgaggccctgatcaacctgtgcctgaagctggagtaccccagaactggtcagttacagggagtagtaagttcccttcctgtttagcccattgggtgacttttctgtcacttcccgggg

SEQ ID NO: 34828 - DNA, 1186 bp, Bovine  19866880730580
  misc_feature (1)..(1): n is a, c, g, or t
ntaaaattaattaaaaaaacaaatgtaagattatgaaaataacattaaagtaagaatatgcctagaaatgtacttggaaaagatacacaagaaactgacagttatctctggtaagaaaactgtcatggggcagggggtgaggtgggggaagaggactaatttacccattacttacactcatacaggacttgatcccctccctcatatgaacatactaccttaaaaactgaacatataacaaattgcttgtatgttaattacacatacactacactgcctgtgcagacatacacacttgtatagatttctaatcagaaagtcattagaactgaacaaaactagatgcctttatacagatgctggacaagctcaaacaagagtccagatgtaggtttggcaagtatctggcatcatttttctacccaggggtggcacccagagccatttatcagagcagtgtgggaccaggcttttctcatctgtggagaaggaagcctttgccctaaaaaatgagaaggttggattctcttctgtattcttcttaactgtccctgatatcagacacccatgtgtgtcttggcttcagccgttagcaagtccttctcaaagaggttttctgtgtctgtgtgttcagtgctctctcccagggatctgtgtttaggctaaagaacctccttcttctctaatttctgacattaacttgggttttcaattttatgcaggtctaccgaagctcagtttacagctcaacacgatcaaacaaaattactggttgttattaggataaaactcccatgcctggtccatttattccacaattaaattctctggtgcatggtagattaaaagtaaacatcagaatgtacgtgggatagctatttgtggaatactgccataatatctcagaggaaatggtaaaaacccgtggaaggatgagatgaactcttggtcatgtagcttttcttaggatttcaatgcattacaatttattgtttattgagaacccgagtggttacttcatttccaagaacccaggtgtacacgtcactgacatttttccccctagactagggttccacctcctaaagggaaaataatcaccatgcatcatgtaaagtttatctcaaccagaagtgtaggcagacactgcagaaatttttgtgcttacctgccaagcacaaaacat

SEQ ID NO: 34829 - DNA, 1373 bp, Bovine  19866880746559
  misc_feature (1)..(1): n is a, c, g, or t
naccctgcagcagaaggacacagctaggttgcacccagatttctgatgggaaatgggagataatgtgacttagctgcctcaaactgccaagttcctggggtaacttgttaacatacatcaggacttccctggtggtccagtggttaagaatctacctgccaaggcaggggatccctggtctgggaagataccacatgccacagagcaactaagcccgtttgccacagctactgagcctgtgctgtagagtctgggaaccggaactactgagcccacgtgctgcaacccctgaagcctgtgcaccctagggctctgcaacaagagaagccaccacaatgagaagtctgcgcaccacaacagagagaagcacccatatgccgtatctagagaaggcccgagagcagcgacaaagacccagtgcagccaataagaaaaataataaaattcattttaaaaatatctgttacacagatcagatgtagaggtccaggaaggagtcagcaacacttcttcacaagttgaaggttggtgtcctgaaaaaaactgagattttgacttgtgttttaaagttcattgttggcactgttcattcattctacttaaatggtaacctttttgtgctgatgaatgcttttcactgcttttcctgtttctgaagcagtttgcaaagtggtttaaactggataaattaaacagggagggggatgatcctcatctgaaggttggggcataaatcaatctgctacaacaaataaaatttataaacagttttctacagtaacattttaacaaacatagttttctatgacaaatagtcatagtcctggaaagtcagtagtctttggaggtattaaatttttcattgttactcgtttacttagtaaaagcttagaatctcaaatttatgatgacaaggtgtgaaataaacagatttgatctaaaataaaggaaagctcacatgtcactgttccatctaccttatccttctcataaaggcaatccgttgattcagggctctgcgttctcaaaagcacctggagcctcttaaagttcctgccacagaagtctgtgtggtctttggtctcgattttaatcaaggctgaattaaagatacttgaggctggtaatgtctctgcttttgaatatgctatctaggttggtcataactttccttccaaggagtaagcgtcttctaatttcatggctgcagtcaccatctgcagtgattttggagcccagaaaaataaagtctgacactgtttccactgtttccccatctatttcccatgaagtgatgggaccggatgccatgatctttgtcttctgaatgctgagctttaagccgactttttcactctcctctttcaccttca

SEQ ID NO: 34830 - DNA, 1657 bp, Bovine  19866880752334
  misc_feature (1)..(1): n is a, c, g, or t
ncactgatctcgctcgcaggcaacaagagcaatgatgtcagggggtgggacaccaactttcacatcagacacctaggatctttcctgcccgtcaatgctggaacacagggaggttgtgagaccctcttcacagtcacaggaggtggggagagggcacccaaacaaacactgaatcaaccaggccaaccaaccgagcagtcagcccatgaatggaccgtggtgcttcctcagtgggtcaggcagttacttcctcctgaccccctttcaagcttgagcttccgatgagcatgtcagccccctagatcgccgccccaggcccagagtccaaaggaatccggggacacgaatgctggtctctacacttggcgggtctgtcgacatctgtacaagtggacaccttatcctggtttccctgaagggacagaagctcccaagccctttccccctggccagaacccttcacccttcctagctcagtgactcttcattcattcagcaaccagagatgtccctgtcccaggagaattttaaatactttcattctaggactatttagctaaagtcaccacttggcaacaaacagtcagtgagaatagagatcgaagagagcctctgccacccagagactcagaattcgccagctcctgagagtaaggggcttgttcctctctccacttgggctttctaccaacagccaattctggtctcatgaccccacagaatgagggtccacagatgggcgtggtggtggcagagaccctccgggtgttagaggaaccactgaccgaaaccacccaccctggccaggtgccatagtaactcacctgcatgagttatcttaagcaggaggtcctgggaaggaacatggaactaacaagctaccaccaaccagaagaattcaggaaagatcaaaaggaaagagaagacaccagcccacaagtcccaccaacctcccagaaggcttcccactggaatccttcttggctaagtgatgcgcacgccaccaggaaggtcccagagtcggagagactggccagagacgacccagagactaaccgcatcatgtgattctagcagtccactgcatcgatattatcccatttctcagcacaatgttggatgtgatactctcttctgttttaaatattctccaaatccaagagtacaattgttttcttattcttcacattatatgtgttttctctcttaccacaggtttctcattaaatgatacctttcaaagaaccacgtcttagggttctatatcaattacaatgtggtttaaccattttacgatttgtttgttggtgggggaggtggtggggcagtggccactggttgttttgccaacatctgtctaacacactagggccgtgtctgaaaagtcctctaggcaaccaatgtcggagatacacatcaacgccatcagccttacctcgatgagctttctttcataggagcttgcgagttcctcggcaacttctccgggtttctgctcagggactgtaacttctccatcaatgttccaaagatttgggacaacttttgggaaaagaaagacttctgtaagtaacttaatcaactataatttcctcaattaaattttttttctgtagaatttttttcgaagaaaaaaattgtttttcttcttttccaa

SEQ ID NO: 34831 - DNA, 1006 bp, Bovine  19866880752395
  misc_feature (1)..(1): n is a, c, g, or t
ncccatatgacttaaggctttgggtgttcagagcctcagaccgtaggcactgacactgctcgtggggtcttagcagcagaggtctaatgaaggaataatggtctgcaccatgacgagcttcattccctccagatcaaaccagtcctaacggcaaccttgtaagaagtcctcctagcatgctgtcagatgatggcagattaaaacactgtgtctttatttacaggagacggtggtgtgtcagagcatttgactgaaaagaccatgtttccaaataaacttggtagctagctagggctgacctaaagccagcaaagtaaacagcaaggaaaggcagaaaaggatccagtcgtttggacgaatcatgtaatcaaatgacttcccaggtggcgcaatggtaaagaatctgcctgccaatataggagacacaagagactctggttcgatccctgggtcaggtagatcccctggagtaggaaatggtgatctacactccaggattcttgcctggaaaattccatggatgaaggagctgtgcaggctacagtccatggggcctcaaagagctggacatgactgagcacagacacacatgtaatcaaataccctgtttcatcacagggctccctgctatttttctgtgtaagcttttggaatattctaagaggtggaaggtcaaagaaagagaaaacagagcccctttctaaacctcacatttccacttcctgcaggaaaaaaggacaagcaccactgcctggtccggcatagtgttgtgaggatgacggaaaccaagccaggacatcactctctaactgctccagcgaggtctgccaccggccctgtgatttatgaccttgtctgatcctctaaacaagccaggaacatagataccatctcctctggcttccagataaggaagcagacactcagtgacatctaggaccttgcccatggcaaaggtaatagctcgtaaatgacacttagttttaaatccaggtctgcctcgctc

SEQ ID NO: 34832 - DNA, 1115 bp, Bovine  19866880910761
  misc_feature (1)..(1): n is a, c, g, or t
ncactgctcatttgaaaatgacactaattgctattttaaaaacatgctgctaagtcgcttcagtcatgtccgactctgtgcaaccccatagatggcagcccgccaggctcccgtccctgggattctccaaggcaagaaacactggagtgggttgccatttccttctccaatgcatgaaagtgaaagtgaagtcactcagtcgtgtccgactcttaagtaccccatggactgcagtctaccaggctcctccgtctgtgggattttccaggcaagagtactggggtggggtgccattgccttctccgattttaaaacatgactccccccaaaaaaccagctataatattttgacttcataagcttaaacagacacagctgtttcccctgtacctgtggctccttttggaaatatcacagtggggttttccaacaagattttgaattttcagtttgaaggtgacctacagtgctctgttttgggtgcccagcattcctggcctgggtgcccagcacagggcccaagctatttgctgagtggacagatgctgacttaactttgggaatcagcagcacacacttacgcatgccagattcgcaatttataaatatttaccattaggatttgattttaactttaattagcccaactgttaaggatacctctgaagtgagaaatgtaatccattacttcgcaccagatgtagcttccgcagttggtcttttatctcggtttatggtgagggagacacagacatcaaatgactaaagcatgaggttttacggtgaactgatggaaacataaagcagaccaacctggaagatgaattcaagaccaaatgtaaattaaagaggctgaaaagtcctcaggctgatatgcccccggaaactgaattctacagatgctcaaaaaaaggactgcttgttgagttcttactctaaagtcagttaaaaaaagaaccattaagatagcttgtttttgttttagggcattaaaaacagaaagctctgtttgatgatggccgttgcctgtggatccctttcctggattcagaaaaatctgactatgagattacaccttctaaattggtgtgtttaccagcgcattaactggtgga

SEQ ID NO: 34833 - DNA, 1039 bp, Bovine  19866880928211
  misc_feature (1)..(1): n is a, c, g, or t
ngcaggacttagaaatcaagtgtaactgcacagcccgcgatatcaactatgtcttgctgcctcacttttatcttctctccgagaacctcggtcaaggccaacgaaattccatgactgtccgacccccagcccaggaacgcctctctcacaggagcccctggaagccccacgtgcgggaggtgcggttgctattgcgatccccagcccccggggtgcagcccccactggggtccggctggaggtgcacatcccaacctaacgttcccctcgccgaatgttccgcagccctgaaaccacccactccccagcaggaagtacctgaggaaaaggcgtccagggtcctgccccgcgctctgtggaaaacaccccccgcctctgcagccgacatggctagcgagtattttggcctcaactgagtctgctgcgtagcaaggagctatgagactcttaactgcccaagcgccgggtggggcctgcccggctgggggctgcgccctctgcttggggcggggcggggccggcgggcgcgcaggactcggtcgctcggggcgccactagtgctgtctgagcggggcggaagcgtgagcggcccctgtggaatcgactggggttcctggcgagtggaggccacttgccagtcgcttgcgtgggcagacggagtgaatttggcctcaggcatgtgggcagaccttcgctaaaggtgggggctccaggtttaacaactaaagctgagccccggtctcccgcattcctggcgggttctttaccctctgagccaccagagaatcccaagattgccaccagggaatcccaagattacaggacactcggttaaattggaatttcagataagcaatgaatgataagtatgtcgtatgtaatttgcaagatgctggtactaaaatgtttgtagttgtttatctgaaacagcaatttaaggggacttgtattgtatctggtccaaaggacccagccctgtccttgggggataagacagtaccttccaccagccacctgctgtgattgctgacatttcatt

SEQ ID NO: 34834 - DNA, 786 bp, Bovine  19866881041244
  misc_feature (1)..(1): n is a, c, g, or t
ntttctgttttaaatggtcagtatcttagtctgttcatgctgctatgacataagaccacagatcaggtagttcataaaaaaagcaaatttatttttcacagtctgggggctggaggtttgagatcaggatgccagcatagttgggtgaggacccttttttgggtcacagacctctcatagtgtccttacatgacagaaagggtgagggatctctgtagggtcttttttataagaatgctaatcccagtcatgatggctttaccttcatgacctaaccacctcccaagggtcccacctcctaataccatcatattaggcattaggatttcaaatgtatacattttagagggatataaacattcagaccatactgtgggaaaaaattaaaaggatgataatctttgagacatgagaaattcacatttcagtattcatatataaagttttattgggacacaaccacttatgtatttgtctctggttgctttcaggtgacaatggcagagttgagtaattgtgacagagatgttatggtctgcaaagcctaaaatatttgccatgtgtctctctgcaaaaaatgttgaccactgatctatgtgatctttggggctcatgacttgtacagtcagggcaagaagaatattcacagcatcttactttgaaatttattgcttccattatactttgagttgtggaaagctttacttaggcaagaatggtcagttaattaaacatttctagagttcttgagttggaggtttaaaatatgcaaaatctatcctgcca

SEQ ID NO: 34835 - DNA, 1003 bp, Bovine  19866881079271
  misc_feature (1)..(1): n is a, c, g, or t
nccccagaggctggagatgctaagggagcaatcttgttgctgcccatctaattgcccagggaaaccttggtgaaggaggaggccgcagctctgctaatgccttctgagtggtccctggggcttcacttcctccaggtgactcccatttaggccagccttaatgggtcccctgtcgagaagcccttgtgggggctgtgcagttaaaagtgcctcattcaaataatcaccatcagaaacaaacaaacaaaaaaatggcctctgggctgagaaggtgagctcaggctgtcagtttcaggcaagcctggaacaaggcagctgctcagcctcttctttcccaggctcttcttacctccctttccctgggggacaatgcacagtgcttagtagcaacccaggatcagatttcagaacaggcctctgatagcaggcgggagtgaggaacagtgaagaatctggagttttccccccagggaggctccagattaatacttgtggttcacttactgggtaccaggtgctttccaggtggctgagtgtgttggatgagcatcatggtggaggcctgctctcaggatactgatgtctggagcagggagacagaggctaagggaaccaatgagtaattgaagtgatttcagagagtgaagagaatgcgtccgtggatgtggcttggcctggagtgaaggccgtgaggaagagcaaaattaaagagtgattaagaaatgcttcttggacttctttagtagttcagtggttaagaatctgcctgccaatgcaggtgacaggggtttgatccctggtcgggaaggttccacatgccacagggcagctaagcccgtgcatcacgattactgagcctgtgctctagagcccacgctctgcaacgagagaagccaccacgcgagaagcgtgagcaccacatcaaagagtagccccctgcttgctgcaactagagaaagcctgagcgcagcaacgaagacccagcacagccaaaaataaagaa

SEQ ID NO: 34836 - DNA, 667 bp, Bovine  19866881100461
  misc_feature (1)..(1): n is a, c, g, or t
nctgactcattggacaagaccctgatgctgggaatgattgaaggcaagaggagaagagggcaacagaggataagatggttggatggcatcagtgactccatggacatgaatttgagcaagctctgggagatggtgaaagacagggaagtcttcagtttagtgacggaacaacatcagcccccacagtggaagcacagagtattaaccatcggaccgccagggaggtccagctgtgatactcaggagagtcctcactcatactgtctggaggggctgccagagtccctagcccttccttccccctcctccccaactcagaacttttgctggctaagttaccgacagctctctgcgttttgtttatcagaaagcaactctgtctcacagcatccttcatggcaaatttttttcgccatcagcatcctgctttttctgccgcttccgttgacgcaggtacattttacctctgtacccggcgaaactcagacctgagtacatcctgccttcccgacgtgactcacaggttccatttctgtgctgaaaacccagcttctccagggcaagctgtcagcctcctttacagcgacaagtccttcttaaaagtttctttctccttcacagaacctttaaaatacccgatccaacttctcgggtcatacagacagct

SEQ ID NO: 34837 - DNA, 1569 bp, Bovine  19866881128370
  misc_feature (1)..(1): n is a, c, g, or t
ncttccaattgcctcgtctttaaaatggagtgaacccaccagcctgctttcctcgcagggcacagcgagtgtggcgtttgcaggggtcagcgttggaggcttggctcggctccgagctggcctcggctcgtctgtctcctgtgactctcttgctgtgtctctgctcgggggacgttcggccctccagcagggttcccgaggcaggagagcggtggacgtgttatctgtttacttgtggtcagtcaggcccggccctctccaatttaatatctcttgccgcccaccgtggcgcctgtgtattcgtctgattaaagactaattttctagctcccaaggtggaacttggcataggttttcttcttgtctccagaggagtgggttttacacagatgcctcagaccataagctgtgaggagcccagaggcaagctttcagggtgccccccaccccggcccgctgcggcccaccatgaggatgaagatgaggaggggagggtgtcccggtgagggggcggctgtgcgggctggccggcttaactccctggtgtctgcagggcttagcacaggcccaccgtcacttccccccaggcctgttagacacaggccccgagcccctggaagacaggctggcagcctgggagagtaaacctgattaggaatagaaaagagcattttccccagggttttaataattggaacgtgtgcagggatgcctggaaagagatactgaagcatcgtccacagcacgctcgtcctcttgggatagtttgcctgggcggatggggagggggacatccacctccacccccatcctccccccacccccggatccccgcagtgacctttttctgcacttggagcaaaagcaaattcctgtcatggcctttaacacccgcgtggccttgatctctgtcccgccacacgacccttcgggatgccaggcagacccttccttctgtttggaagctctcctccccaccctctgcccagctgaggccccttactttatcacctccaatttcacctttttctgcctcagcttcacctggccacgccccatcacgagcttcccttacccttcccggcatccgtggtgaggatttcacccagctggtaggagcgctgagagggattcctgcgccccagctgctggggttctgcctcccctcctgcctgtggcatcaggagcagcctcggcaggtgaactggggcctgagccagaagggcgtgtgctgtgggctcaggctgagcctggttctctgtgtggccccccgccatgtgaccttgggggctcctctttcctctctgaggggcgccctgcaggtgggattagggagcctgcccgctgctccttctagtgtctgggctcttgccctgtgttcccatcaggaggcccgctgctggctctctctgttttccggccttccaccctccctccctcagctggttcttgaagggggtttagtgtctcccggggggagtcgatgcagcccaggagttggaactctcacctccaggagcacccagagaacaccatcatctttcctcactccgcctgcaggtacgagtt

SEQ ID NO: 34838 - DNA, 648 bp, Bovine  19866881128624
  misc_feature (1)..(1): n is a, c, g, or t
ngcgcacagggaaaaatctgcctgcagagatcccatccgacaggccaaatagtaccttggaacgtgaaaatgtgtatcggcagcttgctaaccaaatttcaaattaagtaccgcaggcccgggggacagattcgcagacagcgagctggaaacacaagagctgcagcctgggggccagccgtcccgagcaacgtctgccagcccgggccaatcggcaaagaggaagcaacagtttctgtaaaacatctccaaacgcactgaacaccaagaaaactgaagcgacaggaaagaaagagagggggtgggaggagagagagaggaaaggaaaagaaacaggtggaaagaaggaagggagagggaggaagacaggcagagagggagggaggaagaaagaaaaggagaggagagagagaggagaggagagaaggaagagacccagggagggtgggggagagacagcaaagacagagaagacgaggaggaagggaggaaaagaagagaggacgagagagagagagcaggcctgctttccgtcacctgcaagatctgatggggtaaactgctcagaagaatgaagaaaaaagacagcaggagagggagaggttctgagggaaataaagacaccgagccagagggacccaggcagac

SEQ ID NO: 34839 - DNA, 722 bp, Bovine  19866881232414
  misc_feature (1)..(1): n is a, c, g, or t
natcaggcctagggatttagcttcaacctccaaaattaagaatgtgttttctctctctgggcaactacggttaagcctgcagcccgacaccccctaaaatacatttcattccagggcttttagaattctttgaagaaacagtaaaagacagccacactttcaatgatttccatgtcaaaatctgcagaaaaaggaaaggactttacatccaattgttcttaatgctttaacagaacattccctgagaaacctcctcccagcagtttaaccttcaacgtgaaaggaaattgtctccatgattcaaactcgaggaaggcagaacagaactggaacgcatcagacaaatagccttctgtttttcttcgatttaaagctccacaatttgtcttcctgtcacaatgccttgccacataaaacatcatgaagaagctgctttcaccataaagatttggacgaaaggcaaaatatggggcattttcggcatgtgttacaacctgagatgagcccggccgagaagtttagacggggagcaagatggagcattcagacagttctggaagatgaaatgtccttcctggcagccaaaaatgaaggactcggcccctttttaaactgtcaacttcgttgactaaaagcagccatggcggggaccaaaaaaccctacagcgagagacagaacaagagacagttcttgcacgagtcacaattgcacaggacaaaaa

SEQ ID NO: 34840 - DNA, 1039 bp, Bovine  19866881245868
  misc_feature (1)..(1): n is a, c, g, or t
naggtgtctcgaagggttgagggacagaccaggtggcttccactccaagacggagtggggcgcgatctgatcaggattgtccctcccaggtgcccgggggctgcctggccctttcccgggccatgccctccaacccgaggctctcccgcccccgccacccccggctgggtggactcccggggcccaggcgaggaccaaggcagagctgggagggagcctgggcccggcgtaggcacccccgggagaggggctcgggatgaactaaagtcaaagaaacgcagggaaggtgaggcgatgacctggccccagaacgtctttccttgggacgctctcccaggaccctggacctgctacttggtccctcttcgccgaggccgccttccccgcgctccacaggagggccacaccgcggcgccgcctctgcgcgcccagatctggtgcagcgcaaggcctgggcgcccagactcggctgccctccggtacctgcagccctcgcgcatcgttctccgggagccggctggcccctgtccccaccgactcccaccaccaccaccccggatatcctcaccggagctgccgaacccggccttgcttcctcggctccaagtctcccgtcgtcagtgtttccaaatctgccctagctcacatcagccgattccagccagccgtcggccctctcccatttctcccacttcttcctctcctcggcttgaatttgactccaggagcccctaaaacaagaattgtaccaaagctgctacaccaaatttagatccccacacgcccctgcgttttgttttttaattgcattaactaagtatacactttgcagtcggctaggcgatttgccggcaaatgtttccaccacccctcttctccatttggctgcagtcaagggcttctcagggtatttccgaagaatcaaaaggttgggccacagagaaggtgacatactagggtgggggtctccttaattgaaaaatcatggggttttaatgggactgttttgcaaattttctcagcatgagagggggtttgg

SEQ ID NO: 34841 - DNA, 1994 bp, Bovine  19866881283261
  misc_feature (1)..(1): n is a, c, g, or t
naaacagtctccaatgcaggaggatcattctcactcacctccttgtgtgactatgccactcgaggttccacttccccagcctccatttcccaccgtgcactaaaatctccaagggctgggagttctttcccccttctcctgtacgtgattaatgagacttaaattggtgcagtgatagatgagttatcctaaaggcatcgaatatttaaaactgaatccctcctttgacaaaaatagtccgtgagtttcaagagctgctgtcctgctgtccctgttagcgagcacgtgatgtctacgggcgctgaatgaattcctgctaagcgctcaccaacgccaagggccgagatacgtttttctccttttgctgtccctatgaaggcaaagcgtgtgctttccatctttatcttaagtgaccagacttgtttacagctgctccaaataattatgtctgaccacatcgcgtcgagcacaccccagaccgtgcactcctctgattaagggtttctaaacggaattcttccctggaaacgagtctaaagtggatttcttcccttgaacaagctactgtcccagatatccatgtggtcctgggagaatttttgtaccacatcacgcttccttggtatacaaccttccatctttcttctgggtgtctgcttcccctgtacccacatgaacttgctcatccttgaagttcttctggattcctcatcatgaacccaagtccagagaaaagaaaaagtgagtgttaggcactcagtggtgtctgactctttgtggccccatggactgtagcccgatgggctcttctgtccatgggattctccaggcaagaacgctggagtgggttgccatgtccttctccagtccagagaaaagtgacttccattctggggccactctggattactgtgaactcctctcttgtctgaacctctggactgattgacggaaatagcaaatacttgagctttcaaagtcctagggtctccatcataactactcaactctgcccttggagcacaaacagccatagacaatacatgaacaaatgagcatgtcggtgtcctaataaaactttatttataacattagcagcaagcaggatttggcttatggactgtagtttgcagactcctgccccagagacctgcagtggccattctcagtgccctgctgagatcccttttaccagctgctgatggctcccagctgccttcttctccactttggccagcagagccttctctactaaaaagttattcacccctacgcccatccaatggggtggccaggatcagtgaatgggtgacttaggggaaagtacagaaagccagccacctgttttaaggcagaaaccattctgtggtacaactgatgctccagagttccctctgggatcaggcagaaaagtcggtctccaatcaagtccaatgcttgcttagctttgtctctttcccaatcttgcttcctcatcccccttctcctaagagcctcccttggtaaattaaatcctcccaaacccctgtctcaggctttgctgctaggaaactcaacttgagataagacattaaaacccatcctggctccctactggtctcgactttctctcttggctgtcttatgcttcctaggtttatctttcccagtacgactgtgagattcttagagggtgaggagtgaaatggaggctgcgtcttcagcacatagtataggacaaagaatgcaggctttttatgttaccaggcctgggttgaaattctggctctgtcactgactcggtttgtgacctaatgacaataacagttaacagtggcagtgataccggtgacagcaggtgccacacagtgggaagtgtgctgtgtggcaggcactctgctaagctgttcttggtagtggtgtctgcattctcccagcactgctataaggacccctagcctcagagactgcccaggtcacccattcaatggatgagagtaaggatagctaccttg

SEQ ID NO: 34842 - DNA, 1828 bp, Bovine  19866881354221
  misc_feature (1)..(1): n is a, c, g, or t
nctgtgtcccctgcccggacagaggtctattgggaggattaacgagatgttgggtgaaaagtccttcaagtcctgcccttccaggcctccctccacccactctgcctcagtgtctgctcttacttgggacggaaccgggaggcatgatgggggttcaaaactcctggacttcccaggaggtggggaatagacccagaaacttccagtaccaaatgccagactcctggttcctgttccatcccaagaagaggctcccgctcttcccacctgagtctcatctctgggccaaccgggaatgtcgcagagcctagaagtccataccagtacccagcagagtggagagtcaattgtatgtccttactttgagacagactttagcctcttgcctgatgtccctttgtaatttatcaaatggtcattgcctcagtgccttttcaggatgcaaataccaaggtctttctttattgtaatggaatgagatcccttttaccagaaatgagaagggtctgaacacaattgctctgcttgctaacagtctctttcaaaatctttatttctggtcccctttggcatctttgctcacctaaaaatcctcatttggtcacattttctgtgactcgggacattaacaataaacgacgagcactcgggggcctggggtggagaatggatgggattcgctggtggtggagaaacccagctgtccacagcccgccgacgcccgttctgaaagctctgctggccacttgtacggtctctgttaatgctcctgtctctgcaaatgccaataagtacagcgtgaaatttaaacataagtgagtttttacagctaattatggctaatgcaagctgctttcaaaattgccaagcattccttctagaatagtacagtttgcaactaggaattaggcattaagagccaaatttcataaacataatttagcagacaacaaaataataatactaagtgctttccgactggccattaggagctccccaaggtgggtctaattgcacacactcccactgggacttccgacagcacagaccataaggctcggaaaccccaggagcgcagtggagcaggcaggcattttcacagccctccagcctgcgtggtcaggagctgttcacgtgctcagtgatacggttccagctgcagcttttagccacacggctctgtccctcctgtcctcctttcctggtccatgtcacctcgatgttggcttgggatcgccaggtcaagtcatcactgcaaacattacaataatgaaaacataaaaagtggtgcctccccccttgctaaccccgccccccactagcctggctgtgaaaccacccgtgtgagtttagtgtgtttgtcccccattaagctgaggatacaaacacacgcacacacacgctctcaaacggacattgcctttttcttttttagttggagagtaattgctttacagtgttgtgttggtttctgccataaagcaacgggagtcagctgtgtgtgtgtgtgtgtgtgtgtgtgtgtacatatatacagaactctttctcttgagcctccctcccacccttctaggtcaccacagagcaccaggttgagctccctgtgttatagcaacttcccactaggtatctgttttacatatggacgttgtctttattttacaaaaacaagaccacacaacttttttacatcttgctgttcatacttaataatatatttggtgcctttcaacactggtgtatgtaaatctacctctttttttttttttaagaaaaatacatgtactataatttatccagtctcctgtaaataatattataaataatg

SEQ ID NO: 34843 - DNA, 2970 bp, Bovine  19866881370486
  misc_feature (1)..(1): n is a, c, g, or t
ngaggcttgtttctgacgcctggcccgtagtaagtagatcttcaccaaatgttagctgttagtattatggtcgttacgggcttcccaggtggtgccagtggtaaagaacacacctgccagtgcaggagactatccctgggtcgggaagatcccctagagaaggaaatggcaagctagtcaatcttaaaggaagtcagccctgaaggttcactggaaagactgatgctaaagcggaagctccaatactttggccacctgatgcaaagagccaacccattggagaagaacttgatgctgggaaagattgagggcaggaggagaaggggcaacagaaggtgagatggttgcatagcatcactggctcagtggacatgaggttgagcaagttctgggagatggtgaaagacagggaagcctggtgtgctgcagtccatggggtcgcaaagcatcggacacaactgagcatctgaacaacaacaaccatcgtgaccagccttcgagtcccaggtcaggcacaaccaaagaactggaagaagttgaggatgtgcttaggtcaaagccaccccctccaggaagccttcttactgtgccccagcaccacccatgatccgtggcactttgtacctccagggcggtagacagagcagctacttctgagtcagtctgatccaggtacaaattctagctgtgtgaccctgggcaagttccttgacctctctgtgcctgatcccgtcatctgttaaaagtggacattatcttcctcgagggggtccttaggaagcttaactgagatgatgcacgtgcagagtgctcagctcagagcagatgctcagtaaataaaatggctaaactgtgttattttcactttctgcattttattatgaaagcacttacagtgctacccagctgtagactttaagctcttgattgctagaaacggttgatctgggtgccccccctaggctccaccaacacctggattcgagagggagctctgcaaatgttcattgccttgaatcgcctgaagaaacagcatcctaccccacccaaagaaccaggagcaggccatttcctttctccacggtccctagcagacttgggtcgcggacatttgggcatctgaaaagatacctgccagtgaaattctgagagctcttgtactggaatctagaaatcccaaattggcaactcaatgtcataatttaatatgaagtatgtcatgctggggcttccctggttcttcagatggtaaataatctgcccacaatgtgggagacccaggttcaattcctggttggaaagattccctggagaagggaatggcaacccactctggtattcttatattctgatatctcccctgatgctatctcagccgtcccaggccactggcttcccgcagtgatcatcatctccaggcctacatctgagctgcctgctgagaaatggcttacctacaagagggattatttatacctgttttctgtatgtttagaatcccatggacggaggagcttggtgggctacagtccatggggtctcaaagagtcagacacgactgagcgacatcactttcactttctgtatgtttgggcttccttgtggctcagctagtaaaaactctgtcagcaatgcgggagacctgggttcgatccctgggttaggaagatcccctggagaaaggaaagactacccactccagtattctggcctggagaattccatggactgtatagtccatggggtcacagagtcggacacgactgagcgactttcacttcacttcacttctgtatgttcaaaccaaccttcctttatttctcttgcccttttctttgtttatgaggcccatttttcccccttaccactgagacagaataaattgagtgtgactaaggatttgtgacaccattttcactgtgacagctggcaacataaagatgcacagcattttcataaacatgtactcaggcaggataaaagtaaaaagtgcccaaggagaatctgtttacactctccaagcctacgtaacaccgaaagcattaaggaagtccatttttaataccaaaattgttaccggggtgcatccctgatttcctgattgattcgaggcaagtttctgatattaatgagaatattaaattatatggaggttgcctcctaatcctctgattgatttgaaatgaacttgaatcagggcagcttaaaaatagcctttatagcatctttatgacctgataccatggagaaataaatacgaagctaatgccacggaaggcttcctcctgatgtaggggctgtcttggccaggagttcttcctctggtggtaatttaagaagatgcttgtcatcgccttacagcagttcataattcaaaaacaatctatacataatactcaattaaggaaccacagagccatgtcggccacagatgactgatgaacggccgaatggaaattctgcccaactctagaaaacaccgctaaaatcaatccccttgtcagggaaaccatgatttattaacacattccttaacctgcatcgaattgtgaatcaatgtgtccccatcaaaagctaataccaaaccgagatggctcggacttcatacaggtcctggtggcagaagtaactcagacaaggctgcacattaccaggccaagctggttgtgtctgtgtccctctccaggaggggcctctcgggagagatggggagcactcactgtttaccgagtgctccacggacagaggagcctggtgggctacagtccatggggtcgcaaaagggtcggcatctatgcccttatccaaacttctctgtcactgatgagacaggtgtcattattctcttacaggtgaggaagtcgaggttcaccaaggtcagtaagtggccccaagatccccaagggcagaacccaagtctgcaggcttggactctggcatctgagtacctgggttctgatcctggctgcc

SEQ ID NO: 34844 - DNA, 1397 bp, Bovine  19866881426633
  misc_feature (1)..(1): n is a, c, g, or t
naaataagatacagaattagcctggtgatgctcatcatgcaggcagccataagaagtctgggaaacagaatttccagttaattgagatttctagtgaatagaattggagaaggcaatggcaccccactccagtactcttgcctggaaaatcccatgggcagaggagcctggtaggctgcagtccatgaggtcgctaagagtctgacacaactgagcgacttcactttcacttttcactttcatgcattggagaaggaaatggcaacccactccagtgttcttgcctggagaatcccagggatggggagcctgatgggctgccatctatggggtcgcacagagtcggacacgactgaatcgacttagcagcagcaatagcatgccactttaagagaactggtgccctagtgaattgggctgcttcccaggtggcgctatagaatctgtctgccaatgcaggagacctgggctcaatccctgggttgggaagatctcctggagaaggaaatgcaacccactcctgtattcttgcctggagaatcccacggacagaggagcctggtgggctacagtccaatggatcacagagtcgtacacgacctggcaactgaacaacaacaaacgtagtgacttgttatgtagtgggggtttataagacacacttgggaatccttgatagtgcaggtttgaggctttcagaagttgagctgttgcattgctccttctggcccagcgttacaactttgaggttcagtactgtttacgagtgtgttccttttcagttgttaatatttttttaaaaaaaaaaacttctcactttgaaatgggctggcattcgaaagctgtgtgagcagtctgagcatttggcttgtttttaatcctgggattttcttattttgggcagtgaaattcacatggagtgtgtttattcatgcttccttgactcacttctcccacgactgttcttgaatttgcatcgccaccgtatgaatgaatcaagaatctgtcaggtttggtcttttgaggaacagataaggagagctgatcaggactttccaagaagcattagcttctcattaagtggaaaatacatggttttacacggaagcgagtgtggatagaataggccgtgtttttgctttggagtcatgatcactccgtctgccttgcaaaatgtgccttttctgggtaattgtcctaaagcatagagtagcttgaatgacactccacctgcaaacaccttttccctatcacaccgtgctttctggttatcaggtggtgcgataggactcgtcaagccactcagctgtgtggcgcggaaagtggctctcatttttttgtctcaggtcaactcgcttctgtttaagaaacagcaagaataatctgtgcagtcaaaa

SEQ ID NO: 34845 - DNA, 698 bp, Bovine  19866881542598
  misc_feature (1)..(1): n is a, c, g, or t
ncgggttaatccctgggtcgggaagattccctggagaaggaaatgacaaccactgcagtgttcttggctggagaatcccagggacagaggagcctggcgggctacagtctctaaggtcgcaaagagtcagacacgactgagcacacagtacagttagctgaccttgaagcttaagtgttggttcttcgctcatctcctagcccctctgatggtaaccaatgtgccacgaactcagctcagagctgataaatggtcctcctcacccagcaatccatttctctgggaagttgctgaaacctcccaggctgcctggacattcatttttaaagccccagtaactccatcaggtaatgaaagatgttgagagaaattagagaagcagagaaagcaacagcaaagtttcaaccaggacacaagctctgagtgacttcccccagaaggctccttctctaactctggccgcttacataatcctccctgatggtgagtgtgttacaccaagattgcaaagcaactgccttgtgaaagtaacagaaaccatgtgatgacacccaagtttcaactgactttcctttgcaaaattttgccctgggaaaagagagtcaaagactaagaatgcctccattttgactgtctccactccagttgaccccttggaatgtcattggtaagaacggcagcattgttagaatgtcgca

SEQ ID NO: 34846 - DNA, 577 bp, Bovine  19866881914838
  misc_feature (1)..(1): n is a, c, g, or t
natccattcattaaagatatgctaatcacctactatacatccaaacaccatatgttaggcaccatgcattgaggccttcccaatccatcaagtgggtttatattccctcagtttatattccatttatcttccctcattaaaaaaatcataagtgcttagacttatgtcaatatgagtataaatataaggcaaacaacactatgctcctagctagctctcacagcagacacggttaatcaaccacagcactcatgcccacagggtttgactctaacctaaaaatccctttcagcacttttcttcaggcagccccttcccagcacctaaaagggaatccatgtgcctactctgggtagaagaaagatcccaggttttgaaatcagactacagtgtatgagatggttggatggcatcactgactcgatggatatgagtttgagtaagcttcaggagttggcaatggacagagaagcctggcgtgctgcagtccatggggtcacaaagagtcagacacaactgaacaactgaactgatactgatacagtagtgtatttgaatccatgcatcatatgcatag

SEQ ID NO: 34847 - DNA, 1031 bp, Bovine  19866880457026
  misc_feature (1)..(1): n is a, c, g, or t
ncaaccccccacccccgcggttcccacccagcaggggcccccctctagctctcggcgcgaggcccgcccgcccgccggcaccgcagcgccccttgccccgggggcagagccgcagaccacagcggggtctcggcctggggttgggggcgctcggattccagctccgctagacacacgactggtgaaaaacccggcggatgcgattcagggaacagccgaaaaaaaaaaactaacaagttttggcccaaagaccccgggggctggggttcccagtctcagaaggtaaagaatccgcctgcaatgcaggagactcaggttcgatccctgggccgggtagatctcctggagaagggagtggctacccattccagtattcttgcctggagaatcccatgcaccgaggaactttgccaggctactgtccatggggtcgcaagagtcggacacgactgagcaactagaccactaccaccaccaccctgggggctgggaggctccaaggaaaagcgacttcgccgcccagagtccaccgagggctcccagcccgggtctcgacaccccgccccggggaccagcgcgcgccgcccggacgccgcggatggggtgggcggcgcggctccgcgctgtcacctgtcggagcgcttggtccagctgcggcgccgaggacaggctctcggcgtcgagcttcgtttcttctttgcagtcctccgtcagctccaagtgatccggtctaactagtacttcgtgcaactgtcccacctccgggaaaaagaaagaaaacaaacaagaagcagggggtcagtttcccctccctgaacgcggggacctccatcctcaccctcctccatcctttcccatgcggggaaggcccactcctctcggcggatccggcttcagaatcctggctcgcgcgtcgtctgcggctccggtagccgagagatcggtacagccctgcccccagtcccaccccccacccggatcaggtccgaaaaagtcctagaagtccgcgctcaggccccccagggactcca

SEQ ID NO: 34848 - DNA, 2019 bp, Bovine  19866880480483
  misc_feature (1)..(1): n is a, c, g, or t
ntggaaatttcaaataaataacaagtaatttttagcttacgctggcccaaatattgcatggagcatattatactaaaatgtcctatattacctggcagttctaatattcaattaaactaaatttcacaaatatttacttacttagttacctcagggcttacttacctgaaagaagagaggatgaaatcttggtctactaaaatagaagctttgcctggaaaaatcttaataataagccatttagtaccactaatttttttattaataaatgaaagaatgtgtttaatgaattaatgatttcttatgactaatctggttaaaaaaaaagtctcttcctggaggagttttaactgtaggaaaaaactatactttagaagatgtcctagagttcagttgtctatgttcacatgtcctgtgttcaatttaaaaatatttaaatagatacacattgtttaatgttttcccactggggaggcttatacagtttcccagtttgactattgctttttatgattgtgattcttccagttagtggaagaggaagacagccgatccttgtgagtgataacagagcaaatacattcaggaggcaccgaagtacagcttcaaacaatgaggaaaaagtgaggcctgcttgagaaacaactgcaggagcaactgacaatatagccctttatttcctcttttacagaaaaagcttagaaaaaaattaattcataatcacaagaagaactaatgacaagctaagacaaaacagcgtctaaccacagttctcatggttagtgtgaaacatacaacttatctaagacatccacagctcatactattatcagcaacttttaaattaattaccaacatagtctacaacatgtttcaaagagttgaaagaacaggataaaacatgaccaaagtacaagtcagaatataatgctggtaagagtgttatgtgttttcaaggactaattgatcatacctggttcagacttcacaaaggagatggtattgaggctaacttaaatatgttacttaatggataattacaaatttataacataataaaggtgagaaagagttccatatctttaatagaagaaaagctgaactaatgcaaagatttcacactaattattctatacgctaagatggagagttagatagaagagtatcctttaaaacagtctttacttgtattttttttcgtttcaagtaggtgagttttcaggggcttttgttttgtatttgtctcatgttctggaaacaaacagtacttggtacacagaaggcacatgatcaattttaagatagaaaccttaacactcattctcagctcatcatttatcacatccagttggtcactaggccctgtagattttacctccagcattttttgaatccgttctctttgaacacttttatttccattgtcttatttcaagcctttattttttaacccagttactacaatacccttctaatctacattttcttaaaagacttaacttcttaaacaaagcatttcacatcaagccctaaaaatatccattgcacacaaaaggggtccttaagcttctaggtggtggtttagcctctaaatcatgtccgactcttgcagccccagggactgtatcccaccaagctcctctgtccatgggatttcccaggcaagaatactggagtgggttgctgtttccttctccaggggatcttcccaaccccgagatggaaccagggtctcttgcactgcaggcggattctttaccaattgagccaccagggaagccaaacttctagaggtggcagcaaatcatactgttctttgagtgtagactgtaaatgaaagaccatttgagaaaatctgaagtgtttaggattggtcaagatgaggcaaaggttaatgaaacgacccttcaaattctggatgggaaactagcagcccatggtttgcagtcataaaatggtccatgaagtcaggatcagaagttatcattctgattatcacacatattaggatcacgtgtg

SEQ ID NO: 34849 - DNA, 1391 bp, Bovine  19866880496607
  misc_feature (1)..(1): n is a, c, g, or t
ntttcattcagcagacttttaattccataaatatttggctatctaatgtgttagctgtgcttccccaatggctcagcaggtaaagaatatacctgcaatgcaggacacaggcgatatgggtttgatctctgggttgggaagatcccctggaggaggaaataacaatccactccaatattcttgcctgaaaaaatcccatggacagaggagcctggagggctacagcccaaagggtcgcagagagtcagacatgactaagcacagcaacaactagtaattaaattcttatttattgtaatctagtaatgttatttatagtaaacctgtctgtgtgctaggcattattctgagtactttatgtttattaggcactccatactttttttcaaaatgcatgttatttgtattcactgtattaaaaatttgactaaatggtctattttacttgtatccacatgttttctatattgcttttctgcttatcattcacttcacttggacccttttctttgtcccacgttttctctaagtaaatactctttgggaatctcatcttctcttgatgctgtagagagtcatggtattacatttgtatatcttggaacaaatgttagagcaaagaaagtgacagccttgagtaaagcagtatcacacttcttttggaaattgctatgtatagtctagatggacatttgaaagcctgtttgtagccctgttaactgtatgatgtgaagatcacagagccagagactgaaatagtaaggttgttcctgtggctgtgttatcatttttatttactggactttttctttacaatgctaaaattataagatagcgaaaagaaaacttgaattctaacccagagctttcctatcagaatgaataacctggtttatccactgcattggtctttgttgcttatccacctagggattctgggctttgtttgtcaattatgaagttaaaaggtcagcataaagaaaatgagataaaatttgcatccagtcagttttgttttatagtcacaggcaaaaagtttaggaacaagatggaagagattggtttaaaaggttactgtatttcctaagtagtactttttgctcccacaatttaatgccactgaaattggcatgtcttaaaatcaggtatttaatatgttagtgttttgttttgttttcctcttgaaaaacttataaatagtgtcttaaaatatatgacattttagaatcaagaaaacagtactgaaattccctggcggtccattgcttaggactctgagcgtccacttcaggggtaatggggtttgatctctagagaactaagatcccgcatcctgtgcagcatggatgcaaaaaacaaaacaaaaaaccccatgtgtgtgcacactctat

SEQ ID NO: 34850 - DNA, 385 bp, Bovine  19866880592408
  misc_feature (1)..(1): n is a, c, g, or t
nggagagcgggagaatgaatgccgggctctttgggggcctccgagggggctgagtaccagccttgttgacagccagagccccagcgtcccacgctttcaggtgcgggatccggaagggcgcctacagccccctccgcggggtccgcggcatcagcctcgccccgcctgggccgcgcgtccccgcgcgctctcccaggcccgcgggcgccgcgggggcagggactgggcgcggaaggcggcagggagggacctggaaaaaccacccagattgcattgcagtgggcgaggccgccggaggagccggttccgccgagccgcctgcccgcgggacgttctccgcgcgcggttcccaggcgctcggccctgcggggtgcggggcccccgc

SEQ ID NO: 34851 - DNA, 822 bp, Bovine  19866880843315
  misc_feature (1)..(1): n is a, c, g, or t
nattaaaattaaatttataattaaaaacaaaacaaaaacaattcccgtctatgccttacctgtcattctgtgtataagcaattttgtcccagtgcagactcaggaggaaattttgtttactgaatcacctgtattgtgttcctgaacacattaggtttaccccaaaggtctccagtggtgtccagttagtccttcctagaaatgaaattagtttggaagagtagcataatagataaggttccatttagaatttttgtttttcatttatcgctttttttttttcctatggcaaacatttcaagagaattaaaatatttttcacgaagagtatttcttgcaagtattgtttttaattttaagactttttaaaaaatatctcttttcagaccaccaaattcaggtgagagatggaggaaatgagtcattaggaatacaagtcatttactgcaaccaaaaatacttacacatgaaaatgttttatttgagggttacaggctaattctttagagttaaaatagaaggtttctattaaaatctaacaattctagcaaaaaaagagatttaaacaattttagaaatcttttaaaatataaagtatattgttgatcttcaaaatgcttttgtgcgatagaatggtgtatgaaatatgcaagcttggtaatttacctgactgcacacacccagacatctatttttgaaagctggtgaaaggcatttcactgcagatgcttgaataattttatgattatgtcatgcccaggttaatttcagaaaacacttaaatcagggtggcgattaacaaagtaacccaaaaagataaaa

SEQ ID NO: 34852 - DNA, 1084 bp, Bovine  19866881020545
  misc_feature (1)..(1): n is a, c, g, or t
naaaaagttaaaggactaatataaggatacctaagagcccatttcagaataagaggtccatcaactaaagtaaagacaaagatttatttccacgaacagaatgatatcctcatcactaaatatttttatagtagtttgccttcataaattctcattctattaatttcacttatcaaaatgggcctcactcaggttaatttacaaaaatgcagatttgatagcagaacctatatcctgcatcttgctttagtatcacaattcttctctttttgtaaatcagccctttccagccccttcaaccccaaatcaaataaggaaaaattaagtgggagtagttttatagaaagaattttgctgaggaaaggggaaccatatatctaaaaattaaaagtaacatttataaaaatgacatatgccattattatatatatatatgtatgttttaaaagacagaatcagaaaccataaagagatttcattcattcaaacaattattaccaaggatttgatattattacctacataaataaattatgtaattatgtaggataaattttaaataaccagaaatcaaatgaaaacctcccaataaataagcaacagcaataaaggccccatatataaagacagacataaagattacacttcagaacaattttttaaaaaaagtcatccattgatatttttattttgtgacaaagacatatctaaaagaacctagagcttcatggtgagtggccattactaaaataactgagaaaaggcaaaaagaataagaaggcaaggactcttaaagacagcagaagatacaaacttttatgtaagagtgacatgaaatcagattatatacaaaagattttgaatgtatgcattttaactaccttaaaactattcaagaataatttgatatgctgaattagataactgaggttcctatgtaatcctaatttatctatccagttcataaattccaagcacttcagaaatgaaggcaaatgccttgagacaaaatagctttgcagaatctttttgcttctgattatactaggtctgctccaacactgaataattccctagaggctac

SEQ ID NO: 34853 - DNA, 1503 bp, Bovine  19866881269790
  misc_feature (1)..(1): n is a, c, g, or t
ntgtctctgctttttatttttatttttttttgagattaaacaggcaagttttattatcaaatgtaacaattctacaaaaattcagtagtattgtagtattcctgcctatcttaaagtctttcagagctctgggcaaacagcatcttaaggcagccaagtataaagaactatttttatgatcttaagtgccagttatccccaattttcacacaacatggtttttcttatttttcctactgcagttaaatggacattactggtcagtgaagagggactgtttggctttccatttaaggtattaatcaaaataatgcaaagtaaataaaaatagcagccacataaatctgtatggcattgcattcaagctaaggacattaagaggaacttaaaggaacatgtgcacttggttaatcaaattcggtttttctctttggagttacacgaggcagcagtactacgtagctagtgtctaatattgcacttctggagcataaacacagctaagccacagtgccacacaccgacagcagcacctgttctcatcacatcagtgttcacctctcagtctagcatgctgactataaccctaggctttttaaaagttttaattattcgacagttaaggcattagagaaaaaggattaaggctatcttattatatacaagcattcacttcagttagtatattgctttctagaatacattgttcaaatattctcatttgtgatattaaaaactatggaatttcttattaaagtccgaagcatcaataatgggaaaagtacagtataaaataatacatacgaagccacagtattcagttacagttcaaactagaaattaataactacacatagcgtgcttcatttttggttttatattttggcccctagttcatttttatttacaactgatacccactgagaaaaaaaatgcaacttttaaaatatgtatattttgtgatgggtgtgccatttcttctcacttattccaaggtgttttaaaaatagtttttggtggcttttaactgtaagacattgtgatggccaagagcctgggaaaataatagctttatttctttttgtaagtctgggacttacgcactccaagaccttattcttacttcagaagagcacgtgattgtgcagaagattgtgcatctatattggtgccatgttgtaccttggcctaaaaacttgtgaaggacattcaacattgcctgaaactcacttatatgcttgcaatttacttttgtttccatttcccaacgtcaatgatgcacattctcctcactttgctcaaggcacctaacacaattgctccttcatcaagataataagtccttgcattcacagtaaacaattgagacaaccagtagtgagttccctagatttctatcctgcattctttcaattttacctgtatatgtgagtgctcagttagtcacttgtgtccaactcagtgtgaccccatggtctatagccttccaggctcttcaatcca

SEQ ID NO: 34854 - DNA, 1116 bp, Bovine  19866881294653
  misc_feature (1)..(1): n is a, c, g, or t
ncactgccttcttaattttaggttcaatagatgggggaactgggctcagatatctgcattttttaaaagtagtagagatgagtttgattcatgatcagacctgagcaaaggtgatatgctctacacaaagacacaatctctacaagccttccaactccccacgcccatggcctgtccaagcctagcccacttctttcactaaacatttctgacctccccaatggactcattatagccctttgccatcctcttatacaacttctgtaagctgccctggactattgtacctgtattacctcctagtgggctgcccaggtggtgctagcgctaaaggatgtgcctgctaatgcaggagacacaggggacgaaagagaagtgggttcgatccctgggtcagaaagatccactggaggaggaaacggcaacccactccggtattcttgcctgaaaaattccatgggcagaggatcctggtgggctaccgtccatggagtcgcaaagagtcggacgggactgagcctgcacacacattacctcttagtcgacaaaaaactctttggaggcaagcctgcaacttacttgcatcctctacaatgttttgaatgtaatagatggcacttgttctaaaggcaagttggtatcccagatcagattctggaatagaaagattaactgacaagccagtgaaattcaaattaagtctgaagcttagtaacgtatcaaggtgaattcattatttctgacaaatgtgtcaaggttagggaagatggaagctgggtgaagggtatacaggagctctctgtactttgcaacttttctgtaaatctaaaattactccaggacttccctggtgacacagtggataagaatccagctgccactgcagaggacacaggttcgatccctcgtctgggaagattctacatgcccaggagcagctaagccctgtcgaggccacaacaactgagcctgagcaccccagagccttgctccacaacaagagaagccgccacaaatgagaggtggttcttcttgccactaatcagaagcttgagcaccctaacgaagacgaggcccctgctcgccgcaactgaagaaagcccactcaaagaaatg

SEQ ID NO: 34855 - DNA, 1345 bp, Bovine  19866881362588
  misc_feature (1)..(1): n is a, c, g, or t
ngcaaggatactggagtgcattgccatgccttcctccaggggatcttctcgacttagggattgaaccgcgtctcttatgtctcaagcgttggcaggtgggttctcttaccactagtgccacctggcaaattcttacctgtaaggtgaaaaataatcagagtggtcatgaggataaatgaaatgtactccctataaagcagttagcataatgtccatagttgctgatcaataaaaatgttattttcattaaggaagttggaaagcttggaggttgttctaaggtttacgatttcagatgcagaattactcttttatttattttttttttgaccacactgcgtggcatgtgggatcttcgttctctgaccagggatcaaacccatgccctgtgcagtggaagcaaagagtcttaaccactggactgccaggaagtccccagaattattcttaagtataagtaattgtttcctacacataagtgtttcctaactttatttcttaaggaaatttccatattattacatcacttgcccattatacatgttttcacactgtatttcaattatttgcttccctagctgaaagctggggtgggcctcattttggttatgttctcagtgcagcagcccatagcatttgttgaattgattttggaaatcattcccacagaggcagatgactgaggtaaaggagaaagatctccaggagggaactttgggtcagaaactacacactttgctagagactggcagtctacagattggatttctcattaactgtgcacttacaagtcacacagaaacatattttcacaatgctgccatctgctatgttcattacttggcttcttgctgcctatttataaaattgataataagcacagtggtgatttattaaaaatttagaaagagcaaacctctgctgccttattgtttacacaggcagagatagctgccccctatgaagtcagaccttcttgactggggaaggggtaatagaaaaagcaaccgattagaagtaacagctgggttcccaagctgcctttgctgcttactacctgtgtgaattgaaagaatcagtgaacctacccaaatctcacttgtctcaactgcaaaatgaaaataatacttgtcctatcctttttctttttaacagatttggaaagattgagaacaggaggaaaaggggacaacagaggatgaaatggttggatggcatcaccgactcaatggacatgggtttggctaaactccaggagttagtgaaggacagggaagcctggcgtgctgcagtccaggacagagtcacagagtcggacacgacgagcaactaacaacaaaaaaca

SEQ ID NO: 34856 - DNA, 1048 bp, Bovine  19866881375226
  misc_feature (1)..(1): n is a, c, g, or t
nctggcagtatagctctaaaagggaaaaaaaaaagaaagcttttagtttgaagctacatgagatgtcagtctgtcccatgtttctttcctcaaagagtgagtttgtggtttcttgcacttaggagcagggttaaaaaaaaaaaaaaaatgtgtcatgaaattttgagaagacttaaaagtccacttggaactgttttttttcccccaaatttcaagctaagaaccattctttaggtagatggagtgtgtgagatttgagattgctcctacatattatctatgtaatcaaaaggcagttgcttgggatggtatgcagaactggtctctttctttcaaatgtgtgtatggaagggcgacctcatggcctcagtgcttccatgtgtcgatatcactaatatatctcaaggtctctctctgtttgtttaggcctgtcccctccctcctacacatttccagctcccgcagcagttattcctactgaagctgccatttaccagccctcagtgctcctgaacccgcgagcgctgcagccctccacagcgtactaccccgcgggcacccagctcttcatgaactacacggcgtactaccccaggtaaggctcacaggaacaaaggactcctttgacagccgccgcctgagtccacaaaagaatgttgcccgctacatggaaggttagcatggcaggctccagtttctggtcatacatatctctgtccaagaaggttgtttcaagacaaccagaatgtttatttttttatccatgtcttattgacagcatagtcttttagattacttatgtatacaactttccctttttccttttgttttagggctgttcgtgagttagcccagtaatcattataaaagagtgacagtatcaagtgaatgaattacaaaacgagaaaatctgtggtgagggcagttcatttttaagaattcatgtcagcccaaaatagatgaaagctgttttaaattttgtagggcttgtattctttcccctctaagtctttactaacaagtccagaatgagatttttcagtacttt

SEQ ID NO: 34857 - DNA, 850 bp, Bovine  19866880870229
  misc_feature (1)..(1): n is a, c, g, or t
ntcttgtctaaagggaggaagagtcttttcacccaagctatgaatagagcttttcttttgaaacaaagtgtgtgaggtacagtgagcaaactgcaaaggtaacaagttcttttgtcatatggtctcctacaaccttcttgtattttaacagttagcgacagtttgtagcttctaatcaactacaatcgataaggatgtaacagcttctgctattcaaagtcatgcaagcctagctaagcactagtcctaatttcctaacagattatcagaacctaaatcagaaagttttagagattcaagaattttcgacttcattaccgtaaaattaaaatactatttacttaactctttatatttaagcattttataattaagagttgacaaactagcataaataccagatttacaaaaatctacacagaaaaatacaaatataatcttttattatataatacacacatataatactttttttcattgaatacatgaaaaacctcttacactagtaactactgtgaggcaatctagtctagtttactgagaaagggaaagggagatactcccaaatacagcgtcttgatacaattcatcagttcacacactaacgatgaaatataagagcctgggtcaagtgggaaccacaaacaccagccagcaccccgtctcctttccctgactgcatggaaagcagagagaagagtacagcaagcccacctacccttgactcacactttctcctctgaaagaatcatccccctagctcccaacaaacctccataatagaaaaagataaacgtggggattatgccaagcgaccccaagctttgttctcccgctcaagacacattca

SEQ ID NO: 34858 - DNA, 1082 bp, Bovine  19866881265912
  misc_feature (1)..(1): n is a, c, g, or t
nagaaggaaatggcaacccactccagtattcttgcctggaaaatcccatggacagaggagcctggcaggctacagtccatggagtcacagaagagttggacacgacttggagaccaagcaacaacaataagcacaaccttggatggatggatgaactaatggatagtcaaaggaagtgttacatttccatttagggtctgcaaaaacctaaagaccatcattttccccctctactgggcttctcttgggtctataatgtgaactcagatctgctcatttactggatttctctttcctcattcctcctcacaagttcacaagaacatgcttctctattctacatgtgcctcattgccaggttccaagtactcctagcttgcctcctaacttttctttccatgttgccatcttgatattctggaccaaggaggctgaacaagagaggatgtgtttcactgatcaagaaggggtcccgaaagggcaggtctactaagatgtagatttgtgtgggcgtagggtgcactcaactgcagcatgctcagaccacctgctggctcagcacctttccaaataagccatatactgagagcctggagattggaatcagaggaaagagctttggatagtagtacaagcaagagttctacagttgcttcgtccactagccagaaggtccattaaggaaatttatttcagtgttttggaagcatgaagattttagttcagtcatggagacttccagtcatcattgtgctcagtcagcatattcaaagactgcttagaggggaaaacccagggccctgggccatctgtaagaccaggcacacccacagccatgatggggaggtcctccattgagtatctgttagtgggttgcaagaatgacatctggtcatcaaggcaaaaaccacctctgcaacctgattaatctgtaaaattaagaatttagaaaggaataaaaaagtccacaaaaaaatttactaaagaaggatgcagtgaccaaggaattccttgctcttaaagccttcatgtcacacaactgagacgtcttagtgatcacctggagactccattctgcctca

SEQ ID NO: 34859 - DNA, 664 bp, Bovine  19866881349701
  misc_feature (1)..(1): n is a, c, g, or t
nactttaaaaatggcccacactaaaaaaaacaaaaacctaaaaaaattttggctgaaatctttaattgcaatgactagaggtgaattaaataacatttttttaaaggaagtctactctattttcacacagctaactttttttgaggaacccaggattgatttacaaattgttttgatcagattttgtcagtaaagaatcaggtttgtttcaatgaggggggtcaagctctttgatgtatattgatcacttttatgaaacacgtgtttgcagttaattgttatagcaatgtattaacttatttggaagttgataacttttcttgggaagaaaaaaggataaatttagatgtaagattagtttaaattgttaatccataatttatccttgagtgtattattttacaattctatgatactttacaaactggaaaaagaaaaaccccaaagctttattatatagataccatctttaagttgtttcattttctgtactttctacattttaccaattttaattgtagccttattatgatgtgttatggtaaaaccgggcagaatgtaattttgtctgatatttaaaaatgaaaagtatgtaggattttaagcttctaaatatttcaaggacaacattacacatataggagttcatttattcctttttagt

SEQ ID NO: 34860 - DNA, 1560 bp, Bovine  19866881403237
  misc_feature (1)..(1): n is a, c, g, or t
ncttggtcgcccgttcacaggcatcaggctgatacatttccttactgcttatgtgtgagctgtaggaaccagaaatgggaaaaacgtttccttgcagtttgggcattcatatggcttctctcctaaacaacaaccaaaaagtacattcagtaaattttcacatattcacattttccctaaaacaagcagtatcaatttaaaaagggggttaccaggtgtgcttgtgatacaattttatttagaatcatcacttttaagttgaaaaccttcataaatgtcaagcaccaataaaatgttagtctgaactatgtgctgaccagtaagagaatcttctcttcaggtgcatgtaacaatgttgctcacttttaaaagttcaaatctttctcagataccaaaaaattatatcccactctttcaagtaatttttttcttatcctgtgtcactaaactatgtaattctctatattctactctacttaaccatctataggagaaattaatattagacaaaaggaagcaaaatctcccataaggcttaataagtgtggacatctatcgttgactgtatgagtcacatgaagaatatttatccttcctatattcataggtttccttgaaaagacctttttcagtggggaagaaaagtttaaatacaagtattgttacaagccttggcttattaagctgggacgtatgtgtgtgcttagttgctcagtcgtgactgacaatttgtgactccatgggattctccaggccagaatactggggtgggtagccattcccttctccaggggatcttcccaacccaggtctcctgcattgcaggcggattctttaccgtctgagccaccagaaaagcccaatactgctggagtggtagcctatcccttctccaggggaacttccccacccaggcactgaaccagggtctcctgcattgcaggcggtttctttaccagctgagctacgaggggtgtatgtactcctagatcaataaggcagagttcgctgtgtgctcagttgctcagttgtgtccagctctttgcaaccccgtggactgcagcctgccagattcctctgtccatgggactctccaggcacgaatactggagtggattgccgtttcctcctccaggggatcttcccaatgtgggaagcaacctgtgtcttttatgcctcctgcactggtgggtgaattctttaccactgagcctcttggtacgaaaagcatcttggagtttcaatttcagtgacagtggttacagtaacttagaacatttaagtattaaaacacagtatacttttgctgcacaaatacaacatctttgtgaaatgtcaggaaaaaaaaaagaagcttcctgcttgcagaggcctcagttacgtcactccccaagaccttccagggtacaaggtgatcttctgggtcactacgagtactctgacagaaatttttgagttgaatggaatattttcatacaaccccattttttttttttttaaactttagtttgcatatgttctagttcatgaatgtatagtctaaaggtaccgatgccctgg

SEQ ID NO: 34861 - DNA, 1411 bp, Bovine  19866881656833
  misc_feature (1)..(1): n is a, c, g, or t
naattcatttcatttttgtactaaagagcacaactgtgaggtgaaatactgtcaactcagaactctaggtgtcttttttgctggcactttgcctcaaagcgcaaacgatcttctacagaagaccttctactactctggtgatgtgagtcgtcacattttaatataaaacagaagagtaatgaacagcattcttctgtgctcattaacactattttactaacaacaaatatagtttaaatactttatataatgtataagtcagcttgacaaatatttgataataagcatccctgaatacattattcatgcaagttcaacacaaccatgttaaaggcagaatacacaatctttggctgtggcaccataaatgatcacacattccattatttgattaatttggagtgcactttcagtaagagtacaaaggcttgctctttgttttatagaactgacaagtatgggagggctgatgcttataggtaaaaatcgatttttgacacattactgcaaaatacactcatcttacacaacacaaggtgatttataaggctctgtggaatactcctaaaatgtactgcaaagaacaaaaaactataaatgttaagccaaagaagaaacaaagaaaatttaaaactatatgatagaaatatctaatctatggttgaatatacagaatacagtaatactacttttaagtacagaattttgaggaaatgttttaataatttggaatttctttttgaagtttacattcgaagactgccttatcagaagtaataagtgcctgtatatattggacattatcatatgaaatatctggatttaagatttgcacttactcttttgcttcttaaatctgatttgaatccaataatagaggaatagtctcggggaatatgtactaatatagtcacctagaagcaacaaatttctttgtttactataattcaacttcattttgggttgggaagatcccctggagaagggaaaggctacccactccagattttagcttggagaattccatggactctggtccatggggtcgcaaagagtcggacacgagtgagcgactttcactttcaacttcattttggcctttttcaatcacagaaatggtaagaaaaagtgtattctcttgtttgctgtgacatgttcacttatcaatattcataattctcatccggtttctagataacccatgatatttgcttctttttctctcttctgcttttagtcttgtgggcaatttcatgtagatcctggtaactaataatcaaactcaaaatagatctgtatttctgtaactatggtaaaaatctgatagaagtttaaattatcattaaaacacttactctgtggattacatgtagattatatttgttattcttacagatgaatacctgtatta

SEQ ID NO: 34862 - DNA, 2297 bp, Bovine  19866880397331
  misc_feature (1)..(1): n is a, c, g, or t
nttcaaaagcatcaattctttgatgctcagctttcttcacagtccaactctcacatctgtacatgaccactggaaaaaccatagccttgactagatggacctttgttggcaaagtaatgtatactttatggcagaaatcaaaccaatattgtaaagcagttatccaaaaaaaagctcaggtttgagcttgaacctttgcaaattgctcaagcacccagataatattgctgcttctgctggtgatccagggacctcactttgagaagtaagggtacaggaagctcaaagggacatcaatttttaaagctgtccccatgggtcttaactctccagtgaataaaaatgcagtgctcctcttcctcagttgaatgatatgaatgaatatctcttaagggcatcaacggtgtccttaagttaattggttttttggaagtatttttagcaaaattactgtgcatttatcttaacacaaatccaggaatttgaatatattcatattctgataaatgaagtcttcccttttaaagagtgctttttttcttattgctatgcagagaagtatggaaatttagagcttaagtgcatttattcattcatcaaacatttttttaacctaaccatgtgctctgaattctgacaggttttggaataaagagagaaaatcagaaagggactctagagaaggttccagagctagtgaagatgctgctgggtccagatcatagaattcctgacccatagtgtttcttccttgatacagcaattattctgtggcaggatttcaaaaataaaattctgcaagcccaaattctatgtttcccattctttttcactgggtacattgtctaaatgctctgtcatagaaataaatggccaggagatatgtacattttcctttatggaatcaattttcccaactatatgatgagaaattggtttagataatttctaagaccacttccaactacaaaatgtatagttcaaagcagggatgggagttttggtctcaatctatatctcctctttgaacttttgggccagttttgagcttgggagttcattcagttttgctcacccacctgcatcacaggagggccaacatcaaggggtgtaggataacagattccacggtctacctgcgttgctcctgaaaggttttaagctgagggcatgaatcatactccccaccgactgacctgtatcttaatgtgggtttaaatttcatatcctttcctagattaatgttctgtgtacatctgagaggtctggctcactggccactccataaacaatagggaaggaccagcccctgatggctaatggtgaaggccccaggcatgatgatttagtgtggcctgtctctttgagtacaaaatagacctgctatctgattagtcaaactgggtcattctgggtctctgaaagatcactacagttccatctattttttcatccccctcatgaggtcagtgactcacttgactaactgacttgccacaaacgcagccaatgcccttgtccttttgaggatccaagatgaagcttcctttattgagttatacgtgcattcatcaccagttttatctcaactttttgtctgtattattttatcataatgtaccccagtagcctggatgaatggatagatggatggatggatagatagataaatgtaaggtgatttctatgtatcaaactcagttttcctggagaaggaaatggcaacacactccagtatttttgcctggagaatcccatggacggaggagctttgtgggctacagtccacgattgcaaagagttggacacgactgagtgacttcacttcactttcactttaccagcctggtagacacatgctatggttccttagtgctgggttgtttatcagacatggattttaattatgaaatgaacgttttcaaaaccaggtggtgagccgatgtgtaagaccatggagcctgcttccctgcgcaagtgtcatcatggcctgaagccggcactcagggactgctgttcattagaatttatctgagggcagaaacatcctcactctgtcaagactcatatagcacgcagaggaacatgaggagcacttctgattttaattacctgcagactgatcgtcctttaccacgtgactcccggcatgcaaaccaacagtcttagcttcagaaggagcctgactgttcacactaatccgtatccttcactcgatgcttcagtgtttctgtcagcttcctgttcgagaccgggctgacttctttccggcgtgcttcctcgctcctccggcacac

SEQ ID NO: 34863 - DNA, 1151 bp, Bovine  19866880418640
  misc_feature (1)..(1): n is a, c, g, or t
natttcttgcagtggcgttgccagctgaatggtttaggagacttgtaaaaagcagacggccccaaattcagttcactggagggtttcaaacctgtacagagggatgagagttcttcaattgctgaaatgaactggtggtctcaaggtgattttaagtaaaaagcctgccacagtctcagtaagatccgatgggatttactgtgtcaaaaccaagggttgaataaagtgcagggataaaggagcctgactggccacaaaggggcagcttctaggtcagtgactcattgaaatggtatagatgacagtcctttggtgagaaggcagtggggactcctggaaggagtgtaattagttctctgacctattcattctctcctcttgatgcaccaatattacattgggcaaatgtcacaacttcttggagtcattttttcatcataaaaagcaagaggaaagtgacttaaatggacaattatttagaatttgtagagaaatctgacccataacatttgtaatctacctgagctcagagtacatgtttgatttcatcaaagttttaagtcacatgtgtttccaagaagacttgagtcagtgcaaaattacttaaagctaagagcaaaattacactgtggggtctatttctcaaagagtgcaacatctatgaagaaaatcatcaatctatgcctgataattggaacgttaattgaccagaagtcttctcttatagaaagacacgtgtaaaaacataaacctatagcagcatcacctaaattgtgtattttaagtgctgacagagtcagacacaactgagcgactgaactgaactgaactgaagcggcccccttcagatattctgaattagaatgtcaaaggtgggatcctgcctgaaactttaaacagatgcctcagttgatgttcaaagatgataccatgagaatcagcatatgtaagcaggggccatgccaagtcatgtttcacaaacccaggttcttgcttcacaggtgcacaaaatcacaaaataaataattttgtgccaccccaactctcatttttaaagtagttaacctggtatccttaagcacccctatatttaaaatagataacaacaaggacctacttactgtatagcacagaaaacactgctcaatatt

SEQ ID NO: 34864 - DNA, 834 bp, Bovine  19866880594663
  misc_feature (1)..(1): n is a, c, g, or t
natccttactaatatctcattcttaaaacagtcatgaatgtagaagcagcagatgaattggcattcaagctcaaacttcaaatttggcatcaaatcccatgactcctttagctatgttacatcacattggtaacagctacaaagcagaatagcaactctgtgtgactgtgtttctatgcctgggtagccaatgagtctatttgatctctgaaaatcactctggatgttactgaaggcaggcaagagacttttggcagtaactctcttttattgcatctgttaagctgaaatttaggtaatttagtatgaaggcatggcaaaatgagtttcccactctgtgttaaaccttctaatgctttgtctaaatgtttaaaaatatgatgttctggcaacattgaattcactcaaaaaccctctaataaaatgaatccagtcaaaaacaatttttaaaagttgttgagagactatggtgtttgcacttttaagtgcagaaattctgacagagtttggagagcaaaaagaaggaaagtccagagtaggaaaaggaatatttccacctctttctctattgtctttctggttatgatatgctttctctggtcatgatccactatgacagtgaatgctaaaatactggtatatattggtgtatgtcccttctacttttaaaaaaaaatactcatatataacttttaaaatgtaatactatttttctaaggtacatttaaagcaacattttgtactctatttagttttttatacaagtgctcctcaaattatctgtagtaaagaatcaaatttttcatttttaaaaaaattttcatcttttgcaaa

SEQ ID NO: 34865 - DNA, 1228 bp, Bovine  19866880636755
  misc_feature (1)..(1): n is a, c, g, or t
ntggcctatggcttttgggaaaagcgtgtaccccagtgctggactggcatttatagtgtggatcaagacaagaagcgacagctgacgtcttttttcaggctcacacttggggtctgcctctcctctgacatcccagcaaggaggaatcttacttgcttaaagactttgatttcatgtttatgtttgtgtaaatgtgaatcctgcattcagcttacatttatcttctttatccttactctgaccttacgtttatccccaggtaatacattcagttttgccctattccactgaggagtcctctacactgagcacaattattctgtctcataaaatcttccttcttttaggttaaaaccattcagctcctttaaccgttcttcccaaggcattatttccaagattcctccctaccccgctatttcttagtcttaactgaaccctgttctttaaatcttttaggacctggaaccataaattgaataaaccttgtaggaaagacctgattagtatagagcaaagttaaattatcagtttccatacacaggatattaaatcttgattcatttagtccaatactgccttagcttttcaggactctgggccacactgtggatacatctgtactcagctgcacaggagttagttgtatgcattcttttgaatttgtatgcgtttctgaattcatttcaaacctgctctgttttatatttatagtcttcctttgctccattttcatcatcaacttattttttttggtgtacatatatcacaagctgcctcaaatacttttggaaatgagatagagtatgaagtaatatagaagacgctataaccaatcatttttatttctcagacttacaaagcaatgttattttcttcaaaccagcctggattaagggttcacatttcagtattcctttggcagcttatcgattcatatttgcttacagaaatgagtctcatggagatgtctgctgggtaatatgttgtcttaactctctctctgtatatatatatttatacttttataatatatatatatatgtatatgcacacttacatatgtatatatatttatgtatggctctacacatataaaatgagcacacgttccttgaaatggcctctaattcagaattcttaaagtgtacagctgtcattctcattgctttagaatgggtattgttcattgccatctgttcctgtctcacttttcaattctacagtt

SEQ ID NO: 34866 - DNA, 2152 bp, Bovine  19866880655955
  misc_feature (1)..(1): n is a, c, g, or t
ntgtatagtatggggtgaggtaaaaattaagatttttaaagttaatttatcagccaactttccttattcaactttatgaatgaaattttttttgtacacatccttgtatgttgctgctgctgctaagtcgcttcactcgtgtccgactctgtgcgaccccatagacagcagctcacgaggctcccctgtccctgggattctccaggcaagaacactggagtgggttgccatttccttctccaatgcatgaaagtgaaaagtgcaagtgaagtctctcagtcatatccgactcttagcaaccccatggactgcagtctaccaggctcctccgcccatgggattttccaggcaagagtactggagtggggtgccatcgccttctctgatccttgtatgggcatatgttaaattggccatgtacctggaaatcagaaatctgagcaaaataataaaaccttccagtgtttctcctaaacaactttaggcaggtctatcactggccaggatcctccatcccacagctgtaagagaaaaacatcccttgctttttcatctgtcaaggttacatgaaatagaacactagctggatgtgactacaactgtcaaaacaagataatggatggcttatttggacagatcaaattgtggcaagatttcctgtctccccagtaactactttactttattccactttaaagcccaagggatacatctgattggcggatagaaaataatcaaggaggaaatatcaagggatggcagtctggggggtttgggggcggaattaagacatattcccaaggatgcctttgatgtttgagaagctgaagtgccctccggatcagaatgctgcagggcgagcctgcagatgcagagtccagacaaaccagccgccactggtgtggggccgggtggacactccaggtaggttcaggggttgtgtctccttggaattcagaagatggtctctaaaaagtggtagaattccgtttgcattttcctgttcatgtccagcatcatgactcttgattcctgtgtaaacataattctccccctggccacagaggtcacccacataagcctgaggtgacaggatgatacaccatttggaagtcatctttctaactgagagcattgccatagtcccaggaagccctggcatcacagggtgtgagggaggaggtgcttttgaaggggctgaaagatcattccttcctacacaaggctttctggaattatagtctgggaggaaaatggcgtcttgccaattctaatacatgttcagactcaaggtgcagcctcagatgtccagatgatagaaaggaaaaaaaaaaaaaaagcgtaccttagatggctgttcttctttttcccttttgccttattattttattctatttaggaaataaaaaggtttcttacaagtaaccaaagaggaaatggtgaaatatataacattagcatttttattgggatttatgtattttgctaacttcaagtttcagtgattaagttttagacaatcaaagaaataactaaaataattacatttgtagtatacagacagtgcttttaaaggtactaaaattcagttcaactggtatttttttgagtactgccatttggccaagcactatacctaaagaaaagcttatttaacttacatgcagagtacatcatgagaaatgttgggctggatgaagcacaagctggaatcaacactgccaggagaaatatcaacaacctcagatatgcagatgacaccacccttacgcagaaagtgaagaagaactaaacagcctcttgatgaaagtgaaagaggagagtgaaaaagttggcttaaaactcaacattcagaaaactaagatcatggcatctggtcccatcacttcatggcaaatagacaggcaaacagtggaaacagtgacagattttattttttttgtgctccaaaatcattgcaaatggtgtctgcagccacgaaactaaaaaatgcttgttcctttggaagaaaatctgtgaccaaccgagacaccatattaaaaagcagaaacattactttaccaacaaaggtctgtctagtcaaggctatggtttttccagtagtcatgttttggatgtggcgagttggactataaagaaagctgagcgccaa

SEQ ID NO: 34867 - DNA, 1224 bp, Bovine  19866880696804
  misc_feature (1)..(1): n is a, c, g, or t
ncctttggtaacaaaagcaggggaaatcctagctgctggagatggaggctgcttgttgctcaagctagggtgggctgagctcaagagcgcccttagggctcaccagaaatgtctcccaagcatttgaaccaccctctagagaattttcaggtagtcaagtgggacaactctggggaagaaagcctggggacaaacctagcagctttcctctccctgcagagctgtggattccattattagctatcaagcgtggttttgaacttcaggacgaaaagttgcgtatatgtctgtgtcttaaagtctactgtcagtagagtgatcagctattgagagatgtgagttatttttagatgaatacaaacgttggatgatggattgttcggggggggcggaaaacaaccttgaaattaaattggggaaaaaaccccaaacaagtgaaatgtaacagcagcaaaaacaaattccacacaaagaaaaattagaaaagaaacaaagcctcacggatggtgtttgagtgatagtgaaagacagactcaacacattgcctcgtcttgataatgcattgacccagcagagaatgatgaacaatacacacgcagggaggaaaacaaaaatcaccggttttgctgagctctccagagttcaactgaaatacgtccctgttcctattcaaaggtggccttgtagggcttcatagtcagtcaaacaatccctccatgcagaactgggggcttccctggtggctcagatggtaaagaatcacatgcaatgcaggagacctgggttcgatccctgagtcaggaagatcccctggagaaggaaatggcaacccactccagtattcttgcctggagaatcccatggttggaggagcctggtgggctagagtccatggggtcgcaaagagtcggacatgactgagcgactaacacacgacacaccagctagaattaggccactgctgaaaatacatcagcatgagggaaatgggaaatgtgtcacttccccatccttctgctccgccacgatcctctccatccccacgtgcatggtggaaatggctttgcctgtgctgggccaatgggtttcctccgtcacatacggaaaagtcagaccaaggtttttagatccttgtaattacagagctaaaaagcaattggagaaatatattctgcaccttcagaggtttgacgtgactttactgggacagagaacagggctgcg

SEQ ID NO: 34868 - DNA, 977 bp, Bovine  19866880729167
  misc_feature (1)..(1): n is a, c, g, or t
naaaagcattggttcctccagaaaaccttcaccatgtcatccttcgtcaagaaaacaggctggaattcagtgggacaagcttatactctacaaggacacctggcatccttccacctcctctgatgacctcagttactctcaaacaatcaagtactgcctgttggaatgaaaacagatgccactaaatgctactgtctggagcatggcatattttagtcaaccagtgaactgtacacagccaaatgcctctattcaccacaccaagaaaccatcttgcctactggacaagcacatatggtagataatttgacaggggaaggggagagtgggaccatttgtcatatgagagttcagttaggacttggaatttaattgctcactaagacttaagagagtccacaccgggtgttacagaagatactagaaactcatgataacctaacggacattgttttaatgcctgtacatgtcagagcccggtgctttgaattaccacagtgtttcctggaaaccgttttgccaaatatcttgaattcagtccaagcatttccccattcatagccacatggtggggtcagtagtgaagggtgatgaacactgcagtgtccttgcagaaggctcagactatgcaatatttaaattaaaaaagataaacaccattctaggcacattccgtgccacatcagcacgacccagttcctgttatccatcaagtaggttttaaaatagtccgcgttttttagtcctgcatagtcaacagtactggaaagttggcaggtccacttgtttaaacaaagctcccaagttttctgctggcaggtgtttccagagttcttggagcacaattctttggataggatatttgccaatatacatagcaacaggaaaaaaaatgtgttttcctttgccacagtggagacacaaaaatgccttagatgcaaagcggatattcagcttggggctatttggctctatgt

SEQ ID NO: 34869 - DNA, 1201 bp, Bovine  19866880772109
  misc_feature (1)..(1): n is a, c, g, or t
ntgcgttggagaaggaaatggcaacccactccagtgttcttgcctggagaatcccagggacgggggagctgggtgggctgccgtctatggggtcgcacagagtcggatacgactgaagcgacttgcagcagcagcagcagcagcatactgttctctgtagtggctgcaccaatttacattcccaccaacagtgtaggagggttaacaaggaggctttttaaaaggaaggatgattaccttgatctgacttaaaatgccacagatcaagccatgccccacacaactctaatgtagtggcagtatatcaacttttcaaataattaggttaaaacactttcttgaatacttaattatgaagaaataattgtgacaatgcaatgaatggcagctatttgctgaccttggacgataccaaaagatacaacaaaccgtccctattcatgaaatgacctggacaccagctggtcataaaaaatgcaaaatatactctatctagaaggcaatatagatcatgcacatagaaacatccacctaacttttcacgcttccacacattattacaactgcttttatttaaaaatatatttcatcatatattcatgttttccatgcaatgaagaagtttgcttcacacatacacatatacaaatacacacacatgcactgcttgtgtgaaggtatcagaacacacaaaatacaaagctggcagggtgtgtggggctgggatttgatagttcagccctagtttctcaagatgttattttgcaagtggatttcaaacaaataattacattaatcaaaactctatttattctcctacattggtactgatttcacccacatttatcaaatttatgttccgcctcttgcctgcctctcacttcgctgggcaaagagaatgcacctgactgcatgctcagggctctgctttgaaacgagaggtctgtgaggctgagacatcagcctcaaaaacaaaacaccagggctcaggggcatctttcctgtccctgtttctcattagacctgctcctggaattctgggctctaccctagtttttaactgatctaaactatagaagcaaatgatgattgcattatatttagttctctgaacatggctaaattacatcattcttgtcatgttaggccgtgaaaattaaataccaactaagatttttagaagcagcttaaaaagaaaata

SEQ ID NO: 34870 - DNA, 1137 bp, Bovine  19866880822067
  misc_feature (1)..(1): n is a, c, g, or t
ncaaaaatgaaagacatataagaactatttgcactatttttacaactttccaaattatccccccaccccaaattcttaaaactttggagaactggaggagaaaatcaaaatacaggcacatgtttctgtcaatcattattttctagattgaaaaatgtggcccttcttggcccctaaaacacaccatgtgttatatgggtcttctcaccacacatctgacttttaatattttttctggctcagatgtttataacaagttctccagattaaaggtgtctttggctattttttttttttttttttttttttgacccatggagggatttctgatgatcctggatagaatcaagccctgatgaaagagaacttcagtgcagtttatgggcctgttctggtcaacatataagtctgttgaaatggcttttctcatgaagggatgctttgatccattagaacaataatgatattattgtcactcagccatctttattccaagagctcaagctatatataagtcataagaacgcattcataagagttggaaaacacagctttgtgagattgacaagaagacattttagtatcagaacaagcacgctctctcaagagcatttctttggggtcaggagaatggtaactgggtctgcaggacgttcacaccagcacttttcctctttaacatttgcaactccacagaggccgacatctctattttcgtttcccttggatctgcttggtctctcaggcatctgagtgattccttaatagttactcaccaacaaagacttagcattcaccaaaggacttgagagcaaattcctcagacctgcaaaccacggatgattagcacagccagcctttagtaattaagccatgaaatgaatgtgaaccttggaaaatttggaaggttatcacagaatgtgcccagtggctgtcaagcatgaaggacatctcttccaggagaagcctatctgtcttcaggatgtccagggaacccctctagctctggtgcaatttttccctagctggggattttctaatatttcttaatagctaatataaatcacaaaatttcataatggtagacaagccttctagggtgatttaatatgtatcatgaccaatttgcagtacaac

SEQ ID NO: 34871 - DNA, 2023 bp, Bovine  19866880854705
  misc_feature (1)..(1): n is a, c, g, or t
ntaatatgtttttttttactatgtccccatttttacacttttagtatgtgttagtttcctaaacatggttgaaaatagaacctaaattgttgaaaaatgatgtaatgtctgtagagtgcttggcacgtagggaggtgatacacagtaggtgttcttctttttcccttctttaccaaagtttttttttttcttctagatgttagcataattgcattaaattccgtgactataaatttaaatgtgtctgtttagcttactttagcttacttatttagagtacacatttactcagattcaatttagtgtaatcacagaattgttggagaaggagatgatacacagtagtcatcctccagctttctggagaaagaaagaagtgttacaaaatgacctggtaactgtctcaggctggacttcctgggcagctgctctagatggagcttagtgggcagggtgtttattaagggaaacccttaggatctctgtgggtgctggaggggaaggaaacagctgggcagagttaggagtcaagccacggtgcaggctctgagaccccaccagctgactccatggatctctggagctaccctggccctgcagggtattctggagccgggaccacgtggccaggcctagttggtcctccagatggaccagtcatcaggtgtggatgaccacaggacgtgcctaaaggggttaacttagcaatgctccctgctgacagcattccaaccctcagccacaaaccttcacagcagggatccaggtagcactttatagtcaaattgccacactgtaagagatgtccatagtgctctcgccgtttgtaccaaaacgagagtgtgttggaggaaacccaggctctacagctgactgctagggtagctcatggtagtagcctaataaacctggttgccacgacaatggtttttctttaaccaacctccaaaacagcatccaaagagcaagatggccactactcatggctaatacaaagactacagatgcactgctttgatctctcccaatggaagcaaaagttttctgtaaattaagacttcgaagtagctaatgtccctagcgcaccagctcccggcatttgtccagccatgaccagcactgtcacggtctctgggtatttcttcatttctgaaggattcatttccaaaggctctacccacacttgagcagccacttggtttaataaaactatgtgcatttcctgggactccacagggacggtttgactctagccatacaagtgaagtgtttttatatctgtctagttatacgtatgaggtgtcacagggatggtttgactctagccgtacaagtggagtgtttttatctctgtctagttatacgtatgaggtgtccccagtgtttctgttggtagaagaagcggttctgaagaaaatgattgaatttattggctggaaagaaggggatggaatatttaacccaggtaagtacaattagttattgcctccattaacgcatctgcaattttattcctgccttaatatgaggaacaactccctgcagatttccacatgacatgaagttaggtatgaatcatgctacttggggaggatcaagtttgtgcctttctccagagtatgatattttgtataaactacagaaatgacatacctgccaacaagagagatgtctaaaattttggatttatatccaacacaaatgagttgatctattggtgggaatttgaagggctatgatatgtttatcaagcttatcaattcattttacttgagaagtttcccgaattgtattttgtttcccctacagtctttcttggggaccagggaggagcacatgccctccttttattgattaaagacagaaagaatattattactattaactgtggagacatggataccagccctacatccatagatggaagctttgagtttagaaaaattccagaatgagagactagaccaaaacttctggagctagagatgaggacgtgtgtaaaaggaatgggaggggggtgctc

SEQ ID NO: 34872 - DNA, 818 bp, Bovine  19866880875722
  misc_feature (1)..(1): n is a, c, g, or t
ntattacctaacaggatatgacatgtttatctccctaatcggaaatattcttgcttgcgctcagtggctcagtcgtatctgactctttgcatccctatagactgcagcccaccaggctcctctctccgtggactttttcaggcaagaatactggggtgggctgccatttgccttctccgggggatcttatccgacccagggatcaggaggacacacatctcttgtgtctcctgcatttgcaggtggattctttaccactgagccacctaggaagtcccaattggaaatatatgtacatttagataccaatagttggagagctcatatctagctcctgagagtatgaaaaacttcccaccaaagctgcagaaaggctacacagtttaacagatgggcacacaggggtgaacttacgtctacatggagccagaggccgtgcctctcgcagatgtccgctatctcatccagaggatcgaaggcccccagcacggtggtaccagacgtggcacacacaaggaacggagctgcaccctgcgagaagcacccacacgtcagagttcaaggatcatcatcatcaccacagaatccgtggcacagttatacatctggacatttatgtggtttctttggagacaaacattcattcagtgagtgtgtttacatttttccatcacatggcctctgcctgatatgataagtcacttcagttgtgtctgactctttgcaaccctgtggaccatagccggccaggcttcctctgtccatgggattctccaggcaagaatacttggagtgggctggcatacaaacagcttaag

SEQ ID NO: 34873 - DNA, 1278 bp, Bovine  19866880901811
  misc_feature (1)..(1): n is a, c, g, or t
ncgggggcgcagtaacaggctttactactgagggaagcttcaggttcaccgcaaaatcgaatggaaattacagaatttccataccatataccccctccccccatgcagaccgcctccccccgccccgcatcaacaccctgcatctgtgtgaggcatttgttaaaaccagtaaagcaacacgaaacatcaccgttgaccacagtcagccagagcgaggttcatggtgaggtacaggatcagggttctgaccaagcgtccatcattacagcccccacaaggtcactgccctgaacttcctctgtgtgtgcctcgtaggccctccttcctttcctgagcccccaacaaccactgatctcttaactgtctcaatggtattgccttttccagagagtcagagctggaatcatatgtgtgtgttacagtcactcagtcctgtccaactctgcgacgccatggactgtagcccaacaggctcctccgtccttggggattctccaggcaagaatactggagtgggttgccatgcccttctccaggggatcttcccgacccaggcatcgaacccggggctcctgcactgtaggcggattccttattatctgagccaccagcattcctatttcaataggactgactatcccggttggagtgacatgtgggcattagtctggttgcattagtcaagtccacatgctttgtaaggatccaagcccatcttccagtagtttcaaggacactctctgctaggcccttcctctccagcttcagcctggaccctggcaaacagctgtcttcgtatgtcctgcaggctgtatcagggggcttgacctaaccccctaaaggccccactcaaaaaaggcccatccagaaaatgctgtccacaacagacgacaagggtcttctctcacagctttaactctcattttgcattgcaaatgtttttgttagttcaagttgttttttggaaataaggcagacacagactaaatacgtagcccaaagagtggaaacagactgtgcctctcagagcccgaccctgtcactggggggcccgcacatgggtggccccaggggatggacccattccagcccttccctgagagcagcactttcctgtctgcagtctgagcaacagcaccccacacccaggacctgccctcccttcctgccccctgagtgagcccatgatgttggattaattgtataattcccctaattgatggtattgattgatggccctgttaagagtggagtgttattgttggtacacacgtaaca

SEQ ID NO: 34874 - DNA, 1088 bp, Bovine  19866880914228
  misc_feature (1)..(1): n is a, c, g, or t
ntggaaggtggtgtaagattgctatactatttatgagccaaagaatatattcaacttgcctacaattacatatataggacatgaaaaagttaggagtaaatcaggttcctgtggtccagatataagaacaaaaatactatgccgagcatccttcaagttccaggcactttgcatctgctttctcctcatccagtcgtctggatgacttctttatcgttagtgtgatgctctcaggagtggaaaatgtaaacctccaattttatgactcttcttttaaataactttctagctttcataaatttttcttgttgaatgatatttggagtgatttagccaagaactgatttacattcatgtccttgaggcagtttaaaattttctggatcatctaactctataacagtggttaaaatatttttgccgaagaattcattcctagatctcaatgtaaactatagtccccatgtctgctcacatggcagggattaagaggttaggaaaatttgtgttcacggtgcagagaatgcagcactttcaaaagttgcccttttttgatgaaagactgtttgcaaattaactggagtgcagagttgagctgggaggtatgagagacgaccatccgcttgagttctgtgctgggagttttctccccattttgttcctggtttctgcctctgttgttctctcgtactttcatctgttctcccaccaccagctgcttcctacacagatcaggcacagcactgctgctgggcttagaaacagatgtgttccccatagtcaaagggcatatgatctcacagaggagacggtgagcaaagtgtgcctgcctgttgaattgtttgattactaatttggtaagtgctctgaaggctgcatcagacatagttaattatgtattcaccaggcatcatgatctcccttctgtctcctgatgctcatctaaccagcccccctgacagctaagagtcaccctatgacacagatatgatgaggagaaaatggcaaacaaatgttttggtttctgagagagttggtatacacaagaggagagccttctctccccttttctaccattaatgcagaaa

SEQ ID NO: 34875 - DNA, 1699 bp, Bovine  19866881078650
  misc_feature (1)..(1): n is a, c, g, or t
naaaaaaaaaaaaaaaggaaagacttgcagtcttcactgtaatctttttaatggaagataattcccaagacaaacagtaacacaagcttattttcctgccaaacacgattcagatttgacaagggtgtctcatctctcccactgcttaagaggaaacagggtgatcagatctgaacagaaagagcttcatgaaattcaaagacttgtggggagctgaggcaagacaggcaagagaaaacgagacacttccccaaattttgcacggctcagctctttctgcagtggtttcagacagatggcagacgttagtctcatcttccatcagctgtcagcctgagaccacagtgaattcccttctagatgatctgctagcttttctgtaactcagggcaccacatctttggaatttttttcaggccatcctaatttcagctgttctatcccatagtctctataagtagcttgactttttaagttacaatgtctgttcaattccagctctttgttcaaggagtatctgcatgtaagaacacaaaccttaagcgtgcatcttgagaatggcacacacagacagatcgaacatcgccagccttccgtgaggttctctcgttatcatcgttctgctttgcctgtttggaactttacaggaatgggagcacacggtgtggggttgtttgggtcaggcttctttcactcagtctgacatctgtgagacgcacccattatgctggaggcagcaggaattgttccttttgacttctctgtggtgtcctaatttataaatacaccaggacatcggatgggggaacatcttggcttttattggtggacaatttggtcaccatagttactcatcaaagagtgggataaggcttccccggtggctcagtggtagagagtccacctgccagtgcaggaaacctgggtttgatccctggtccaggaagatccatggggagggtccatgccgcaaggcaactggacccacacaccacaaacactgagcctgtgctctagagcccaggaaccacagctagcaaatactgagcccacgtgtcaccattacagaagcctgcccgccctagagcctgagcttagctacaagagaggctctcttggtaccacccaaagagagagagcccacgcagcaagcacccagcacagccaaaaataaaaggaagagggaaagaatctgaaaatttaaaaaagaggggcaaaaataacagggatttcaaatccaatactgtggttcaaatactcatcagctctgctgcgtattagctctgagcccttggcaagttattaatatttatctgagcttgccttacagggcagaatgtatttagtatccgccattacagagcatactccgaatcaaattgtggaaattggttccaaggataagggccccaaagatgtttgattcccagaggcacatactaattattcgttgttcattcaacaaatgattgtgtagcagcgtccacatcccaggctctgttctagtagtagactggtcagcctgtccccatgacagttgggaagcaggataccaaagaagcaaacaattgaatgaacaagatcattttgctaccaatcagtgtcgatgtagggggcttccctgtggtccagtagttaagactctgcactcccagcacagcggcctgggttcaatacccggtgagggaactagatccca

SEQ ID NO: 34876 - DNA, 825 bp, Bovine  19866881166104
  misc_feature (1)..(1): n is a, c, g, or t
natagtgtggagttcacttggcaatacctctgcatgccccacacacatttaaaaatagttcaacagggctctctcaggacagatggaaactttgtgatcttccccgggcagctatcaacataccttctcttaaagataatctaaaacactgtttttcaaactctgattataacccacagttaagaaattcgttttaaatagtgatagcatccactctaaacgacaagaaacggaaacaaaagtgttctgatagagtggccatcacttctacatgaaatgcatactgatattttctatttccttttattgccactgttcattaaaaaggaaaataaaaccctgacatgacttacaattgaccatataactcaagattaattagtatggtggttcttaatccaagttaacattagaattatctgatgagattttttttaaaaaatagcaattcagggtcctctactccagaccaaaaaatcagaatctttgatgtgggataatttttttttttaagttccccaggtaaccccactgtgcagccaggactgcaaaccactgctctgagggatcttgaccttctgttgaaaaattctgatctagaagtttcagtaggcgttacatttatgttgaatccaggaaactttcaagtgctgagttttcaccagagcacataaaccagggtgattatctgccttatttttgtgctgtgaaggccaatcatcaaagttttatttggggtgtgagtacaagtgaagagtgattttcatccatgaacctaaataaagaacattatgggctcaatatgaataatgctgggagtctttg

SEQ ID NO: 34877 - DNA, 2909 bp, Bovine  19866881188250
  misc_feature (1)..(1): n is a, c, g, or t
naaggtatttttagggaaggtgggcacaatctagatttctttgaatttactcttcagttggttaatgagaaattaaccaaaattctgtttctctccgaacaccattacaaagagaggggtaaggagaaggcagccttcactctactaataaaaaggacaaacataagtcactccacttcttcctgccttgaatgcagacatctgtctaacacgtgggcagccacctaatgctgaaatctgatggtgaggctgagtgagtgacaaccgtcagcactggaactttcaagtcactgaacctgcgcgagcagctgccggcatctaacctgtttgccatgtgagaaagagaaaccccttgtagcttaagttaataaaagttttcaatcacatggagctatgaacatccttaactgtgacacagtgtgtctggtaagaaagcagagaaacatcttaaaatgaaatcacctaaatggaacttttcaccactgagttgaaaaataatcaccatttttctcttttgcaatataaacacttactatctgcatatgtgatactttccccaggtgcatgaggcaaggaagatggaaagtcaggttgctctggtttttcacttgtgtttgggaacaaatatagaaaaatgattctccatagagaagaaaaagccaggattcaaatttccagggccgacttttctctgtgcccagggccccaggccctgaagctggactccccactcaggtttcataagcccagatgtctgattttgaaaagctgctttgtgttggaagagtggagctatgtgtgatagtacgttaatgcgtccaatggttttacgtgtcttcatttagaacacaagaatttaccaaaaaagaaatatagtaatgaaagaatacatcttaaggagttgtggcttagcataagacagctgggttaagcattaaaaatgttcatattcttctacattattatgattccagactgtgattatatatttgtcattatatataaaaagtccgcttacaagcaaagaacacttagcactggagtagaacagacttgaaattgaatcctgggtccaccatctgttgtggtaggggtacctgcagctagctactgattacttattcagattataactttggacaagtcatttagtctatctgaatctcagtgttctcccctggaagggaaatgattaatacctgtcatccaggttgtgggaagaaagtaagaaataccactgatctaccgtatcagctcttacaattatcagccagcacgtgacagatcagcagcctccctccctgcccgagcctctgcaggaacttcccacggagtccctctgataacctgacccactgagatgttcggttcacgccctgcaacattcctgagcaactgctcaagccatttggaccgagttcaatttaataaacagacagattcatctgagtgaagatgatctgtgttgccctctctccagggctcttgtggttggcaaggctgaaagtcagaggtggaccagaggtcagaattattcccgtttggaagtcagagtcgcagatccactggagtaggagtccaagccttccctgaagagccctttttgcagtgacacagagaggaaaaccagatgtggattcatcctctccctgcactgctagatctcaagctcctctgtagattaaagatttacacaggctccctctctgttagtttactgatcttgaataaaggaattctagacaagttctttattcggtacaacttgtccaagaggtatgcagtatgtcataaaagggtgtctgccagattgtttcactgatttttaaaccaagctgacttcttattctgacaaccacagaataagagtttccaaagcttgaaacctaacctactgaatatgaaatgcaagagtcaggtaaattacaaagacagatgatagatctcagtgactgggaaaactgaggcttggggattggcctcagtccagaacttaccctgaatgagctaaggttctcctgagatcatgtgacttgggtcagaccccaattataacttaggatctgctattaaatgtcatggtaccctggaggtcacactgcatttctaagtctttgctaccgcatctatcatattagtttatttggattcagatattaccaatttagacgctaccagatctaaacattgtaagcctttgattaaaagctgtagctttgccagatgtaaattattatgtataaaatggataaacaaggtctgactgtatagcacagggagctattatattcaatattctatgataaattataatagaaaagaatattttaaaaagaatggataggacttccctgacatgccaatgattaagactctgcacttccactgcagggagcacgagttcaatccctggtcagggaactaagatcccacatgccgcagtgtggccaaaaaacccacaatgtacatgtgtgtgtgtgtgtatacatatatatatatatgtatgtatgtgtctgtgtgtgtgtataactgaattctttgctgtacagcagaaattaacataacattgtaaatagcctatattgcaattaaaaaaaattttaatggtagttttgcaaagttgcgtggatggtgataattaaatagttgtaacacttcctgatccccatcatgccgtgtatggaatcagctctgtgttctggggctggaatactgccgtttcagtattacacagacttctctttcagtacacacatgacgggataaaagtcaaacttgcataaaacgctcttctgatacggaggagtgagaaacgtcttcatcacagattcatttgcaagcagctaacatatattattgatccttggagtttataaaaattggagcctattaggctgtttcactaggcc

SEQ ID NO: 34878 - DNA, 652 bp, Bovine  19866881362761
  misc_feature (1)..(1): n is a, c, g, or t
nctctgtccggtgtgctttccccgtccttgtttatgtaagtcggtgatttgtgggctcaagaatttcaggatttatcgtcctaggaaaggatgatgggaaacaagaaaacataatcctctgcagctaacttcaaaacatctggctcatgcggtgtggaataaatgaaagaaatctacccaaaattcaaagagagaaagaggtggtagggagagagatggaagggaaggaagagcatggaagagtagaagaggaaaggaggagagagcacgaggtggagggtgaggtggagagaaggggagaaagagaaagtcaagaaaccagaagtttcagcctcgcttttcttctatgcaagtgatgaaagatgaagactgcaatcagaaaaaaaataaaaatgagggatttccctgaggatccagtggttaaaactccaagcttccactgcaagaggcatgggttccctggtcagtaaattaagatcctggatgctgtgtggagtggccagaaaaaaggcaagggaggggatgggaaggtgaaggagaagaaggagagaaagaaggaggaggaggagaaagtaattgattagtggaaatgtcaggatttctatcttttctttcctctgctcctttttggaggctaaataaaagcagaaca

SEQ ID NO: 34879 - DNA, 1847 bp, Bovine  19866881406519
  misc_feature (1)..(1): n is a, c, g, or t
ntttagaagtagaacattttagatggttcagttcaaagacctgtataggataactacatttacataatacttactatgtgcctggcacggtaacacgtaccattctcacaaaaccctgtgaactaagtgttaccatccctacaaagaaactgaggctaataaggactatataactcgtctgtggtcattccactaataacagtagggtgaggacttttaaagcctggaagcctggtctcaagaatctgtgctcttaatatttatgggagaaggaaatggcagcccactccagtattcttgcctggagaatcccagggatggaggagcctggtgggctgccgtctatggtgttgcacagagttggacacgactgaaacaacttagcagcagcagcagcataacatgtctttattaaaaattagattccatttatttgctgtaggcaagggctttgggagtgtgtgccttaaattctattaggtaatcagtgtaggcagaccatctgttcccctctgctttgcttcgagcaaactgaccagctccaggaaggactgggcaggctggtgcaatggccactgtcaaacggagcctctgtgcacagtccgactctgttacacaatgatccatttacaaaggtccttgaaaaatatatccttcctgacattaggatcaggaatagttacaattgttccaaacaattggttggctttgaataaggactacttggtttaaaaacaaatatacatcccaacaatagaggacctcaggttgtgcattttctttcttcctctctccaggctctgctgggtgccctgaccctcgcttgcatttagatttcaccctaattctttttatttcatgtgtctgtaatttgtgaatgtttttaagttttttaaaacacaaattgatatcagtccactaataaaatgatgtatgagaaaatagttttgagcacttatgcaagttatagaattttacttaggatgctcaaatattttgatgttgaatctgaagtgtgtgtgtgcctgtctgtgtgcatgtaccaattataccataggttgcccagttagaaactctgaaataccacttaaaaaaaaaaattcctaggaaagtattatactaagataggacgggccagagaagaaggaagaggtttgctgtaagcatcagttattaattgaacactctcaggtaaacgaaacaaaaccactaaactacaagcagacccaaagtttgcggctgttgacttctattcatcctattcatggacaagtctggagcagcccgtccaggctcagcgcgttagctccaccaggaatgtgcgaggggctggagtcggatgttctcctggactttgccctggggcgtaaggtggactagacggagatggggttgccctgtacatgttactctcaattagacacaagtcctgccaaacactagcaaaattctcacaagaatgttcctgtcaactttgtagttcttcccagtgaaaggctagaagggcttttgtggaattaagcttgagaagcaacctatactggttggcaggccctgggggcacttcctggttcacctctgaaggttgaagggcaggtcaaggctgccgcttctagaatgaccgaccacctgctttggtctcagccgctctgttgtttgttctctttctatactgagtttaaaaagcgtttagccgctcccaaaacgtcccaaatgataaacatgtgtaatttgttgcagctgtagcgtaaggcttctcaaaatgtgctctgcaccagaatcccctaggcctgtttatttaaaattcagtttccgagattccattccaggctcataaattagatatt

SEQ ID NO: 34880 - DNA, 1217 bp, Bovine  19866881880761
  misc_feature (1)..(1): n is a, c, g, or t
nccatttatgaaaaagaatattccttgctgatttctagtctttttcaggttaaaggaaacacagaaacagaaatttgaaatttaccgattaaagaagactctagaaacccccctttcaatatcagaaaccaaatgttaccttcccctcaaatttcctgtgatttctttttgaaaacctacacataaaaatttggtggggagggaattatctattaacatctgtcagtcttaaaacttcaaagaggtggtgaaaacccctaacaatagcaaatcaggctgaaaggaagctctgggatgtggctttatctaaacagaagccacccacaccctctcagagttaacccctgagttgctcccagagaaaccagcagctgtgggtatagcgggtacaatcagcttctcctttactcagggaccagcagggagtatttcctcctgccaacccccaattacacatagaagagtaaactgaatacaaattatatacttctctgtgtgccaagagttttatataatatttatatttaatggacagaaaaccccatgagatagatactactattattataaaccccattctgtagattctcaaactctgattagagacgcccgctcgtaaccccatgccatgctgtttctaaacttcacatcactgggagccaattaagaatgcctttatacaagcgctcaattggatgaagtggctgtcttcacttggggctggcctaagtgactgcaggccgtccactaagtgatcccggggcgtccaaaggggcacatttgggtgtgtagactgctcccctcggttcttaacgaagaaccaatgttcctgccactgtgcatctctctcctgtctgggaatcagaagtcttacacaaggaagaaccttaaacctttttgctttcttctctcagaacccatcatcacaggacacagcttgtacagaactcaagacataattgctgaactactgagggaggaggcagatgggcccccctgcaggataaagcaactggaaattcattctctattgactaaaactccaagacaagaatagcaggacaattaagggagaaggctgggccccgctcaaaccacatacttctcattccggaagtcaggaaacctccccgaccacacatgcacagaaaagctccctgcaggctggagagggaacaatgtcatgggatgctctacccagaggcctcttcggtagg

SEQ ID NO: 34881 - DNA, 824 bp, Bovine  19866881926649
  misc_feature (1)..(1): n is a, c, g, or t
ngaatggtcttgatccctgtctcctgtacaatgtcacgaaccttattccatagctcatcaggcactctatcagatctaggcccttaaatctatttctcacttccactgtataatgaggttggtcctagaagataactacccagtggtgaaaacatgaaactgtcaaccgtaaatattcaaagttgcccactggactaaaaggttcagaaagttctattgccctgtttgtgtttttctcatactatataagtatggtggcatctgcattattttatctaagccgctaagtaattcaatggcaggtgtcttgaaacaaagctagatataaatatttgatgatcacatttattacagagttaacattcatctcagggtggaatttaatttatagtctaaggatacctcctaatttttgcagagaaatatcacaggagaataaatgttaacatttcaattcaattcaacaacacttattgtttgtaaatgtttgtcatgctgaattgaattaaattaacatttcagtgagcatcactgcaggctctgtgacctatatttaaatatttgaaaaatggtcccttttctgtcgtgctgttagtcacagtggttctcttgccttaacttcccacattcttgttatccagcaagtcctttcctggagtgggcaaaagccatccatgtcccccatcccccgtgccaaggcagagtcctcttaggcatgttacttgaaacaaatatgaaattatcaacttggagaaagcgtctctgggaataacaattattttaagttagcaacatcagtgctttattttcatgatttatttttt

SEQ ID NO: 34882 - DNA, 764 bp, Bovine  19866882256130
  misc_feature (1)..(1): n is a, c, g, or t
nggaatatatcaagttaagtgtgaaggcatgactactcctttaatgtattcatacctacaaattaaattactaaggtttttttggtacaataatgtcctttagccccttcagtttttctggcgtgaaaaagaattaactgaccgcctgtccacattgatgtataaagagaaacatctccagtgtttgagtgctaattattttattggatttatgtaggaaaaaagacccaacaacccagagtatacactgctatttgccaataagaaatagacaagacctaattccaaagtcagctcttagcctcattcctgccagggctacattgcataggatttctgtaagtgagtgttacttcttaagattttattttgtttatttactttttggctgcaccatgcggcatttgggatcttagttctccaaccagaaattgaacctgtgccccctgcacagagtcttaaccaccggaccaccagggaaatcccaaacttattactttcgttattatgattttagccacattccctcgtgtctaatttctgtcttatagtccgtattaaacgagactagtcacgtatctgatcagcatgtataactcattgttcgctcttgaaaacggcttcttctgtggtctgtgattacagtttttgagacagagtcttgatcgccccttagagggtttttgagtcagcagtggattagattctgtttccattaatactgagttttattagaagcatcaagagaaacttttcctcagtgt

SEQ ID NO: 34883 - DNA, 1110 bp, Bovine  19866880121096
  misc_feature (1)..(1): n is a, c, g, or t
ntattcttgccttgagaaccccatgaacagtatgaagaggcaaaatgataggatacttaaagaggaactccccaggtcggtaggtgtccaatatgctactggagatcagtggagaaatacctccagaaagaatgaagatatggagccaaagcaaaaacaatacccaattgtggatgtgactggtgatagaagcaaggtccgatgctgtaaagagcaatattgcataggaacctggaatgtcaggtacatgaatcaaagcaaactggaagtggtcaaacaggagatggcaagagtgaatgccgacgttctaggaatcagtgacctaaaatgaactgaaatgggtgaatttaactcagatgaccattatatctactactctgggcaggaatcccttcgaagaaatggagtagccatcatggtcaacaaaacagtccgaaatgcagtacttgaatgcaatctcaaaaacgacagaatgatctctgttcatttccaaagcaaaccaaacagccaaattagcatccaaaattattaattgattgaatttgttgattcactgaacacacttggcaatttcacctaaagggtcagataagcagagtgtgtgttaatgtttatttactgaagaactctcttattcaccaccccatagaattatatattttaaaaatcaacttcaggcttagaaacaaattgttggatgttcacagaaatgttgttgtaaaatgaatgaatttgtcaccaaaaaagaaacacataatcagactggctgaatgtaccctaattagatctcagccttgggttgacactgacacatgtgttgaaccatgctttcagcaagatgaagtctcattatatgggtggtcatgcctcttgctattctgctgttataattttaacacatttttttaatgtatacttcgtgtttcttttctttaacttcagccggagtaaatgagatggaattgtaagtcactcatagaaagatttaacatttaaaaacttttgaaatgcactgcagtgaagcattgtagttgcaacattaaaaaaaaaaaaaaaaaaagtagtgagtgccttaccaatataaaaaaaataagactggatttctgaaat

SEQ ID NO: 34884 - DNA, 1403 bp, Bovine  19866880666989
  misc_feature (1)..(1): n is a, c, g, or t
naaaatgagtttgtaagccgactgaatggactaagagagagaactatatctaacaataatttggcatacccactaaaaaataggtacagtgaggaaacacatataatcatgaaatctatgaaagaggtattcaaatgtaaataagagtaatgcaaatataacacaaagcaggatatttagagccatttgattgactaaaattaatgtctacattaccaaatgttgaaagatcagtaggatctcttagtgctggtgatagtaaaaacatatgacgactttgaaacacaaatttatattattctgtaaaattgggcactcatataaactataagcccagtaacttgaaatttttgttcatacctgggacaaaatgctcgcacatattcaccagaatgtataaaaaagaatgttcatagcagcaccatctataaaaagagaaaatctggggaaacacacacacacacacgtgtacaaatcctcaggagaatgtaataacacagtagaatagtatatacttgtgaaaatgaactacagttgcatgcaacaatttgagtgagactacttaattcagatattgactgaaaaaatgaatttctgaaaattatatgttaagaagttaagaaaatagctaatactatcaaacacactctctgggatctggcatttctccattcaaaagttacccttttgtgtcttatgaaagtttcaacagagaatacatttttaatgtgcacttgccctggtaacaaagagtgtccaatacttttagaaggaagaggcattaagacaacccagagaaaacaatgtctggctgaaataaggcaagcggtcatttatgaaggtgtccaggcctgagaattgggcaaggccaatgaaaacaaaatttgaaaggcctccaagtcaaccattccctccatttttattctcccaagagctgcactgaaacatggctttaagaggtgaatttggatatacttgagcagtctctgaatcttttcccaccaggatgggccaggccacttccctatattggtgcttaacctaatttggaatcctcttttgcaaaatgcctttaccacctgcctgaggtgaaaggaacgaagctcatgccaactgacggaaatgttttctgcaaggctgagttaacagggcaaccttacattatcttttgctgaataaggaaattattttttccaacagagaaggctaagaatgtacttttctttattctctcaattgaaactcaggttaagtggagagcagccgaagcagcagatttcacatattgggggtgatacctgatgtgcttctatcttgaggaattcatgggaaaggaaagtgtgttttctcatagactatccctagaagacaatacaattccttcagtggcatatcttctctgg

SEQ ID NO: 34885 - DNA, 1220 bp, Bovine  19866880670860
  misc_feature (1)..(1): n is a, c, g, or t
nttttgatgatttgtaacaaaccaaaacccatcatcacttcactggagtccttatttgttgatttcttatgcaatgaaatatgcatctgaagaaatttgttttcccctctaaagattgattttgcattcaaataaaatgtgatagttagaaatgtggatgtaagcccatgttggatttttgacatcttggaatttagtaaaataaatagaaaaaacagaaaatgaaaatttagatagtatctattgttaagtagaagagactctggattaaaagttataggtagtgataccaaaatcatttaggtcttattttgtgactctaaaaatgaagctgatcgaaataggtaacaagagcattttcagcttaaatagtcaatgattaaatgattgtagtcaatgaatataaggcatgctatttttctcattggtattactgttttttttttttttttttcctttttgaaaaaccaaagaagagtggaaagaatggacaattagaatatggaaggtctttagaatgagaggaaaagggaagagccattaactccaaccaagagtaggcagaccacatgggggtctcagtctagtcaagctcccaaaagacagactctacctcaggtagtttggaaaaaaaactttgctgttgtgattttgttttaaacatactacacaacagatgttccattacacttttctgtcagaatgtctaaataaagagaatggattttgcttgtttctttgctatctcaattttagaagtcttaattaggacattcaagtaggttgttttctgtgtttgagatggaattctcatgaagccatccccagaggtgctcatcctcattccagctgctaaggaacacttgtgcccagtacacattctactgtgacatgaagggcctcatttcatcccctggcaagggaggtgtcaagagaacaggtttttgtctgaatcatttgtcattttcctgaacatctctgaaatattgggccacacatataaacagtctgattttgtagccacagaaatgagaagaaagtgaaagtgaaagtcactcggtcgcatccaactttttgcaaccccatggtctatacagtctgtggaattttccaggccagaatactggagtgggtagcctttcccttctctaggagatcctcccaagccagggatttaacccagatatcccatactacaagtggattctttaccagctgag

SEQ ID NO: 34886 - DNA, 1429 bp, Bovine  19866880716990
  misc_feature (1)..(1): n is a, c, g, or t
naaaaaaaatatctgggacttttaaaagagaaaaaaaagaattggtgatcacagatcagcataacaatatgataaaattttcaagaagtttgaaatagtatggaaattagcaaatgtgagcaaatactgttggaaaaatgatcactaatgactcattcatcacaggattcccacaaaccctcaaacacaaactctgtgaatcacaataagatgaaacacaagaacatgagttatgcttgtacagaaggaaaaaaaaaatgaaagccaaatgtatgttagcgtattcagcaaatagtaaagtgctagcaaaatatgagctaccattattattattattgttattactatacattcacacactcaaaaatacgacctatatttttacattgcagagtgccactgaggattgttatatagggctgtcaaattataattttctgaatgtttttagatgtaattataacacccattcattttccttcttgccttaaccatcaccatctctcagttggcttactactaactaatagtgtcctaactagtcctacccactcttgtccattctgtatgctgctgctaggctgtcccttctgccatcagatttgattttatgatatttctgctttaaacatgaaaagttttcctattgtgctaaagacagagatcaagcatcttagcctggcctgtacagatcgtccttattctccttctctaattcacttcattgctttctacttgcctcctcacactctccaccatagaaataatgaactagttacacgcttgcaaaaactttccgtgtccttacagcttttgcctttactgttcctctgtctggactgtcttttccaacatctggactacctagtgctaaagcagaacagaccagatagtaacattcccttaagctttaccagtcaaagccaacacaacttcccataaactcctgaatctgtccctattatgacactgcatggtttacttgccccaactaagtgaaagctgcttgagaacatggatcatgtcctttttaaatcttatgtaatcagaatttagcatgtctggcacaattctgatacacagcaaactgcttcaaataacatagtaaatgaataaaatacatggataaatagaaaggaggaaaggaaagaaaggagggagaaagtaaagaaaagagtatacaaggaagaatgaaaaatttatgtcctcttactcaagaagaatataaaaacttaataaccttggttttggaggtatgaagatgggatcagaagcatatgcttctgtaagttccaagtgttatttttagagaaaataaattatagtgtgtttttgtatagcaaactgtaaacctatcacctcctgctgtaaatctgaccctccatggaataacatctttcctgtcatcctcagtgtttttcataagaca

SEQ ID NO: 34887 - DNA, 1416 bp, Bovine  19866880729549
  misc_feature (1)..(1): n is a, c, g, or t
natgcctgacatcacagtatttatccctagaaataatgacaccatggcaaagcagcaatgtgactgcattgcaggaccaagcagtgtagcaagggagaccctaaaggcagtgcttcatatccagatacaaagggattcacaatgaacacatcaccaattttaataaacctgatgaaagttaagtagattggatatgaaagtcaactatacttgagatcccctgcttgtcttagagaccctctttaaattaagactttgccaggtgattaagaagaacaccagtgcttcaaagggaatcagagtcttgttgtctgtggctccacgggcgaccagttctctttcccttcggtccagacggaagctttgttctcccgaagttgttcaggtgctgagcctgtccaaacaagggaatcgagggaggctttacgaccctgcacctttttgaaaagcagtgccactccctcggctcgaaggccccgaacatcaaatgcctccctttgccaggcagcttggctattccccaggcattttcaatctagttgggtaaaacaaaaattgcataatttgtcattattttcaaggaatgagatgtgccttctacaatcccttccgagttaaatacaatgatgctgaccttcctgtgaatgccaatgccttctttctcacaaagaatagaaataaagaatgggaaaagaaacacccaattgattgcctataatttgctctggtatttgttatttgtgtcttctttgtatgcattttaaggataggtagcagaaaaattattttcccaagtctttattaaagagaagccaaatcctctgggaaaagctgggactggaagccaggacttctgagttaactgcaagattcaaaacaaataaatcacatcaatttaggcaagtcacaagtcatataatcattcaatttcctcatctttaaaatgagaattaaaatgatcctctctaaatatatcccatttaattatggaactaaaatgaacaaaattgataagaaagtgctttcaaatgttgaatattctctgtaaatgtaaagtagtttgaatgagaaataaagggggccagaattcttagacaggagttctgcttctctttctatggtgaaagcttcaaatccaagcagagaggggaaccaagagcagagaaaacaactcagaaaaaatcactggaaagcaagggcatcctaaatctcatctattaagagcaaagaaaaacatctaaaaacttccacccatatttttttgtgtacagtgcttttctgctgccacttggttacaacaatagtggagaaaagtaggcccataaagaaagattgattgctgggaagatgatcaattgccactgtgaaaggggtgcaaactgataaatgtttttttttcttcccctctcttcacaa

SEQ ID NO: 34888 - DNA, 2012 bp, Bovine  19866880870702
  misc_feature (1)..(1): n is a, c, g, or t
nggcttcccttgtggcttagctggtaaagaatgcgcctgcagtgtgggagacctggttcaatccctgggttgggaagatcccctggagaagggaaaggctacccactccagtattctggcctagagaattccatggactgtatagtccatggggtcacaaagagtcggacactactgaacaactttcactcattttctctgatcctgggacttccctggtggctcatagggtaaagagtctgctcgtaatacgggagacccgggctcaatccctgagtcaggatgatcccctagagaagtaaatagcaacccagtccagtattcgtccctggaaaatctcatggatggagaagcctggagggctacagtccatggggtcacagagagtcggacatgactgagcaactaaccctttccctttccctttctttcctctgttgctacttggccactagctgagaatcccagattttccctcacaattagcaaagagcattggtggcaagtgcacgtgcctcattcagcccatttcttgctgaggattgtctgtggctgttttcagggctgacatatttctctctgttctctggagtgagtcaggagaactgactcagggaaggcattccaagttctttgtgcagtggtgtttaaaatgcaagatccctttctcggagagaaatgacttgaagggcttcaatgcaaaccccccgttctgctctccaagcagctgtgaggctggcagaccctgcaggcagagaagggactggcatgggccatgatgatacatattcagcagcaagaggacttgattctgcaccttgctggttacagctgccagatcatgagcgatcgatagagaactttgttaatgatgtggaattcacttctggcacactctgcacaaatacatatgcaatatattattagtgccttcaactatgggccagtccagatgtgatttaattcaaagtctgattatcttttcctttttttttacctttataattggaacatcattgatcagattctgcttttaataaaaatggcaaaccatgcagcattgcttgaagaaacttatttggctgcaaacatcagaaaatcacaaggtaggggtaatgaaatgacagcggatgctgtggtggaaaaggaaagccactcacaaagtcctggagtccacgtttttaagaaacatgaagcgggtggattatctttggaaattactagagaagatgtatttatatagattcctttccaaaagatgaatccaatcatcatcccatagataaatgcggagtcttaatggcaaatgttgatttaatattcgagtctgagtcttgcagtaaaaagactgaattgcattagaagagctgggctagaactgggcagacacggaaacctaataccacagcaaataaatctggcagcacaatttaaaactgaaaagaaatagaaagataaatgatgtcataaaagattcacaggggcgtttttaactgaactgctaaatattttaaaacagaatagccaaggccattttgtattagaaacccaaatgagtggctctctcaatttattaaattgagttccctcagtgtttattgggcctggtctatctgaaagattctgtttgaggcaccggagtattggaatattacccaaggatattactgactagtaaggaagataaggcaagtagcccaacaatttaaataaatactataataatttaggaaaatgaatgacaatcatatcttcattcctgcaagcccattttaagcaataagtctagagatgttgcctcctacgaagctcctatgccatttgttaaataacccaagtttcttgtctgcaatcagggactaggctcttgaagtggccttgccatattggatgacaagtgtgccatcatgtcagatcatctgtttaactggagtgctgggttcaagaaagaggacaggacaggcagaacaacaatagaggcacttgcgaatggcaagaatcatttctaagag

SEQ ID NO: 34889 - DNA, 1843 bp, Bovine  19866880900162
  misc_feature (1)..(1): n is a, c, g, or t
nagaggagtactagactgcaactccccctagaaatatggcttctatttagttatttccatgatcaacagcaacttcctgtgtctaactcaagcatcttcagtttgccctaagtcagttccttctatgctaagtcacacagtaataggggatggttgactgagaggtcattgaaattggcatcaaccaggaagcagtccttgaagaggaagaaactgtaatctggagaaagacattaaaacacattgtgctgtatggtaaggtcaacttgaattgttgataagctaaccctgtctctagttgcccttctgtaaaaattaaatctgtttctttgttctgtaagcaatactgttttccatgtttcttttagatttttgtattcaggtgttcagaggttatcatcacaaagatggaaaataaaggaagtaaactgagatagaattataaaatacatttaaagaagccacaaattagaaaagccataagcttgtgctgagagtgagtgagaagatgatccagcaaaaattaaggtgaacatgtccaagaccaagtgaggtcttatacattgggaatggtacttggtttctctctttacatttctcacctctaattcttttgtcttcctttcactgtctgcagattttctcttatgtattcaatatggctacctttacataagggggctaaatgctttcttgtttctagttcagaaaaaaaaaattgtgaagttcacttcacagttgaagagatcaattgtttagatcatgagtacccctctgcatctttcgtcatcatcatggtcatcatgacgtgatatcttgatgtattaagctaataatggtcaactctagagttgatagttgggtaaatctcatccaaacttccagtacaaaaatggaatgaggacatctttctatagaagctattagtcttcgtggaactattaccctcatggatcactgacttgttgtggcaaaagggctatgagccatgttgtgaagggccacccaagatggacaggtcatagtgcaaagttctgacataatgtggcccactggaggaggaaatggcaagccactcgagtattcatggtgtcagaaacacatgaacagtataaaaagacaaaaatatatgacattgaaagataagcccccctgtttggaagttgtccaatatgctaatggggaagagtggaaggcaattactaacagccccaagaatgaagcagctgggccaaagcagaaacaacactcagttgtggatgtgtctggtggtgaaagttaaatcagatggtgtaaaggaattgataggaacctggaatgttaggcccatgaatcaaggtaaattagacctggtcaaaggattctctggtggctcagagggtaaagagtctgcctacaatgcaggagacctgagttcgatccctgggctgggaagatcccctggagaagaaagtgtcaaaccacttcagtattcttgcctggaaaaatcccatggacagaggagcttggtgggctacagtattcttgcctggaaaatcccgtggatggaggagaaacctggtgggctagagtccatagggttcaaagagtctgacatggcactactgagtgactgtactttcaagtagaagatggctttataaatcaatgcactaaaatggataagaataagagaatttgggaggagccaagatggcggaggagtaagacggggagaacactttctcccccacaaattcatcaaaagagcatttaaacatcgagtaaattccacaaaacaacttctgaatgccagcagaggacatcaggcacccagaaaagcaacccaactcttctacaggag

SEQ ID NO: 34890 - DNA, 1755 bp, Bovine  19866880914527
  misc_feature (1)..(1): n is a, c, g, or t
nttgggttgggaagttcccctggaggaggaaatggcaacccactccagtgttcttgcctgggaaatcccatggacaggggagcctggtgtgttatagtccatggggtcacaaaagagttggacacaacttagtgactaaataacacccaagaacacgtagaaaacactaggaatgcatgcccagaatcacacagctaccctctgacctggaatcatatatgtgtgtgtgtgtgtgtgtgtgtgtgtgtgtgtgtgtgtataataatacattaatatattcaattttaattattcattaaattttctgaattcttccaagtgcatctgagggttaccagtataatcactggtagtatcaggaagaatctaattgcttgactatgaacactccaggaagtagtttgtaaacccacacttagagccaccatgaccaagccactcaaccaatatttagtaagtggtacaggcactgtgttggtatcacatttgatcctttcaatgttcttagaaattaaaacccatatccacaagtcacacactatttctattcataagttgataatttaattctctcctcctctctctgcctttccactctctccaacaatgtagcagagtgatgaaaagcagagtactgcaacaaggatgccaacctcagcttcataccataagattcgtgtgaccttggaggaactgagttaacttctctatgattcacttttctactctacaaaatggaagcaatccaagcattactttgttgagtgacccattaaatgttatatatgttggacacaaagagactcacgttcaaggtcaacacttagagtcaagctagaagtatattatgcaaagcataatacatcaaaatatgtttaattgttaaatggagtgtatacaccaagggacaaaatctaaacaatgcccaacagatagcattgtggttttgaaaatggctgagtggataattcataaacaatgcttatttccccatgtaatgccttcagcagctcaacacttaaggcaatcaaattatcctaaaaaggaaaggaggcctcacaaatctatgacaaaattccttcaaactgaagacccaagtctagtttctacctagccacagtgatagacaaatccttttcatttttgttaccatttatcaagcatccacagcatagtttatatttagaaaaaaataaagaataaaatcccttctttcaaacactttatgttctacttgggttgctaaagtatgcatttgtaaaaaaactccattataatatgtgtaattaacctcaaaggaaattgcttttgctatgaaaattcagagagagtgtgaggacgctgtgggctaatctgatcagaaactatgatatgatggaaatatataatatgagatttaaaagtccagataacactaggcgaaagaaaatctggagagatcattttgggtatataaaccagagtaaatccacaaccatgaaaccaaatgaccagtgtatgtaaagtgtggaaaatccaggaggttctgctaggcaggatgaataagcaaaacacctttttggttcctttaaactttacatatcttctggtgaagagatacacaaagtttgcatgaaataatttggaaaataataaaaaatggtttgactgcaagataatatgagccaatgatgaggtatgtgggtatttaaagactaacaaaatttgagctacattaatagaattatggtggcttgaaagcaagagagtaataga

SEQ ID NO: 34891 - DNA, 1501 bp, Bovine  19866880944075
  misc_feature (1)..(1): n is a, c, g, or t
ngttggggaaacacggaaagtcctatgtatctaaaggataatgcacacttggcattatgataagagatgagaaagcaagctggatcactttaaagttttgaaattcatcttaaaacagaaaattctctcctgtttgcaaaataaaaaataattaaagtcaaaatgccaaataagttctatatttaaaaataaaaatttgatgttactgatattagaggaaggagactgtaggtgggaaatggttgaaatgcccaggacctgaacatctatgaactatggcagtcagaacagaattgtagagcagggtctgagttatatttcagagaaaaaataaataaataaaagaatctgtacactagaatgctctgtgctagaagctatgattgttctctaacagacaaagaataagattatcaacttcatttcacaaaactgattggaacacttggattagatgtgcagccacattggtttcttaataagttatcttcgtactttaattaccccgtccagcaagacagagttgattaatgacagatcttagcaggagcctgcctcaaaacattgacatcatggtgaaatacagactagagaatgtccttggcacaaagaggggaaccaaaaacacagtccagagttgagccaagcactttcagatttttttcctacattctcaaattagacaatgcttctacttcctatagcaaaaaataagtgatggttgtggagtataatcactagtgtgtaaattatctgggaatcttgataaaaatatagatatggatgaagcaggtcttgtttaagaccttggatattgcatttctaacaagttaccaggccattcttatgctgctgctccatgaattaattcagagaacagagtgcctaggatggttactgcagcaaagctttcttacgttaaagcacggactgtgactctgactacatctcggttggacagggtgctccagctctctgatttcctgcaaagttcaggatcaaagacagctattttttgcacattacaactggcaaggctcacaataaccagtaagtgcagaaatcttgataaatgtgccccaacatagccataagaggataattcaattaaacactcataaaacatccagacttaaaaatgttgattccaactattccacacttttcatatattctcccttctggctctagagggtttaaatatttttaaattagctcattctgcccagagaggtcttcatttcttcatttgttttatttgatcacattaacttataagctgcctcatatattttgggaatgtgtctggggacagaaatacaataatgagattagcatttcctcccctaaaagttgggctgcggtgtggactctgcttctctgtcatacttgctttcttcaatacagtgtttcgcacataataaatccttaataaatatgtcttgatgtatacatttgaaatttttcattatttatgtgagcgtgaagtatgtaggtttcc

SEQ ID NO: 34892 - DNA, 803 bp, Bovine  19866881128047
  misc_feature (1)..(1): n is a, c, g, or t
ntgttgcttatactagggaaattacataataattatattttaccttaaataatatcagaaaaagtttaattaagacttttaattaatagttgaaagattaatcaatcaacaattatagcaatggttatagggtataattgagcttaattggaggggactgattaatgattaaaataaacctttcagattccttgtcttgaaaatattaaaaaatgatggattttggctcataaaaagaaaatgccaggattgtagacttactgggtccttggtaactaggccatgaaaaggaaaacacatgattgaaataaaagaaattattctattgttcagcctttacatcattatactgataatttggacaagtttgagattaatagaggaaaatatgcatctgaggaagtctataggtaaaggggggaaaaaagaaattgcttgagacagatttctttggaagctaatttctcaggggtgctctttccatctctaaggataaagtggttgtatgaattcaaatgacattcttatcagagcatcataggaatagattcattagagatcagacatctcaaggagacagtccctgtttataggatggcaaagacttctctcacttctatctgatctgttctaatcaaatccaaatagcgaatgggaccaatatcaattcttcctgaagatagttcaattctctttggagaacaggtaggtatctcatttcagggtcatctaactgatgaggatgaatccctcaatgcatagcccagatggagatattcaagctcaggtcggcatgaatgggt

SEQ ID NO: 34893 - DNA, 1851 bp, Bovine  19866881148249
  misc_feature (1)..(1): n is a, c, g, or t
nagaaaggagagatctgtgcttgactgagaatagtttcaaagttatgatcctctgttttttgagattgagtgaatggtgatgccaaagggaaaggagtagaagggaagataaatggtatggctttaatttgtgcattttttatttctgtagaatgcgtatagacatgtaagggtcattaactttcaatgaaagttgaaaccatggaaattcatgaaggaagaagaaagaaaatgaggtcactcagttgtgtctgactctttgagaccccatggactgtagcccaccaggctcctccatccatggaattttctaggccggagtactggaatgggttgccttttccttctccaggagatcttcctgatccagggatcgaacccaggtctcccacactgcaggcagacattttactgtctgagccataaatttcccaataaaaagaatgcatcacaaaagaagaagagaggcaaactacatgaggagttttacatcatagagaatgtgcagaaccaataattggtacatcccctatgactatgagtgtaattcctttcccaccgaggttgcactggttaagttgattgacatctgctctcactgcattgcgagttttgacaactacttcttataaagttcaccacacaaatgagactaaaagtccatggccaaagtcctaggactgttgggagacattatattaccttaaaaatctttataacctggggaggataatgattaatggggtaatcagatggaaggtgtggaattttaaatagtagactgtgtcacttagagtggtttgttactccattggagatgacaaagcccgagtacataaatgatgactgaagcattcataaatcaataattggtaaaatgtactcatgtatagctaagtagattctgtctggtaggttaaataaactgattacagtatactgcaggattcagaggaattatggacaaggttttattcaccaaagaaagctagagacaagtattgttttataaaagcatttttactggcaagaaaagaaggaaagaggagtacttggaaggtgggtctaaagtagcagattgaccaggaagagggctatgatttttggaaatcttgagacagatgatactatgggaattgtgagcacaataagggaattttagattatacttcccggtaccttccctacctggtagcctttatggtaccctggataaaatttggggacattattggcatgttggcaagtgtcacaatagaggtgttatatagggccagacaggcaggctctggcagtttaagggaagagtaaaggtataatgtcaccgcttttaatctggagtgtgtgaagaccatttctgtgcatgtgctcagtcacttcaatcatgtccgaccctgtgcaaccccatgggccattgcccaacaggctcccctgtccatgggattttcccagcaagaatactggagtgggttgccacgcttttctccaggggatcttctcaaaccagggtttggacccacatctcctttgtctcctgtatctcaggcagattctttaccactgagcctcagggacgccctgaagaccatttctcaactatgttaaaatcacctttgaaaaaagaagtaatcatgtgtcacatttcctgatttattctttcatttttgatatttatatcctatgtgaggtctccccaactaattacaccattgaaatgtcctgtgtactgaatccttgtaattgccatgatcttcatcacagggtccttgaatgtttatgtgtgaatgacccttagagataatacaaataaataccatctccaagtttcaaaagctaaagaaaagacatgaa

SEQ ID NO: 34894 - DNA, 1332 bp, Bovine  19866881153190
  misc_feature (1)..(1): n is a, c, g, or t
naataggacagagattcaaaaccagctctgcctcacttcaaagactatttttttttaaattccttctctgctactatgcatctttatcttttagacatctgtctatagaaaaaagaatgaacaaaaaatatttacacagttgtgtgaaacttccaaaatcatattttgccttttggcattttagatcaccttcaagcaaaattaaaatttcagtcattttcaaagtcacccattgttgtagatatctgtcattgtcatgaactatgtaacctgaagtaagtccacaactgaaatctgaaattatctaccaagagatagatatcctggactgaaataaggaaacttggggacaaggtaaaagaacacttaaggtaatgaaatatagagtcattagcactctagcaaagtaatataagcaagctgacagcacaaaagggaagaaattttattgtactttggtacagcaggaaaataagatactcggggcaatgcagaagggctggtaaatttgaaacaaatgaaaggcaataaccttaaatatagtgataataggtctgtgggattcactactgtaggacatgtttaaatgaaataacagtatggactatggggtagataatttaatgaccaataaccttgctggtgttttggctaaaaaagatacacagcatcctcatgggcctgatctgatcagcccaaggacaaggagaatttaatttccccatgaaccagaataaagtattcatcagagtaactagagcttgcattctcatattattaggacctgtttgtgaactagattcccagctcaggtattaaacattacgttgcaatgggccccataggaaagtgatagaaaatgtcagtgtaaaagatcactctttttttttttttttttccctccaatagtgggctaaactgcattgaaccattctaatactctcttctaactgaaaaaaatttactaaataactggattgagagtaagatttccatttatgacattaggaagatgaagaacagaagccaaaatgattgttttctgcattaaaaacaaataaacatacaggtttatgttattcttacttaatttaccttctggatccttccatcttacaacataaagaaaaccaccttttatagtcttcttagcattcgttatataaataaaatgttcatattaggaaaaatggataactagagggaactcataggaaataaaggatacctcctgtccttttaaaaaaatcaataacaaatgttgcatatacatctctgcatatatgtaagtatatttgtattaaaaaagtctttggagaaattaacaggtca

SEQ ID NO: 34895 - DNA, 2533 bp, Bovine  19866881192940
  misc_feature (1)..(1): n is a, c, g, or t
natgatccctgaattcccactcactgctatatacattttgtataacaactcctacttgagggagggaagaacctgggaatacgacaaaatagctctctgctggccaattacagagggagaaggaatctaagtgattactcctactggtatgaaagaaagataacatccgtgttgtgaattgcctgtggaggccacgtagcaaggaaccatgggttacctctaggagctgagcagaatctccagtcaactgacggctagcaagaaaacagatcatacccaatcataccagtgcaaaggaaatgaattttataatatccaataagcttagaagaggaccacaggcctcaggtaagaaccacagtgccagctgacaccataatttctggctgataagaccctgagcagaggatccagcaaggctttattaagacttgtgacccacagaaaccgtgaactaataggtttgtgttttttcagctgctaaatgtgtagtgattggttatatagtaatataaatctcatacggagccctttgactaccactttatttctgaagattgagttcacataaacaaatgtgaacatgtgatgagagaagatgttggaaaaataataccagtacactcgacagagttgagacaaaaggaatttatgggcaaaacagacaacgtgaaactgggttgcctttggtctggtataacctcatctcagacacaggcattcagatcagtactcacttccatgttcatctagttttttatatgcccacgcttgtgcttggtgtgagtacatgctgtatgtttgtatttgtttagtaatgaatcacatcagatattttaggactagttgttaaatctcttataatggatagaactgtgcaagtctgccattgggggaaattttctcctgacctcagctggtgatcagcttatgccctgaagcataagaattgataggccctataattttatccaagctaatgtaacagcagctgctgtccttggtgcttgctctctgattaaattcccaaattagggattgccttttgtaacccgaattctgtcatggtggtaaaatctgacaataactgctcttatttttgcctctcccatcatggagtgtgtcttcaataacacatggaccatctcagaccatcacatattcctctggcactttattagaatttggaattttgtaatcctactgaaaatgagattgcatgctttctaatgtaagaaaggagagagagcccaattcagctctaaaactgcaattgtttgcctacctccagggacacatctcacagattgccatgaaaataaattggaaagtttacaattccaaatcattgcctaccatgtattactacacagacaaaaacaaacactaccaccaccatcatcaccatcaaaaatatacaaaaacatacccaagaactttcatcccttcatgaggggaaatgtattacaattagattagactataaccattcagaaagtgtgtttgttttcttctgctttataaatgatttattatttattagtatttttttcaagactatcttcttcattccttcaggaaaggagcagtttgggtttctgtgtcattaccaaagcagagcaaaagccttcaactgcggactgctgcaatttccaccataacagtcaacctagcaattagaaccgtttgttacagtgacagcaaagagaaccattttcaagcaacaaggcagaagagtaggagctggaggaagccagagcatgctcattcgaaggggactaacgccacacagcagctaatcctggaatagcaggcagtttagggaactgaggctacaagggctgcagtattcgcataaattcatgaactctggtgacaggtctgattctctgagaatgaaattggctcagaaatgttgacatttgaggagagacaaaggatttttatttagaccactttctaaattattttaatattaaaaatgaaaataaaaagatgaacatttccattgttaattctggattagacagagtatttcaggttcagaaaatatctcacaatagaaactttgccaacaaagccatatttattttacaacaaagatttgagatataacttcaacatcttaaatctagtgtcacttagtcatttcccctgattttcatatattttaactaagttaaagttttatcggtagcttgagagaaaatgctgtgtttgacatttttttccctccctttatttttctccttgttcttccttttcttttttaaaatatagtctccttacctttggatttggttctctattctagcaatgacaaactgtataactctgggatctgtcagtgtctcttagatgtttatttctccctgtctctaataaagcaatatacaacttgttcacctcaaataaatcatctgagtattaatgaaataataagatgtgtttgacttttctcagaaccaggtactcttccctttttgttcaagagctattattatatagggattcaagacatagccaactacag

SEQ ID NO: 34896 - DNA, 1492 bp, Bovine  19866881202515
  misc_feature (1)..(1): n is a, c, g, or t
nattgactgtgatttacttaaattatgttggttgggtggtagaaagagttgaaatattctccagtctcttttatttatatattgacttggggtaatactgttttattttgatttattttgagtttcatcatttcaactaattacaaccagaatactcaaatattttcattggttttacatttgaggacagtttcttgaaaaactggcttaaatccaggcaggtttccctctccctaggggtgggattttaacaccacagttttctactgcaactctgaagtgaaccgataaatctcagcaagttcataagggttcacattctattagaaaaggagaacaaaggaacaaccgaattagagacaaatgatgtgaccgagtgccatgaagaaggttcattagaaactaaagacaaagctatgaaatgttcacctgaaaaatgtttgcattttcatagaaaggtctgttctgaattcagtgactgatttgtggggggtcacagcaacacgagtgaaatggcattctttgttcatttgtcctgccacccaaacaacctgaattttaaatctttttctttttgaaatacatttcttctctctttctctgaaccatcatcaagaggcttaattaatgaattagtatttgcagaaatctttgatattctaagatgaaaggttttgcacgagggtaaggcatcagcgccagcagtaaaatgtcctcttgatgacagaatgcatgaagtgttaggctggaatacatttgacagctacaattaaagaggtttgatcctgttttcctgctctgtttttatcatgtacattattccagaggatatgaggctaataggaaagctaaattctcattggccagaaattgttgatctatacacacacatacacattccccagtggttaaggcaggtggaaagtttatgggcagcctctttctggggcaataaaagcttcttttatttcaaattctctttttacaccagttgctattactctgaaaagctcctagcatttggaaggcaataagcagggcataaaatccattctttcttgaacaggtcccattcctaggactgcttttaaactaactggtttacagcaaagaaacagacagctgagtctcctgtaaagcctctcaggaaatgcaggggactgcaagcctgctaactagctgagtgcagtatttggggaatagatacctgacactgactgggtctgtcactattttcttacccgactgaaattctttgaatcttaaataagattaagttgatagaattgatatagactgtggatagagaaaatgccttttcagttcccattttctgaagaaatcttctttttggtttaggctcacccaaagtctttcatttgagaaaatcccagggctagctccctcttatgttgtggtagggttggggagtgaatgtagatttgggatacatgttcagtgcctttcctgggcaatcaattcagggccttat

SEQ ID NO: 34897 - DNA, 1091 bp, Bovine  19866881245152
  misc_feature (1)..(1): n is a, c, g, or t
ngaggagctgtgtgtccctgaataaaatgtcgtttttattgtagttttactaaggattgtcccaaagagcttcataagtcttggtttccttggagcttattattgcttagaatagtgccatgttgcactctcatttagcatagcacatcagagtatatgataaatttattttttctaccttaaattcccacagagcgcaatgatagagacataatgcatctgcatacacatgcaaggtagtttgaatttaatgcatttcatatcattaaagttaacatttcatgtattacattttcttttagaatacacttgcatacatccatatccatatagatatatgcacacacacacacaaaatcccattatgcagatcaatttacatgatcacaatgttcatatccataaagcagtgaacttcccaaatcagatgcatgcataaaagcattgatgcataaaatttccatcttgcaagtacagagaaagttctagtaggcatttagtgccatgacaggtcacttaggttacagctagctatataggacatgctaataagatttaaccttctttgtctattgctgaagaggggtaaagaagggaggggtaatactttcttatctttgaagatatcaaagaaaattaaaaacaaccactttctctatgatccctgtggctgaatgtttccctttggctgaatatttttgagctacataaatgaggtatacagtaaaataatatatatttttaggggaacaacatgaagtcttaatccagtctctagtgatcacactataagtgacattgataaaacagaattttatggagtatgtgtacagaattatttccatctccatacttgatatgacttttcatttaaagtaagctccattgagattaatatttaaaatggaaagctaaaaacccaaagtgccatatgacaacacttaagtgaaaatttattagacctgtcatttctgttaattattgtcatttcagctaattactagccatttctgttggttattagatgtgtcgttttcttttctaagctgccatgtaacaccatctctgattctgctttcattaaatatttt

SEQ ID NO: 34898 - DNA, 781 bp, Bovine  19866881269435
  misc_feature (1)..(1): n is a, c, g, or t
nttgccctgatccattgtttcaaactccttccttgtttttagaactgtagttaacagctacaatgcagtcaatattgctttactctatataacatctcccatacaggcaatattgcaaactccttttttcttttaaataatacagtaaccaagttaaataataaagaatagcccagagagagagagaaaaaatgaatgttgtgtacaaaaaaggaaaaatcagcccttctattttatttgaaagaaagttaggagtttatgaggtagaggtccaggaagatcatacatcatgggaataactactgtgttttcaagctttctagaatcatcctaattttatgaaggcaattttgaaatgtcactgtgaagtgatgagctttcagggaaaataaaaatttgccaataaagcaacattgtattatgccatggtaaaagaagttggcttcaattttaactctgaaatttgagtgtagaatgtacttttgtgaaagatataaactattttcaaatgacttatatagtgtagaaagttcttgtattaaaaaaatgcatttaggaataaacatgggatctaataaatattctaaatatgtggaacagagaatcattgttaatattgttctaaacaatgcataattgtagaaaatcatggttagaattcttacctgctcgggctgttctgtaagcctgttatacttgccacgtccaatttctgtagggccagttctatacattctttgagaatttggttcaattgaagcatcctctgagatgaagctcc

SEQ ID NO: 34899 - DNA, 888 bp, Bovine  19866881331190
  misc_feature (1)..(1): n is a, c, g, or t
nttgatgtgaaattaaaaaaaaaaagataagaagaaacaacaaacctctgaggttaaataatgattttcttatttttatatcccatacttcttatttttgtagtatcaatataggttggatgaaataactctctagcaaatttctctaggggaataaaattttctgaccatccaggaaaataattatcaggaacacaactactaatcaacaattatacagaatattgatcatgctagtctcatctttcatcttggccaaaatatataaccaatggtggataaatcatgcttatcctgttctgtttatttgacataaaactttgcagtcaagactctcactctagtcctgccaacgcagatgcccatgtttcaatcttaactagttaggtaacaaagcagaagaaattttaaaacaagaagtctctggtcacggaacatccagatttagcttttcccttgtaagtacattgcctcctttaattgttccctcaaacagacccggaagagaaaacagttttcatttgtgaaggcaaatgtaaaaatgaggaccagtgaggtctaaagtcggagaaggcaatggcaactcactccagtactcttgcctggaaaatcccatgggcgtaggagactggtaggctgcagtccatggggtcgctaagagttagacacgactaagcgacttcactttcacttttcactttcatgcattggagaaggaaatgacaacccactccagtgtccttacctggagaatcccagggatgggggagcctggtgggctgccgtctatggggtcgcacagagttggacacaactaaaacgacttagcagcagcagaaatctaaagtgtatctgagatagagtagtagagttcaaaggggagtacaa

SEQ ID NO: 34900 - DNA, 1100 bp, Bovine  19866881369186
  misc_feature (1)..(1): n is a, c, g, or t
ntatgggatgcgtttttcccaattactagactcacaattgaactttacactgtgttttactttcaaatgcctgaactcagaatggaatttctaaaaatctgctttgtagaggacatacacagtgaaggtgaataagaaaaaaaaaaatctgttttcagaaactgggaagatgatggtatattaaaagtattcctgtgaaattggaggaggtaaaaaaaaaaaaaataacaaggctggccaagcttctttttgtgtgaaattcagtcatccattgctgctctggtcccctgggtttgtacttttcctctctccatgactatctatcactgcttgtaaaactcttgcactaaaagatcttaaagttcacagtaaagcaatgcaattattctgagtcattccttcttaccttttaacctaatcttcagaggtgccgagactgaagaagcgcggttcccaaaatgagcctaatcttgtctctgaaaatagcacttccttgccaagaagaactttctccttttgaatggctgcaatgatgagaaaaagaagctaggcttcattaatggccccaggcatggtgggcactatgtctgagcgcccttgctttctgcagagaatagcactgtctacttactgacgctttttctttttcccctttttatccttataatgctcttggcagaaagctttgaaatagctcattactgatttctaattcaataagttaaaggagtgaggggaaaggcaatgcagactcatatttaactataattctttggaatgcctactatgtggcagacaacaggtaggtgctgccatgacaaccctctaaatcaagcattatgaacttagtttagtagcataaaggggctaattcctatattgtaagacaatcatcacaggtggggaatctgaacccagatcttcagatgccaaatgcattgatcacttcttgacctttattttttccagtttattgaggtcaaattgacatgtaacattgtattgatccaaggtgtcagtctgttggcaatcaggggttaatgaacaagacagtaagtagcaagaaagggagataggagatactaggccacttttttttt

SEQ ID NO: 34901 - DNA, 1414 bp, Bovine  19866881390256
  misc_feature (1)..(1): n is a, c, g, or t
nttttactgatagtctataatattctaggctctggaatacaatgataaaagacacaactcttatccacaaagggtttatatttctattcaagtcattctcataatataattggaagtgtactatcacggaatgattctcagtggtactgcataacccagaatagtgcataaatagttagatgatatttatatttggactttaccagaagaagcagttcagaagaaagatcgagaaggtgtggacacagaggttgaaaataataaagtgaggttaatgccttataatattttctatgatttcatcagtttgaagtaatatgacatgcttagcccttttttattggatatttgcttataaccaattttagttttataaataatgttgaaatgaatgatttggtacatagagcttttatcttttttttttgaattatcctgttagaatgtattcccaggcatagaattattggcaaatataagggtgtgtatacagtgtctgtacacattccaccctcccagctgttgtttataatcctgaatagcttttgaaaaggcttataccaatttacaatgtcaaaagtaatatatgaatgtaccaatttctagttttttggtaatcttatagttcctcaaattttgctatagttccagagaagtggaagtacttttggaggatgaaatatttgaccaaaaacatgaatgaaggaaggaacccaacacatttagggtatagtgatgagtatgaatagcatgtttccaaatgaagcacattaatcataaaaatcataaaattttagcatataattttgtaatgtgaagcaagaaataaactactgtttgaaagagaagcaagaccaatattcttcacagggatttcagatttgtgcattgggttgtgacacaatccaaccttcaggaaaaaatcaccattggtgtattttatttccacagatatttatgaacattatacaaaaactttcagctgacccaagtccttgctcttatttattcatttctcagttggtaacatggacagtgttttcagatgagccatggacctagatgtttttcttacagtgagtcccaccaagtccttagtcacttagaagtgtcaggcagaaggaactctgacaggcagctctgtcaacctgaacagagagttttagatcaagcccagaaacattactgtcaaaaattacaacctcagcgttgacataaatgttgacagcaccattttcactgatagtggtatcagagcatattatgattcacaaaggactgtccaactagcaatgatttagatgaaatgctcccaaatagtaaagggagaggaagggaagaaacacaatataaagagtgcaggttacaaaattttatcattctatggcagcaaacatctctcctttctcataat

SEQ ID NO: 34902 - DNA, 1044 bp, Bovine  19866881407460
  misc_feature (1)..(1): n is a, c, g, or t
nctggaaaaggaaatggcaacccactccagtactcttgcctggaaaatcccatggacagaggagtctggcaggctacagtccacggggtcgcaaagagtcggacacaactgagtgacttcactttttctttcatgcagcatagtgagagctgattagctgtttactggaggcctagtccacagctctgcagatcttcagggcaagaggaactagctaccagctacatgaagtgacttgatggggtcagaagagcgtttctgactatccaagtctgactagctatttgacacttgcaacccaagctgctgctgctgctaagtcacttcagtcgtgtccgactctgtgcgaccccatagatggcagcccaccaggctcccccatccctgggattctccaggcaagaacactggagggggttgccatttcctcctccagtgcatgaaagtgaaaagtcaaagtgaagttgctcagtcgtatctaactcttagcgaccccatggactgtagccaactatcctttagaaggtagtaaactatcttctaaaactaattcccttacacaaaaattgctgcttacatttttagggaatttgcactcctctgaatcccatatgagagctctacaagtttatagattcttttattttaataacagttgaactacattctgaaaagcacccaccccacatgttacttttttgtatatgagaactagaaagactaacatttttccccaggacttttaaaatatgcttttgaaaaagagcctttgaagctactgtaggcaaaagttattttaagtctctgttaccatgttttttttttttttttttccttctgttctaatgaacaagtgaacttctaaaaatttcagcttctaatagtggctatgagaaagaaactagaaataaagctgtgtggaggcttgctctatttcatgggactttctggaggattctctattgatagaatagaataacttcaacattcaccagtttttcttctgatatattatatagcacaggttttcctttacttattatg

SEQ ID NO: 34903 - DNA, 1002 bp, Bovine  19866881558076
  misc_feature (1)..(1): n is a, c, g, or t
ntaattgcagcatgtcatttctatttacctgatgaagcattgaacccagggccacctgcattaggagcacagagtcttaaccactggaccaccagggaagtcctctcattttttttttttcttttgttaactatagaagctaataccttacactgattttcttatgaagcacttatgaaaaataagtgggacagtatatacgaagggcttccttggtggctaagatggtaaagaatctgaaagtacatgcaatatatttttataattaccattaatacattttaataccaaaaacttaaaggaaccaaaggaatggaaaataattttgctaagaagggaaagaaacagttttgtctgtacaaaaagaagatggatatcattcatatcaaatgtctaaagttatgacatttcctttcctatatgagtctgtgcacacttagggtgatagtttaatcgctaagtcgtgtcagctattttgaccccacggactgtagcctgctaggatcctctgttcatgggatttcccatatactggagtgggttgtggtatccttctccaggggatcttcctgacccagggatcaaacccatgtcttctgcatctcctgcattggcaggcagattctttaccattgagccaccagggaaattagacctaatatttgtgcctgcaagcatgtagatatctgtatctgcaagcatgtagatttacacaagcagattagaactgcttgcttcctttctctgagctaagctggaatggttccagaatgaaagggatcctgattaatcccccaaaccacctgcaggcctaaacatcaatggaattagctcaaaaagcctgaaaaagactcaaagatcacaggatgttagagctagaagcaattatcaaagccagctctccctacccccattttgcaaacttctcagatgcagagagaagttttgagttatctacccaaatgcactggggtaaatgagagagcaggaattccaagtggg

SEQ ID NO: 34904 - DNA, 5151 bp, Bovine  19866881647828
  misc_feature (1)..(1): n is a, c, g, or t
ntatattttgttaagtgaaaagaaagtaattctgtcctaaagaggaattaattttaaaaaataaagggaaagaatatgacacaattttaatgtaaaaaagaaagttgcataaggtatgtgggaaaaaaaagccttgagagaagaattttttacatggtcaggcctggctaagatagaatgaatttagttgagtaaatgaatgttaacattaaaagtaagctagtacaactctaaaatttagttttatctctgtgtaaagagaacaaaattttcattgactattgatctgcttttgagtacatattatgaatgtctttttaccttttaattaatctgttgtaactttttgtatttgtctttgaaatattttattattgctttggttaagtgaacaagtactgtttcacagtaacttatgaccttatttgaccaagtattttaaatattgatatctttgacaaacttccccaaattaaatgctaaataaattcttttgctctctagctatctttttgatttttcagaggaccacttaaaaatctcaaagagagatattaaactaattagtcttatttgacatgctaaattgcatgagaagcattgtcaaataggtgataataaaacttcctaggttttattatgtggatgaatgttattaatatgtgttatataaaattatatccaatttctaaaattctgataagtcataattctagttattttaggtgttgtaacatagaaataactaaatgtctttgtcaattgcatgataataagatatttaatcataacagtttaagtcttgttatttataaacagttttttttttttttttatgctttagcagaaatgctttttcttcaagaagatttacaggacttttgacaaatgcatgtttctgataacttatagaccaaactactgaactgagtaagaaattatagaactaatggaaaaactgattgctttgtaaaactgctaacaaatgatcaagatcaaaaataattaattacataggactcagtgacctggtgaaaatgattataattttcatgacttcttgtctgaaatattcctggctttttaatcttcattttcccagacttaaggaaaaatttttttctcttttctcttaagctaattatgatttacaacaatttggtaaattccctggtgactcaaagggtaaagaatctgcctgcaaagcagaagacccaggtttgatccctgggttagaaatatcccctggagaagggaaggaatggtcacccactccagtatttttgcctgaaaaaccccaggaacagaggagtccatggggttacagagttggacacagctgagcgactaacatacaaacacttacacacaagcaaaatgaaaacatttttctctttctccccacctattccctccaggatttggactcttattgactattattatttttatgacagtatagttgtttacttacggtaactaaatatttgttctccttgtaacagcacagttgaaaatattggttacttagactcaaataggaactaagattgcctttatggagtcataaagccccttgggtgggtagggagtgaacagcctgatatattgcttataggatttctggaagccttactaggtgagtagtaaggaaggtcacatcctggcagaatttctcaggatatcttggagaccttgagaaaagacgaattcgccaaaattacaaaattttatccaatggcaaacctttgtttggcttcttagcctaaagaggccaaatgttcaatcttgagattctttatgaaaagttacagcaaagtaaagtaaagtttagtcactcagttgtgtccgactctttgagactgtggactgtagcctaccaggctcctctgtccgtgggatttttcaggcaagagtactggagtgggttgccatttacttctccaagcaaagcagattaaaagatctatatagtcaatcaccattcttgttgtatttatgtaaataatcaggtcaagtttattgaaactaaacttatctcgtaagcaagttagtctttataatctaagtattaatactaacttgtaagttagtaaatgactatcttctctctgtgtcttcatatggtccttctgtgtgcctctgtgtccttatctttttcagggatgccagtcacgtcgccttagatcccactctgatgacctcattatgacttaagtattacttactcagtcgtgtctgactctttgtgatcccgtgggctgtagcccactaggctcctctgtccatgggattctccaggcaagaatactggagtgggttgccatttccttctccagaggatcttccagaccaggaatcaaacccaggtttcctacatttcaggcaaactctttactgtctgagccatcagggaaactacttctctaaagatcctatctcaaaatatagtcacagtctgatatattggttaggacttcaacatatgaatttagaggggcagcaactcagcccatagcagtcccataatagaaaagccattaaaattattatggtacacgtaattatactcttcagtcatttaaagttacaatattttgttaatattcttgggtgttaagaaagttttcatgttaaagagttaattttaaaaatgaataatacattatttagaaaataatcttaaaattataaaagcatgcatatatcaaaatatatattaagacacatattttaaattaacctaattcttgctccatctgctcccataaacctaacaactcacatttgtatatatagggtaggtaaggttgaaagagggaattactgtctgctattttgtctgagttgtataaacatgggtatttaggattctcttttaggcattcttaaagaattttctttaataagcatttattatttttagatctctacaggggaatactgtcaacaaagaaatgataaaatagcagaagctcaacatagcagaattaataatactaattttaacagatttaaatttaaaattctaagtttcttaaaattatttgcacttgtatttcactttcatgcattggagaaggaaatggcaacccactctagtattctttcctggagaatcccagggatgggggaccctggtgggctgctgtctatggggtcgcacagagttggacatgactgaagagacttagcagcagcagcagcaggatgaaacatggaaagctggtttatgtatataaaggtcccttaggttttcattgttctaaacaatgaaatagctcagatccaggggtgagtcagcaggaaatggatgagcccagggcagtatcttcagagaaagtaagaactccaggcatggttaacctatagaggagaggactaggatgtcttcacagttttcacacgtgtgacgggcttcaggtgatggggccaaatatcagatggattaattggattacatgtgcatatctagaaggcaaaactaagatcaatattttcttccttttaatgcaagtatattgactgcctatcatataccatgtattgaagaataaaaaaatgctaaagaagcagatatctgctcaatacattttgaaaaggacttttaacagttattcttagttgaaaaggttgttttaactgtagggagtcaccgatccttaaaatgttctgagtgagagtgtatgcccatctcccaagggtacagcatcaagattttctgaatccaggtaatttagaatgatggttgtctaacctttgcactgagaaaaattactcagaggactggttagaacacagattcctggccataaccacagaaattctgattcaacatataatttccatttctaataaacttccagtacatgccagatgttattggtccatggaccacacttggagtagcaatgtgtaatccggggtcatcttcctttcaagattggtaattctaaaatacagacagagaaaaatgtctgcttcatcaaattcattttcctcagctcaccaaaaagggaaaagatggctgagggaagggaagaaacactatccgatcaaaaacagaaaatgcccaaaatgacagagctgtttctggggcagtgagatgtttagaagtcaaaatttcaaggaaatctcccagatgattcttgtaaaatgatttcaaatatacatttttttttcaaagatccccaattacactctacacagctcttagatttcactgacaaagctttaaaaaatgatgcatttactccatgcaggcagcagtctctggagccgaagcctccgcgttagtgatgtgtcgcagctggctttcgagctgcgttgaaagcttcaagctttggcacgaccgagcattaactcagcattaagcagaagctttgacactggagactacaaacttggatggattaaatacacattttgaatatctcacaaaatactagcagtaaggaggatacagaggtttttaaaaagagagtgaaagagggaaataaaaggagtgcaatgcaaatgaacagagacttgggccctgcaaatcctagctgtcctgccttctctgagactccttttccttcagatgctgcaacatttacatccatctttcccacaagaatggttctgtgagatttcaacttatgggaacaccactggaccacaatcaaaaatatttgtaataatgacaaactttaatctagcatcttttattgtttaagagattaaagccaactgcaagtcagctcccggcccagaatagcaaaaagaaaaaaaaaaaaaaaaaaacgtcaccagacagtaagcattcagtatactcacacaggttactaaaatagagtacagataaatgtcaccctctagttctactgtgcttataactttcacaacagtttcacagatattgactcatttgattctcaccataatccacatgttagatcaggattatcatggcgttgtccaggggagaaaaataaaaaaagcaaaagtgtatctgagagatttagctcctgcccatggttatatagaaaattataggaaatgtcaggacaagattccagttttactaaaaccaagtttcagagttttctcttactatgcatagccatagattatattacctactattattacaggaataaatttttttca

SEQ ID NO: 34905 - DNA, 686 bp, Bovine  19866881757126
  misc_feature (1)..(1): n is a, c, g, or t
ntgtatgaatcttttcctagtccagcctgtgcatcctattttcagtctatccctgcccaggaaatatagtctttcaagaatatgatttcacaaccatgaatctatctatacttatttctttggtgatttcatcttgtctaatggctttaaatattatctatacactgatgactttcaaatttacatctttaacacagacatctccctttcaatccagtcccacatatccaactgctgctgctgctaagtcacttcagttgtgtccgactctgtgcgaccccagagacgacagcccaccaggttcccctgtccctgggattctccaggcaagaacactggagtgggttgccatttccttctccagtgcatgaaagggaaaagtgaaagtgaagacgctcagttgtgtctgactcttagcgaccgcatggaccacagcctaccaggctcctccatccatgggatttttcaggcaagagtagtggagtggggtgccattgcgttctccagtccaactgtctaccagatagctacttagttttctaagagatgtctcaacatagcataccttatgactgagatctaatttttctaaaaaaaaaaaaaaaaaaaaaaagtggcattccctatagttttcctcatctttctagtaccaaaacaaactttgactcttctatctcacatgtatc

SEQ ID NO: 34906 - DNA, 854 bp, Bovine  19866880208502
  misc_feature (1)..(1): n is a, c, g, or t
naattgatgcttttgaagtgtggtgctggagaagactcttgagagtcccttggactgcagggagatccaaccagtccattctgaaggagatcagccctgggatttctttggaaggaatgatgctacagctgaaactccagtactttggccacctcatgcgaagagttgactcattggaaaagactctgatgttgggagggattgggggcaggaggagaaggggacgacagaggatgagatggctggatggcatcactgacttgatggacgtgagtctgagtgaactccgggagttggtgatggacagggaggcctggagtgctgtgattcatggggtcgcaaagagtcagacatgactgagagactgaactggactgaactgaacaccattttatgagttagactatcaggatttttaaatttcctcatgtaccgtaaaattcaactttaggcaaaatatccaactattcttaccttcactgccttcagtcataaaatggaaatactatctgctctgctgtatacaaaatagttttccaaactataaaatgtgatacaaatggtaatagtgtcaattattttaaatgcctatggttatttagagatcaaaggctgttttcaggggcagtcttgagagttaattcttttagactgttcactgttttctacagggagcaccaagaatgaaggtgaccagaagaaagccaaaaataaatcatagaaatacagagcagcatgtattctcacattctgccatacagtaaataccttctcagttccctagaatattacacaatagtaagtgtatttctttgactattagttttgaaaactcccttgtttcatataacaaa

SEQ ID NO: 34907 - DNA, 702 bp, Bovine  19866880339715
  misc_feature (1)..(1): n is a, c, g, or t
nttttactttcgtgcattggagaaggaaatggcaacccactccagtgttcttgcctggagaatcctagggacgggggagcctggtgggctgccgtctatggggtcgcagagagtcggacacgactgaagcgacttagcagcagcagcagcaggggctggtcctaccgagacgaggagggtgcaggggccagccgagaggaaaaagcagtctggttgagtcccggcagcagtgacgaacggggctcgtcccagacgtgcgacgcttctcgccaggcaggtagcgtggacaccagcaccaagggccctccgggggacctctaggaatctgtttccacgccgtctgacctccggcaaggcggccctcagaggcccagagagcccgcacctcctgcagacacttccctgcttgcccagagaggcaagccccgcagacactcaccccacggccacgcggcgccaacgccgggccggccgcacgatgagcgcgtcccaggcggctgccaaccggccctcaggggagccgactcctggggggcgcgggcgcgggccccagctgcagcgaactccacagcgagcgcagggccgaccccggcagctgcggctccagcaggaagacgcagcccaccgcgagcgccaggaagccagcgtacgcggagccgcgccacagcgccatggagacagaggcgtggaagcggcggcgaa

SEQ ID NO: 34908 - DNA, 3290 bp, Bovine  19866880381212
  misc_feature (1)..(1): n is a, c, g, or t
ncctcacaggagagctccttgatgctgggaaggattgagggtggagggagaagagggcgtcggaggatgggatggctggatggcatcactgatgcaatggacatgaacttgagcaaactttgggagatggtgatcgacagagaagcctggtatgttgcaatccacaggtatcacaaagagtcagacacaactgcacaacaagacatggacaaggagtgtatgtgaggaatcaagggataggaaaaaagcagcaataggtatggaaggaagcaggtaaatttggctacagaaaagttgaatttgaaatgtctgtgaagcattcagtacgcatcagactgatctggcaatcaggaagaagtgtgcagaacaagcaaagaaaagagtcaaggatagtacacagggacggccctaattcttaagaaacaaacaaaggaagagaagccgaaagaaaggaaacagaaaaagtggtcaataaaggaaaggggaaataaggatagtatcgcagaaggaaaaaaaaactttccaaatccatactggaacaaaacattgctagttctttgcactgctgtgggtacaaatgtgacaggtacaaaaatcacaaccttaaaagcattacaaagctctgaatgccaaaaaaagacaataccaaggatatattttgcatgatgatactatcctctgccagcaagtatgtaacatatatactgtcaccaaagatacagtttagaaaaaagaaaatacaaacggttttaaaatatacaaaggatcaagctcaccacaagaattatgaaataaaagtgaaacaccatttttcacctatccagagatcaaaaagttaaacactatgctgacttgaacatatgctctctaccataagaccaacacgtcccagagagtagcggctccttcagcctggtcttgaaaagggaagacacatggagcacactggaacctgctccacagactatggctaaagcccgccaaccatagccgatctgaaggcccacgaggaataaataaggccactgacattctgaggttgtttgttaagcagcattatcacagcaaaagctaactgatacacaaaatgtgaagaaacaagatttcacatattattaaaataatgggttactacctgccatacaaactgagtgacagagacagatgcttaatcaaagcctgcctctcgtgttctctatcaccgcagcctctcaccttgcatgcttcataatccttctggatataatagagatgtatcaaccagttctgcttctccaaaataggaaactccggagctgggtagcatattttgacaaaaacaaacagtcattgttaggttttctccttgagcattgtcctcatgtctaaactaaccaaaaggagactgtaatatcatgttaaattcttcatgctgctgaccatttttaaccaaagtgtattaaaaatgtgtggattattacactaagagatacttgtcctactagtacaaattcaatatatattcctgtaaagtttgtgtggttcataatatcagtttctcaactgataacttgcctaaagggaaaaacagaatcattctttccctcttttcctttctctctcttccgggttttggtaggtgaataaaatgactttccaaaagatatttcaggagtattactaacaaaatatatataacatagttaatatcacatctaacagatcagaggaccaaaaatagctaaacacagtcttagcaatagctcaaatgtgaaacgttatactgttgcccagttatgagaagtcaacaaggagaaaaatatttcagacacctcagacactgaaaatgattcacaatagagaaactatgagttactatttctttgaattcaattaaattataggtaaaaattcattaagaagttaacttttctatggtaaaaagggagacagttattcacatcaacctcagaacagtggagacctcaaggaagaaggaagaatgaattagaaatcaataaaaaggagaattaaactctttaatgctttagctatcaaaaaaattaaaagctctaaaatatataagtctaaatgtttttatttattaaatctggcctgtaagcacatgggtatttgttattttttatgcattttaatacatgtttgaggtattccctgattagtttaatggtcacttttttttttggccacaccacaccacatatgggatcttagttccaagactacagatgaaacctgcatcccctgcagtggagactgaaccactggaccacgggggaagttttggtgttcccttatttttcaaaatgtaaaagaaagggtacaccaggggaagaaggggaaatgatttgtaatcattctgttccagaaccttaggcgatataacaacaaaaaacccaagacttacatgtgcataatattaataatgatgggaaggaaaaaagcttactgtgacccagaattaatgttgaaagtgaaagtcactcagtcatgtctgactctttgtgaccccatggaccatacagtccatggaattctccaggccagaatactcgagtgggtagccttttccttctccagaggatcttcctaactcagggatcaaacccaggtctcccacattgcaggaggattctttaccaagctgaaccacaattaagaatgcttttttcttttccaatagggaatatcttttccaatagggaataacaatggagtttataaagtgaaattatgacagaaatatggatatgattttataaagaagaaagaaaaaaagattaaatgttaagcaacctaactcttcattttccaattacccacattctctgactaggatcacccttcttctagtcagtagggcttatgtgagactcttcaaagacttttttttccttccttctcttcccctgtgccccatcaaacatcagatattagccattcctgttctgcctaactaaccatttccgaagttaaatttcctacagaagaccacacaaatcatcaagcttaaaggcagatgtgagtgggtgtgtatgcaatcttaaagcaagtctcaactgtatgacctacctcactgttacctaccccttttctgaaggaaaggagacactgaatcctttgagtttataatatcactatcactgcttctatagcctaaagaaaatttataaaatgcaaatttgagtctttcttattattaaaatcttggacttcctgggtgacactagtgataaagaacctgccagccaacacaggagacacaagagatgcaggttcaatccctgggt

SEQ ID NO: 34909 - DNA, 1352 bp, Bovine  19866880468266
  misc_feature (1)..(1): n is a, c, g, or t
naatggttataaagtggttctatctaactcacattctattttggaaaacagtgtaactgacacagcaaaatctacctttccctcttggtcttctgtgcccatagctagtggtcacttagagtagggatcagtgtcccccttgatttccctgctgctaaaactattgctctattccaaatgatgtggctctttgtttttcaaaatcctatcacttatgaagtgagagatttaattttaatcacaaagtttagaaggatgtttttaatatatttgatacgtgtctcaatttgactcaaataggtgtcaaaatataaaaatgtgccctgtgcaatgatgctgtaggtgtataatcaggtacaagttgctctggagtcaaacccgagcttaaacaccagtgccacttttaaattttgtgactttgacatgtttttttttcttttaagttcttctgatttacaatctctataaaattgaaatggtaatactttttcaaagtttcttttgtgaaaataagtgaggatattcagtgcctagtataacggcttacagaatgacaataacggtcattagttcctttccctctttttaccaatgacagtttaatataatgagttggttctaacttttgaaaaattttgaagaggtgacaatagaaaccattttcctataaaattcaatgtgtatcatcagactctaaattctatgtaatccgctgcaacccagattgtatgtgttttatgtgtgtttaaataaatacattaaatacacatgtgtatacatacacacaaatatagcagatccaagactgactgacttgatttgaaatggttgaatctgcagtgtaaaatgtggatcagccatggttaggaactgaaatttagcataagagagaaaaggacttgatgtacaaaaatcccggtatagagcacttgggggatgggaggggacgggttggtgagacaatcagattggtaaattgactaaatgctcctaaccctgtaattttgtgcgtagagcacactgtgctgtggaaataactgctcttagattttcattgtaactggactgttcaggttgcccagagggaaagaacattcctaattctaataaaataaacttttattttgtttttccattagttacttatgtttatttttatattaagaaaaagacattggtggcctaagagtcacctatattatgtgccttattcactgttcctacttaacataaaatgtcaagatttgggttcagtttctttccagggaactctgaatgagactctccccaacaataaacttggttaatgaaaaaaaaaaattcaatgtgaagaaacttactataagcatatt

SEQ ID NO: 34910 - DNA, 1569 bp, Bovine  19866880528945
  misc_feature (1)..(1): n is a, c, g, or t
nccctatgctgtacagtatgtccttgcagcttatttattttatccgtagtagcttgtacctctaatcccctccccctatatggcctcttccctgtcccctctctccacaggtaaccactagtttgttctcttcatatgtgaatctgcttctttttttgtcttatttagtggttttcttttattttttatattctacatgtgatgacatacaatatttgtctttgtctgacttattttactaagcatgatactctccaggtctattcatgttgttgcaaattccaaaattttattctttttatggctggataatattccattgtgtatatgtaccacatcttctttatccattcatctgtcaatagacactgtcttcttcctgtttgggctactgcaaataatgctgctataaacattggggtgcatgtatctttttgaattagtgcttttttcatacacccaagagtggaattgctagagcatatagtagttctatttatagtctgaagaaacttcatactgttttccatagaggctgcaccaattcacattcctaccaacagtacactatggttccattttctctccattcttgccaacatgttatctgttaattttttgatgatagccattctgacaggtgtgaagcaatatctcatagtggttttgatttgcatttcatttggtgattagtgattcccaggtggtgctagtgatgaagaactcccccctgccaacgccggagatttaagagacgggttcgatccctgggttgggaaaatcccctagggcatggcaacccactccagtattcttgcctggagaatcctaaaggcagaggagcctggcagaccacagtccgtagggtcacaaagagtcagacatgactgaaacgacttagcatgcacactgtgattagtgatgttgagcgtcttttcatgtgcctgttggccatctgtatgtcttctttggaaaatgtctattcagcttcttctgtccacaggtcacttactcttctccttcggttattccttttctcaatttcaacttcctttattgtttttcaaagaatgatggaggctgatggtatataccaaccttccttgtctctggccatgtctccaggtctgagaccttcccccttgttgtcagataggctagccatgcagagaattccaagatacagagctgacagtagaggcccccccaggttgatattgacctgtgtcttgattctagaatagtctggagaactgcatttctcttggagtaggctacttataactttaaattgggttcttatcattctttgccctaataatactcagttataagcctctttcaaaattcttaagaaattgtcctgctcagctgccactgcctgcgatcttggaccaaatacaactgaccttgttctaatttgcacagctgataactttgggaccagttgactgttttgcagatagaccaaaactaggtcagcctctgttttccaaggcacaaatcagcacacagtgttgaggaaaacagccaacaaacataaatatatagacaagtttttttatactt

SEQ ID NO: 34911 - DNA, 3343 bp, Bovine  19866880569723
  misc_feature (1)..(1): n is a, c, g, or t
nccaactcccggagttcactcagactcacatccatccagtcggtgatgccatccagccatctcgtcctctgtcagccccttctcctcctgcccccaatccttcccagcatcagagtcttttccaatgagtcaatacttcgcatcaggtggccaaaatattggcgtttcagcttcagcatcagtccctccaatgaacacccaggactgatctcctttagaatggactggttggatctccttgaagcccaagggactctcaagagtcttctccaacaccacagttcaaaagcatcaattcttcagtgctcagctttcttcacagtccaactctcacatccatacatgaccactggaaaaagtgaggcttaataaatatccgtagtaggagggtctagggtcccatttgcagctcactcttactctagtttagaagacagcctttggccaactcagaaggtagaggcccttttgcagttaaatgagaatttatctctggggaatgcaggaaagaactgcttcccgaagcccagattccctgcctttgattcacagcgcctgctctaccgcttgccccacccaatagctcagtactgctgtttacaatggttttatggaaagccctcatttggtctcattgtactggcccccagttccatagtctttcccaaatatgaaaatgttattttattgaaggtcattatatccattttaagttgtctgtctgctgatctccttctccaaaatggatagaagtgattcaaccaaatgtagaagaatcagctcttaagctttcaaaattagcccagctttagcactgtgcttggatgtagcctataaaatcatagaataagaagcagaaggtcagctaatccactgttatgggagtcccacagtaaatgtagtttgaattagatcatgagtttataaaccaggttgtatatgaaaatcactttaggagccttcctaagaacatcagttcccaggccacaccttcctggtagaaatttccacagcattccagacatgtaggatgactcttcttaagtacttctagtgactgaacactcattacttagcaaatctaagctcatcccattatggtacagctttgattattagggcaataagagagagtagctggaagaaaagatggcagacatccatggtggttaaatctgtgttgtaggattttccatattttataatatgaacatgcataacttttgtaacaaggtgagaagcaaagtacagtgtttcagaaaatggaagagcaagactgagaatagagcaggattacaaatggcctcgtaaaaaaaaaagctgaaccacacccaatgagcacagaggaacggtaataggaagaagatctgtttcctcagggtcctaaatgatctcgcctctgcacatctctccagcctcatattcatcttttttttctgctcacgtccttccctctaactttgcatatctctctttgtttcagcaacactagctgcctttctctcccttgaacatgcaagctcattcctgtctcaggagccttccactagctgttcccctttctctgaaaagttcttcctctgggtctttgtatggtaggatcattcaaatctcagcccaaatgccatttcctcagagaagcttttcccaaccacttaatctacagtcattctgtaccatatccccttttatattttcatggcacttactacaaactaatgatttgtgtattgtctgcccccattcctgtcccagcattcgcatctttgttgctcactgttgcatccttggttcctagaacatgcctggcacatggtaaccactcggtaaatatttgtcaaattagtgcatatgtacaaacctttgttttcctgaaactgaataagaaaattaactctgcacagaatgtatatttataaaaatagactttatgattcaagttgaccgcatcccaatgctatatgttgggggggggggaaacttttgttttctatgagtatgcatattttaaaggttttcaaagtcagaaaacttaagtgatttacaaatggtgctttataagatgagcttatatataagacaccaagggacagactccctttactggtccaagcttagagttcagtacaatctgagaaacttttgtggatcactgactttgtgccaggtacacccagggcagaaactcagctctctagatttcatcatctggaggagatggccatattcataaggcatttttatagaatgcacagtaatgactactttcatacagaagctcacagaagttatctatactcacgtgaaggttctgcagcctgatcgtatgcgtctttagaattctggaacactcacaagcgtacggtctttcccttcccaggcagtaacagccctcatggaagccccacctctcctctggacagtaacatgctgctggtcatcatcgtttccgttggtgtcatcaccatcgtggtggtcgtgatcattgctgttttctgcacccggcggactacctctcaccagaaaaagtaaggagccccagatgtagcccatacattttttgtatgtattcttttgcttctgtgtgacctctgtgtctggagttgtacacagagttaaaatataaaatacgtgaaaagcaatgttttaaatatttttaaagaaaatgcagaatgattcctcttgctaaatatgtgtccttctgggttcgggaagggaagaggggcacactgaaggtgggtgaagggggctttagtgaagggaccatttacaacgtccaaggtgaagttagcattaggcagcagtggtgacaggcccctgtcatccttagaaaggtgagagctttttctgaagaaaacagagctgtttccagagctctgaagcagcaggagaggacttgcaacaggaaccacgtatggtggtaggaatgtaacgactgccaccctctagcccagcagggatggggcagaagaggaaataacctcccgccctccagtctcttgtctgtgccttctactggccacactgaactggaagccagggcagagttaccaagcagatatagttcatttaactcagcctctgaagtcacaagagccaagtgtacagaatcagtctaggagaggaaagtagatgatgtccagccttgttgggagcccctttggaggactgactgtctctgggcactcaccgaaccagatacacaggagtctgtggaatttcatggcacaaatgccagctgagatggaaggacaccatagacctctagttctaagtttaagagtatttttaaagaagtgctcccaaaggctcagcggtaaagaatccgcctgcaggcaggaga

SEQ ID NO: 34912 - DNA, 1495 bp, Bovine  19866880580655
  misc_feature (1)..(1): n is a, c, g, or t
ntatagagttgaagaaatgctttctatattggggagaatactccctttttctatcatttattgctacaaatacttattccccctcaccctgtttgttatttaacttttgttatggagggtttgtcatgcagaaatcttcatttttatgaagtgaagcatatcagactttgcttttatgatctctgacctacataacatgcttaaagagctcctccccacctcaagaaatactcacttacattttcttgtgctgtaaatgcattttcatatacacatataatccatcttcctccattaattagcaatgcctcttttctcatatactgcatttctacacacatttctggagtctatatatgctccatgatttcctttccttgtgctattcctatatcatttcttgcccaccccattactgtaatgtactattctctctctctttttttgtttaaaaaaggaatctctatcccctactcctcatctcttttagaattctcctatttcttttaccagattaaccataaaattatttgattatattaaaaaccatgctggtactttgattagaactgtgttaaatttataaattaatgtaggagggatatatgtatatatatgtatctttatatcaaggcaagaggaagatctgtctctatttaaatcttttttgtatctgaggagcatcctgccatggtttcagccctggtgcagccctttctctcatttttgtttctttttgttcatttctgtcaagtttggggagggtagttttgtaaacctgcatttaagctaccatgattccagaagtctttagatttgcactgaattgagggcgaaggcggggatgatgagctgaagctgtgggtgtgggtgaaattcagaaggagagtaaatgttaaatgagagcaacagaagcttgcaaggctccagcatttatggggaaagtgaaagcggtggatgtgaatgagagcaggcatgtggaaaggagaggtgagaaaccagcagagaggtgtcaagtaagtcagaggaagggaacatttcaagaatggcacagtcagtagaggccagtgttctggcagatggtggagaatgactgcggtggagccgtgagctgtgtcggttgtagttggttactggtaaggtaaccttatcatttagtatttaaactgggacacttggagaagactcttggacaacaggaataaaccaggattattcctggcaaactggaacacacggtgaccctggttggtggtgacctctgagaaagtggtcttagttgatgatagctaaggtgcccaggtgcatgggttgaagagtcaagacagtaagagtagattctcacttcttcttttcagaggtttgggtaatgacttatacgctatatggaaaagaatctgaaaatgaatgaatacatgtatatgtataactgagtcactttgctgcacacctgaaattaacacaacattgtaaatcaactgtactccaataaatt

SEQ ID NO: 34913 - DNA, 917 bp, Bovine  19866880620020
  misc_feature (1)..(1): n is a, c, g, or t
nctgcatgtgttgaaagagaatcatccatcacaataacatgctactactctatctaggaaccaagagaatcccatctgatctgactggcttagatcactgcagttcatctgcctcgagcagcccggagtcaaagttcccctgtcaatgataggtttaggtcagtaacctagggagcactgatctggtggtcagggggtaggatcattttcagataaatgcccacacggtagcttgtaagcacatcatcaggattttctgtatcatccacagtctctacatgctaaagtgacatgtacacgcataatcccactcaagagacacacaatggaacactctgtttgggggcctttacctttgggtgttctgaactggacagcttcagacatgggccccatgccctttgagttccgggcttggattttgaagtagtatggtgtgtcaagtgttaattcctgtatctggtgagtcagcctgtttcccacaacaggctcgataacccagtcatgtatctctgcattcacatccgtgctgtaatatatgatgtaacctatccaaagggattaatggaaaaagaaaccttattcctgctctttcttttgcgatcagtaagtctataaaagatatatgtcacagcatacacaaatagagaactagttacagattaacaatagtaacaagtattttaaatgctacactaaatataatacagagaaaaccacaatttcaacagtgccagactataaattattatctgtatcagcagctgaagtaataaaagtagttaaggtaaaaatatagggttaactactctcaaaagctaggaaattatataaggaaaccatactaatcaacattccaacattctgtacttcaacggtctacttcagttaagttaatgcagttttgaaaaaactta

SEQ ID NO: 34914 - DNA, 2431 bp, Bovine  19866880632609
  misc_feature (1)..(1): n is a, c, g, or t
nttaattgccatgaatggatcaggtgtgaaaaatagccatgaacaaatgctgatgatctgagaatatactgggtcagccttgagctgtttagcatgggatgtgcttgtcaagtccaggacatggaattactgaattccctggtcagctgatttcttctctggttcccgtctgaagtgccctgaaaacatctttggcgagcctgggtgtccttttaggctcgcctttggtaagcctttatctttaagctaccatgtagctcagatggtaaaggatctgcctgcagtgcaggagacctgggtttgatccctgggtcgaaaagatcccatggagaaggaaatggcaccccattccagtattcttgcctgagaaatcccatggacagaggagcttggcaggctacagtccatggggtcgcaaagagctggacatgactgagcgactaacactcactttcacctctgctcagcacttggagtttggagaaatggattggcaagaaattccaggctgagaactaagccaggggaaaaggggatcgctggcttcagaagaggccaggtgatttgggggcaaagttgataatctcttctccttcacatgaagggcgaggccgtggggggaacccaaaagcagagattcagaggcttgtctagttttctgtgcaagttcttggcagaaccataaatccatcccagctgagaaaactgtttacttccagcaccaagccaagcaagtctggccttaatagactgaagctggttggatgcttctattcttgaatttggtgctgttcacagaatattgatttaaggcacttttgtttctcaaacccctctcaaacctggatgaagagccagtgtaaccttggctttaagtagaaaaggcagagggaaagatgagggctggccgtgagggttcaattgcaggtcccagacatccctcttctgggggtgggagtgggtggggctttagagacagagacctgtatttacattggcgtcagtgggaggggtcactgataaagtacagggcatggttatgccctgtgggagcatctggtcaactagcaaatcaccagcaaaccccatcaaaactgtgtagtaatgttcctgctgctgctaagttgctttagtcgtgtccgactctgtgcgaccccatagacagcagcccaccaggctcccccatccctgggattctccaggcaagaacactggagtgggttgccatttccttctccaatgcatgaaagtgaaaagtgaaagtgaagtcgctcagtcgtatccgcctcttagcgaccccatggactacagcccaccaggctcctctgtccatgggattttccaggcaagagtgctggagtggggtgccattgccttctccggaatgggcctaggcatatcctattcggcttactccatttcaggcctcctgtactgccctgtcataaagaaagtgaaatagtgttctctacatacaaagcagatccctaagaccagcacaggcgcgtggatgcatggcacatgaatatgaatcatacttctgtgtgggcatataggaccccatgctcggacagatcttttgcttgtttttttgtgtgtgtggggttgtttttgctttttttaattgtattggagtatggtttctttacaatgtggtgttattttccactgtgaagtgaatcagccatacgtagacatacatcccctcttttttggatttctttcccatttaggctgccacagagcactgagtagggttccctgtggtatacagtaggctctcattagttatctattttacacatagcagcgaatataatgccctgctgtcacctctgtgacattcttaatactttggggcaggaatttttatttttgcattgtgtcccacaaatgagatatctttccctacagctaccccagaactcatcttctaaggccttctcatccaacttggagaaaaaccgaatggaaattcatccagaatctgatggcacagagggagtgaggaaagaggaaagtttgtgtgtgttcatgtgctaatgacttctgtggcacccttccagcccgtgtttagatttcttaaacatgcctattcatcttgtcaagtttcagcctagctcttctgaaatagaactgctcgcagaaatatcctggcaataggctgtttgggtcctgccacctttcctgggcttcctgctcacagagggtgctgttaaggggacatctgtctcctattgaaggaagctgctaattcccaggattgagctgggaggacagacggagtgtaaataacacttccaggggtgggggacacaggagtggtggagggtgtttgataaaccatgtctaaagggaaaggaggcggagcctattggctaaatcaccagagaattacatcaagggaaacctgggtccactcccaaaagcc

SEQ ID NO: 34915 - DNA, 1521 bp, Bovine  19866880634196
  misc_feature (1)..(1): n is a, c, g, or t
ncaggcaagaacactggagtcggttgccatttccttctccagtgcatgaaagtaaaatgtgaaagtgaagtcgctcagtcgtgtccgactcctagcgaccccatggactgcagcctaccaggctcctccatccatgggattttccaggcaagagtactggattggggtgccattgccttctcctaagtacatatctattcatgggcttattctgagccaagagagagctggatttggtttttggtcagacctgaactgaggagggaggaagagaattatatttagattttactgtaaagctaacaggctaagcaaatacagtagctggcatttatataaatacttgttgaatcagtgaaggactagacagcctttatcatcatctacaagataagctctaatagagtgaggagttttctgttagctttggtatactagtacccactttcacttttcactttcatgcattggagaaggaaatggcagcccactccagtgttcttgcctggagaatcccagggacgggggagcctggtgggctgccgtctctggggtcgcacagagtcggacacgactgaagcaacttagcagcagcagcagcagagcaataggcacttgatgatatctactgaatgaataaatgaacattcattcatttatccaattactggtgaggaaagtgaagtcccccctggagaagggtgtgcagttggtcagcagtgcagctggggtcaagtttggggcagtactctctatgtaccatgatacccctcttgacatatggaatatgagtcatgggaatggatatcaaaaagcagaaaacactcaaaaaggttaatcctcttgtacaagccccccaagtggcactagcggtggacatttcatgtttccagctgtcctctgagcacagtttgggtatgttttgggacatttgctgaaatgtgatgttcctacttgagtagagcgggagctctttctttacattagccatacggagtcgtcgtcctttcctggtggtgatttggttctctttactctgtcaatcttgttaggcacaagaccagctgcacaatgccctgcatcttaacagacatgatctgacttacataatgctgggcaagatcttcttgctgaagggagacttggacaaggccattgaaatctacaagaaagcagtggagtaagtgttggttcctaaacaaaaatgggagcagacgtgctctcccatgcctgagagaggacgtgtgtgactggttacacattgtggtgagttctgtgagttagggtgaatgttaagctaaagtatagagctcccagtgccttaaataaggatgacttaggtttctttctcacctgtcagtgtggctggtcctgggcagctctctgctccacaaggtcagtcagggatccaggttcctcccatgttaagccatcattccacaggttgttgcccaacccctgttgataatggaactgactagcgttcccagtgtggtattctgtttctcctttctagggaat

SEQ ID NO: 34916 - DNA, 1203 bp, Bovine  19866880640408
  misc_feature (1)..(1): n is a, c, g, or t
ncagaaggatatcccccactggattaattttaagggacagatggagacaacataaagttgctttccccttataccctggaagttcacttaggccaaatacactacccagcttgcttaagtgagtttaagtcaactgtccagacaaatgagctcccagatggccacaatagtcacctgtaaaatcttttcgatgtcctagaaaattgagagcatagccaaaagaatgaaaatgtcctgatttttaaatggggtgatagatgaagtttacaacctggttgatgagtaccaccagcaccaacaaaaatcttgatgcgattattaaacaggtggttcccagagcactttcaaaagcaagtgtttgccaggaactagtgcagagtcactaagaacaagcctaacctcatttctcttttcatatgaattattagattagtgggtcgggagggtataataggctcagtgtcttatttctgtgaggacttttagtgaatccctcctgattctctcgtgcaaaagtggagacctgtcagcggggactgagaggtagatttatagtcggttgaacaattgttctccaagtgtgttgatgaatgaatccatgtcaccctggactgcggggacgggggggtctctggcagcattccaatgggctttgttctggctctgtccaggttaatattttttattaataacttggaagatgacatagaagccaattttatcaaaagcgtggaagacactaaggcaaaagagatagtgaacacacatgaaagactataaatttttaaaatttgcagtcatatccgctgacacatttgggaaatgaaggttgaaatagcagcaaccagggcaaaacctgctgagggctgatttaagctcagttttttcaccttcttggacaaattctaacttgcacagcctgctcatgctgggggctctgttggttacctacttctctatgccactgtgcccagggtcagcctctaccttattctcctcattaacttaatgacaccccagttcctgcccgcaaatgagtcctgacattgccaagcaaaccccactgctgcacttgagctccatcaagaccttcccagctcaggcccctgccttggctcagccacgtttcagctctctgggcaccctgccagcttgtggcccattacaagtcccccagagctctgtgaacagggcaagaaattc

SEQ ID NO: 34917 - DNA, 1561 bp, Bovine  19866880681896
  misc_feature (1)..(1): n is a, c, g, or t
ntcattataccctacccacggagaaggcaatgacaccccactcaagtactcttgcctggaaaatcccatggacggaggagcctggtaggctgcagtccatggggtcactaagagtcggacacgactgagcgaattcaccttcaccttcacttttcactttcatgcattggagaaggaaattgcaacccgctccagtgttcttgcctggagaatcccagggacgggagagcccagtgggctgccgtgtatggggtcacacagagtcggacacgactgaagtgacttagcagcagcagcagcataccctacctggggacgctttcacttccagtggttccattttccaagaaaatgttcctggaccctggagaggggccaggcagattgctttctatggggagctcccatggctgccaggggcctattgtgtcatggggtaaggggagcccagagcagaggcagtgggaaggccagcacagtatagagatgggtcagtctcagggaacctacagagccagtgggtcagaagagtgcagatcactatacttttaatcttggaaaatagatctcatgtcacgccatcaatggacccttgcaacattgtcatgggggccgaggcaaggctgacacccagacagtcacctctgcagggtttagcaaggaccggaggacaacgtgcatacaaggagcccttccccgactccataatgccttccaaaccatgctagctctcacttgtgtttttccttcatgtcactttcacatttttgtcatcccaaggttagtgaacaattgttcgatgattatttgctatttgaatgaaagagcctatgaaggcaggaaccacagctgtgtccccagaaactaacagtgccaggcccacaggagtggatatttactgaatgaatgaagacatgaatgaatgggagtcccacccttagtgctgggctgaggccttggggcaggattccagacactgggaaggcttgcatagccaccaaggtgcttctgggaagaggaaagtcctcgtggggtgcctagaggacagggaccatgtaggcttttgctcagttctgccgatttgcacgggtctgggcttgtctctgcgcgaccaggcagtgtgtgagatttgcagcctcagacacaggtgcgtagggtcgagcctcacgtcgcaccacatcctgcctcactacctcctccactcttggctcccttgacacccaaaaggctcttgtcctgaccagggcactcccagtttccttcccaccactgttctgtccttcccactggctgccaaacttcccccacccccctcctgccaggcccccgccttcctgtctctggacccataaaaagtcactttggcctcaatcaatagactctctctttaacaagggagatgctggtttgcagaatggagcctctccgctgggcctagggagagctagtttccgaagacagctctgctttgcaggataatgcattaggccgcatcagcagatttttgctttttatgaggacatacaggattccccaaagaaatcttccagagagggtgtgg

SEQ ID NO: 34918 - DNA, 814 bp, Bovine  19866880688501
  misc_feature (1)..(1): n is a, c, g, or t
nagcgacttcactttcacttctcactttcatgcgttggaggaggaaatggcaacccactccagtgttcttgcctggagaatcccagggacgggggagcctggtgggctgccatctatggggtcgcacagagtcggacacgactgaagtgacttagcagcagcacatgggatgggaggctagagctgactggaggagatttcccctcctgtagatcacttaggcattagggaaatcccagatgtaattcttatctttgctcatctgtacataagatattttcccctctcctttcctgatcaagggaaaagagaaaccagtacagctgtgactgcaagccattagtttttataaacatgtgtctgcggggccagggtccttcgttcaacaaatgtttcctgtgtgccgtctctgtgccacacacgctgactggcattagctatctctgttgatgcttagagatgctgtttacagcatctttggggacatgaggcattccagagggcagtctctgaggaagtggcttggcctctctgagctcccaggagtctttggcatccacttttaggggagagaacggctgggaggggcacgcgaggctttcttggagactaagaagccacgaggctgcaactccacaggagctgggagaattgtacaaactcaaatgaattagaagtgtaaatggagcggttcgacttggcttgcacagtacaataaagatctgcaaacactcagcttcgtattgaattcgaagcagggtgattaattcattattcacttcccagccggaagggaaactgtgtatacccgggg

SEQ ID NO: 34919 - DNA, 1881 bp, Bovine  19866880729713
  misc_feature (1)..(1): n is a, c, g, or t
naagagcaaaggatcagctgggcctgacctgaaatccagatctctgcttttctctgcttgctgtctttcttgactcaaaccagttccagaaacttgtgtgtctggcccacattgtgtgctgggcccacagcgtgtgctaggtcactcagttatgtccgactctttgcgaccccatggactctaggcccgccaagttctctgtccatggaattttccaggtaagaatactgagtgggctgccatttcctcctccaggggatcttcctgtgccagggatggaacctgcatctcctgtattggcaggcagattctttacccctgagccacctggggtctcagaacttgtgccagcaactcccaaagttcacattagatttaccactttagaggctagagtgcttcaagttcaaaaataccaggcaagaggctttattggctcagttgtcactcgtccattcctatctggtaagcaatagtgtgagccaaaaagggagatgcagtagttattctctctagtttgcaatagaacatgggggaaaccatgtaccagcatcagccagaggaagcagcagcagtgcctggctaagtggactttagtggacttgagtggacttgagctctctcaagggaaggggagcagaccaaaggagaagacaaaaataacagagcctcatgcaatggacctacatactctttaggtgcatgagagatactccaggtaaatccagaaatagttgctaattgggaagcaactttgtagttagttcctgagttgcagttgggacaaattagaaaaatacagtttatcatcatcaaagtgacctatataaatcacaaactggaatggcatcagagaacatatctacaaaaggaaagagtgaacaaatgaatgattgttgacatacacttgtttgatgtaaaagacaatttataggtaaggaaagaacactttcactaagcacctctctcttgtcatttcccaaacgtttttcaaatctaaacctttcctttcataggtacagaagggtgcctgaaaatcagccagtttatttaggagcagagtctaccaaagatatgagctgtgtattctgaatccctcagcaggttatctttttaaataagaaacacactccatgtttcactgaatcgaaaataccattgtttgtaagacttgccattgttttatgctctgccaagaaataataaagactgctgattaaactctgatatcatgctgttttatcacttgaaattttttgtgcttgttgaaagaattcttttaaacttatttaaacataggtttttcaccctacattactcttgtgtgtacataaaaaggaaaaatctaagcaaaataaattggccacagtgttcttaaaactttgcacacgcagaagttggctctggtaagttacttcttgaattagtgttttttaagagtgttcctttctcctttctctctctctctctctctctcacacacacacacagagtatcatcctcactgatgcaacatttctttcagaattcttcattagtatctcttagattttcttccaagcccctcacctaattttgctgtgcaggggcaggcaatgacagcctcttcaccaactgctttctggaagatagaaatgtttaagacacatcctgatttcagagttgttaaaatgtgtaagagtgttttagaacaactgaaacatagtattcataacgggttattgcagtaagccatgagttataaggggaagtgccatgctaatgtcaagggcaaaatttctggtgacatttagattcaagacaaagcagtagtaacatcattttagttggtacaatatttccaatatcctgctgccaagtctgtgacttctctcccatatt

SEQ ID NO: 34920 - DNA, 2320 bp, Bovine  19866880801002
  misc_feature (1)..(1): n is a, c, g, or t
ntattaaacattccaactattaaactgctttaaaggtttaaaaagaagagtttaagtattaacagtaacagtcaaagtaaaatctgctcattgtttctttgctaatattgctgtgtttagtcactcagttgtgtccgactctctgtgaccccatggactgcagcctgccagactcctctgtccataggattttccaggcgagaatactgcagtgggttgccatgccctcctccaggggatcttcccaacccaagaagcaaaccagggtctcctgcactgcaggcagattctttaccagctgaactaccagggaaacccagctactagggaaggtaacattagtgatctaaaaaattacaactggtctccaataataataataaaagatttgctattttaaaggaatccaagtaaagttgattctattgaaactagtgtagacttgatcaatgtgggaaaaaaaaatttataccaaagatgtgttttcagaaagactaaattctataatgtcttaacaagataaggaaatccaaaagcttagctgagaactatgaccaaactcatgctatgtaatttgataggagggtaacagggacatacaagaattattttgttacattcaaaaatgataagaagaaaactttttaaagactttttttttgtactgtaaaagaaaatttaagaccatggtatttaccatgttctgtttgaagttatgacattgatagtaaaacataccacagatacctgcaagctacacattaatggagactttcaacattatgcaatacaaatcgaccagaatttagcccccaagaggcacttttccttccaaactacaaatcttgtaaactaaatgggagctctaaaaataaagacacaatctatgaaatctggcaaatttgactcagatattaggaaatgaaaaaaggaggagaggaaggcactcgggttttaagtgccaaaataactctttgtgactagctagtgtttttcaaaagtattattcccaacttatgactcactttagagaaaagatgagaaaaagaagaaatggtcagtattagtggctttgtacgcttaggattttcatactaaatataaaatagaagcacttttttaaattgtcagtaattagtctctgaagaaaggataaaaaatacatagaaagaccccaacgatgtgctacagaacaaaagtataattatagttttaaaagcacagcaggctagataaggccttaaattccctatcagagtcattaccgtatcagtgaagctagagatacacactcactttccacaaaacacttagtataacaaagtagctcaggtttaggtcaaagatcacccaattagagtgcctcatttgtcagatccactatagtaagcggattacttttatctacataaatgttcttgatttgtatttggatattctagcccactgacaatagatcaccccaactactaagacataagctcatctgaaataccatgaacagccaaatctcgcagaaaaatgcaaaggagaaaaggcatactttggcagaatactgttttagtcggaaaaaattagaaaaataacctaaaagcttttatgcttctagggatgagaacctcttgaatatgggcatttaactcacactttcaccccagcacatttaaaatgccaaaacaagtctaaaataggagagaacatcaatactggaagctaggaatggatgccattcacatgacgaaactgttgaagaatttctgtaagacatgttagatagatttggatggaagaacaatgtcaagagtcaactagtgacttatcttcctgaaaagaagtgctgtgactcagagagaaagcagaagcaatactggcaaaaacaccaataagaaggacaagagctagggaaaaggtggtccacagggagaaaataagaatccctccagctggaatccaggttaccactaccaaccaagggcactggaagcaactgcccaggacgggtactgcagcacaccaaatggccatctaggaagtttaagaatgtctcccgtaaacagtgggcagaagtagcaggaaggcggatgagtgactacagcataccacggcctgtggctagcgaaacacccactgagggggaaaacaaatcgagaaacagaaataagctttaattaaaactgcctgtgtgaaatttaacaaaattcttaaaaactgtccttttttgagacaagagatgaaagatctgatattggaataacaagctaaagttggctaagaaaaaatcagtgagagtggaagaaataagtcatataagaagaaaaat

SEQ ID NO: 34921 - DNA, 1285 bp, Bovine  19866880875512
  misc_feature (1)..(1): n is a, c, g, or t
ntgtgtgaggcaggaaattcttttccttctcaatccgtggcaatcagagtgataccaatagatagcctcaataccagtctctcccagacttgagccgggatcactgaaccagagcatcccccagggccttaagtcagtgagacctcaggaacaagctcagaaagaagcagagaaatccacagggcttttgtttgtttcatttctgagcaattcgtcaagtcactgaccagcaattaatgcttcagaagaaggtaaaggtctctgataatgggcctacccactcgtgtaatcctagaaaatatgccttcctgaccccttcaggcaatcagctcataccatgaaatatgaaatccatgcatgcataactgtgaacgttattaaggatcataaaaccatccaactccttcaaaaatctcagccttatttctaacacaattaccccctgctgcagactggttattcatgatgaaaagatacatttcctttcctttgttaaaatataccagtcattaactctactgaacgattctattatggacaagttgaagcttttccaggcggggagatgtccctgcccaccgaaccctccctgactagatctggagatatccagatgttaccctttgataacctagaagagttctctctgttcattccattaatacccatctatgtaagttgggcttcccagatggccctagtgggaaaaaaaaaaaaaagcaaacaaaaaacccgcctaccagtgcaggagatttaagagatgcaggcttgatccatgggtcaggaagatcccctagagaagggcatggcaacccattccgatattcttgcctggagaatcccatggacagaggagcctggcgggctatagtccatggggtcgcaaagagttggacatgactgaagcaacttagcattagcattatgagtgtaattatgagcataatgagtgtatctgggccgagcaggatctgggagctgtgtgctcctggggagtagagtgaggtaacacataaaccctcacccccagctcagtacctacctgagtgtactgatcaacacatagggaactggtttggtgaactatggaatatcagcatagggtgtctgacaaactctgcgtgtcccagcactgggggagctccctcttctttacccctcacgttcctatttcaaattggaacgggcaagttcccacaaaatgaccctggtccccttctctgctgctgattggaccaaggtcagcacctgatcagaactggactaagcaaggcttcttcacaag

SEQ ID NO: 34922 - DNA, 1057 bp, Bovine  19866880886709
  misc_feature (1)..(1): n is a, c, g, or t
natcggtggagaagagggacctggctgcctctgtgtttgggctacagaactgagatggaaagtgttattttagggtgtttccaagagtgagggctgtgattcgagcagcaaactcaattacactcaccttttcactttttgaaaataagaaataatgtttttaggccataatttaccctgttgacattttatttatttacttgggtcaggagagctaatttaagttaaattctttcaatggactttgagttatgggaagaggaagaacacattttctgttaccagaggaattttgtgtgtaaacatacacacacgtatgcacacacagatgtacacacacagaggcaacacacacacaactacaagtcaagcagacacataactagtcatttagaataacaacttactctgtaagatgcaagagaagattctttaaagtaatagaaataggagcaaatccaatataaattttcaaacatttttccacaagataaaaatcaaagtgtaacaaagtgatactttaggtgcctagaatatctggaaacttggccttttttagtaacagatcattttaagaacctactgtatgccagatgctatggctgccctgtttctaccaagagatgaaaatatgagccccgattatctgcgcttcagtcctggggacgggacaagtgaatgactggggtattacatgagaggttggcagtaggaagcaaatgaaccaaggagaatcttatagggagaatgaccagaagttgcctgaaccaatagagtgagaagaaaaacaagtgcctgtaaggtatcatcaattgaatttatacatatgaaaaagcaagcatttttgaataaaggaacaaacaaataagagccagatcttaagaaaggtgggggggacccgtcggctgggacaggtgcctttctgagacagaggcagggcatctgctcgcaaactatgtgatttctcagaaagatcccacgcagacctgtgattctaggatgcttccctaaccactcatcaatgtgttctttccagccactaaaagaaatttaagga

SEQ ID NO: 34923 - DNA, 782 bp, Bovine  19866880908033
  misc_feature (1)..(1): n is a, c, g, or t
ntgattttcatcttcatttacttttgggcattttccaggtgttccaaaaatgcatttctttaatattggaaaatctgataaatacaacaccaaatgggacagttttgtaaaaatcaccaatgataagaggatatgatttcaaattaaaacaatgataagcaggaaaaagagaggagaaaaaacaaaagtgctaaaactaggaaattacaagcgaatgctttgatttgctgctgctgctgcttagtcacttcagtcatgttcgactctgtgcaaccctatgaactgcagcctgccaggctcctctgtccatgggattctctaggcaagagtacgagagtgggttgccatgccctactccagcagatcttcctaacccaggagttgaacccaggtcttctgaattgcaggcagattctttactgctgagccaccaggaaagcccatgatttgatttatttttgtataattagataagtttaggcttagcatatgaaaatctataaatctgattattttttgagtcatggcttgcttctgttatctaatttgatcaccacccttaagttcctcctctgtagaaattctgaaatcactgagtgacttctcaaaaatgcaaattcctggggcccacctgggagtctctaattcaagaggattggcatgaggtctgggaatctgtgttttaatatttatttatttattaacttggtcttagttgtgagtgggatcctcaatcttcattgcagaatgggatctttacttggggcatgtagatccagttc

SEQ ID NO: 34924 - DNA, 820 bp, Bovine  19866880979497
  misc_feature (1)..(1): n is a, c, g, or t
nggcagaaggcaacagtctggtagaatgggggccaggcttgagaagtagcttttggaatactggtgaaaataatgaggactttactatcgctttgtgcaggtcactagcatgatgttttctttagccgcacaaggggaggaaggacaatgaagacagagaaagtgagtgagcagagggaggagggtgaacaggagaaaagagaggagaggagagaggaaggaagacagaggaaggagaaggaaaggagcggggcaggggtgtggggggtggtgatggggaggaaggcttcagcactctagcagctctcaggctggaaaggaccatcaattcctgtcaaaggcacccagcctctatggcacagactggacatgcagaaggctgggaggcattcccctgacaattcagaggaggcttcttggaagagggagccttgaagaaagaaaaacttccaagcccgagcctggctctgggaaccacctctgatggcccagctagagagaagggggcaggtggcaggaggggaaagggcttccttctcattgccctctccccgccgcccattgttctcccattcccaattgggctgctctgcagaggtcacccctaggctaatgagaaatcttcctgaagtttaaaaccaattaagcaacaaacgtcttctgattagttatttctcttgatgtgaattttaatgaagcatcttctttcccctccctccctcccaagcaccctgggggttaaccagcctttggtctgccttgaagagccctcagcggtgtcggaaaggctaaagaggaaggaagaggggctaggaggggt

SEQ ID NO: 34925 - DNA, 776 bp, Bovine  19866880985379
  misc_feature (1)..(1): n is a, c, g, or t
ncttcccctagggagctgaagtctgtagacttccccccagataagtcccctaccatgatatacaccatcacatggaaccataggaaagggagtgcatcctgggaagtatttgagcacgctcacaagggacatatagctttctccaggaggaaaacagatcccgggggctctcagtctcacgggaccttagtttcaattccccatatggagtctcagacctgtgaatcatgcccaaggttgaaattttacttcgggtatagtttcatagagaaaaagagcttgttcatttagataagactctttttccacctagaaagctctgccctacatgtccacatttttaaatcagatgcatccttcagggtctggaataaatgccatctccatcagaaagtcttctctgatcttcagccgagagttatctttcctccttgtcaaatctcctagtcctgaattcacgtgtctcctgggcagaacagatgttgaccattccctgctatgatgcccattccctccctttctcagcctactgctgaaccctcagcacatgcaaggcctggcttggtcgagttacagcatgaactgaattgacctgagtgaagctgcagacaagcccagagtcatcacagtaataattctctgcaaatggctgctggttggctgcataaaactcctaccctgaccacagaaatctgttttccagagctctctagtgccctgcacccctgatctctccaccacaacctggtccaggccaggcccgggcccatgcaagc

SEQ ID NO: 34926 - DNA, 1220 bp, Bovine  19866881045073
  misc_feature (1)..(1): n is a, c, g, or t
ntttgaaagttgctaatatagtagatcttaaaagtcctgcaagaaaaaaaaaagaaaattgttatgcaggtgataaatgttcactaaacttattatggtaatcattgcacaaaatgtatatgtaatacaccttaaacttgtacaatgttatatgccaattatatctcaataaaactagaggggggaaaagttctggcaagcctgctgctgctgctgctaagtcgcttcagtcgtgtccgactctgcgctaccccatagatggcagcccaccaggctcccccatccctgggattctccaggcaataacactggagtgggttgccatttccttctccaatgcatgaaagtaaaaagtgaaagtgaagtcgttcagtcgagtccgactcttagcgaccccatggactgcagcccaccaggctcctccgtccttgggattttccaggcaagagtactggagtggggtgccattaggaaaaagcaaaagaatttagtacaaagtgctggcagcttagcaagtcttctgggagccagaagggaaggccccaggtggctttctctttacatcacttttcctcttcctctaagcttgtttgctccatggtcttcccacagttcagcttcctcagctccccccctaaaactctaccttgggaatttgtttaactggccctatctcaccttcaacgttacatgaccttggagatccacaacccaaaccaactagctacagactcttgactcttggctcaaattctcagtggagagctctggccagtgaattcactgcttttgaattacgtgctggttcagtcacttatagggtggtaggaaaacctgctcactgggggtcatgtcggggagcagtttctctgggaactaactgacatgtctccctggggtgagagaaggggcaggtaactctagtgaagacagcttcacacagatctcactggctcctttcctttctgtaatagcccagatctcttcctgtgtgaacatctcctttgaaagggatgttatggtcaggtgggctgggtggggtgagacagggagggtagatgaccaggataaggatatgctgggggaaatgaagccaaatgcccaagatcaaagctagagaaataaagaaccactgccaagtccaaaggtcaggagcagagtggaaaatcggacgcagagccaaggtcaggagccagcagaactggaaaaatggaaaccat

SEQ ID NO: 34927 - DNA, 733 bp, Bovine  19866881062999
  misc_feature (1)..(1): n is a, c, g, or t
ntgagtagttttatttgaaagggagagaattcagaaaatacaaatgctgaagtgcacggtgactgacagcaaaatgtaatttagtaattaaataatgttatgttttagtggaatgatagattagaactcagctgcaaaagaaacaggttatagttataaaatgcttaatgttagattacaattgacagtagtagaaaaattagattgtttaaaggacaagtggaagacttccatttctgggaagattgagtagtattttccactgatcttcctgttgcatacaactgaaaactctggacattacaggtagaacacatgtaagactctgaaaggtggagagaggaagggaccttagacctaagaaacaacatgatgttttaagttccatgggttttgtttttaccttgtatatcccagcttgagctgaagaagctggtaacctgcaaacaccactaggcacaaacaaaaatgcaccaccaaagtgtgttttctctaggcaaaggaccagagaggggcagcaagataaaaactacttcaactactctaatcagtcctactccagccaaataccacataaagaactgtgaccccgtcctctccaatgccagcaaaggcctagtgggatgccgagacttctgccttcaccaggttgtgatgaaccatcctccttgctctatggtgtcagaggctaagtagagagccaggactttcatcccaaccaagcagtattgag

SEQ ID NO: 34928 - DNA, 2535 bp, Bovine  19866881076297
  misc_feature (1)..(1): n is a, c, g, or t
nagaggaatgtgggatcctcatggtgtggcgcagagtgagcttggaaaaaccttgtgccccacacggccctcccttaggactcaggcaccagcaccctcccctcgggtgtgtggcagctgtgtgtatgtggggtggggggcatcttaactggtacttcaccacctaactgcacaccaggatctacaggggctgctgtctgcacattaaaaactaggttctgactaggccgatcctgagaggcactcctgtagctgcagagactcccagctactgctgcccaggacccagctggggagggcctggcctcctcctgcttgggtcagattagtgaacactgagtgggcaggctctgcagggggccgtgactgggctgtgggaatcaaagacacacagtattgagtgggggatgtggcccaaagatgagtaatgatacaggtttgaacactaaataaaacagtagaaaactcaaagcaaagtgatagatcatcaaactgtgtaaaggaaaaccactggatcctcagagtagcgggagcacaccttgggctgagcagtcagcaaccatttagggaggaaataatgcgtgaacttagtctttattccttattactgtcattattccacagaagcttgctcacaggaggctggagcagccgtttactcttagcttccagatcaaatgcccagaagtcaccattgggcagcagggctggggggtggggtgtggtcagcctggctcttggaattccagcctccttaggtcccaacgaagtgacaggtgctagggcgcgcccatgaggtggaagttgcttcaggaaaagcagcctgtcctgcatgcaggcccacacggtgtgctgcacactggggtttgggagtcatgctctgggtggggagggacccgggctcctgggtatgcgggctgaggggacagaactttcctgggactcgaggggcatgaccctgccagcctttgacaaaggcacacagcacccatactgtgtttttgtggggttggggtttctggtttattgccaaccatggtcctggccgtggcactgtgctccccttaggccatggcagctggggttcactcatccagaggcccacctgccccgagccaaggctccagtgaggtcctgccttccccacacagcttggagactcaaagcttcttccttttcttcccgttgtgttgaccgggcttttctaggggaggagtgggaccagttaaaagctccccatgccaaccggttcatcttctcccacgacctctccaacggggccatgaatatgctggaggtgtttgtgtctagcctggaggagtttcagccagaccttgtggtcctctctggattgcacatgatggagggacagagcaaggagttccagaggaagaggctcttggaggtaatggtggcactgttacagaatttcacagatggcagctcatgttttccttcggatttccgcctctctcggcctctgcagcctgcactgccttgccctaggtcccagcctcccgggataggtcgtggaggccaagaagcctgcctcccactccagcagggcacctcatggtgttcttccaggctcaggcggcagcttgagtaggacaggtcagaacatcatcttgcctgagcctctgcttcctgtgctaaaccaaacatggctgcaggctgcagtgtttgtggtctgtgtccttcatgttttccgtatcatctcattcacatcagcgtgttgcagattcacacagcacttgaagccgattgctcagtttaggtccccaggaagaggctggctgtgtgaacgttcaggggggtttcccagtgcactccaagtccttaactccagcgcctccctgcagagcctagttgtccctgttgggcaaagcctcccttgtccacagagactgtggtcgcccacgtagccaggagctctcatgaggatgcactgcctcttggacccatccttccctcttgcctgactccttgtttctgatggcagtgctcttctcttgtctctgcaggtcgtgacctccatttctgacatccctacgggtgttccagttcacctggagctggccagcatgaccaacaaggagctcatgagcaccattgtgcaccaggtaacccacgggcagtactcggggctcagtgtgctgtgggtgtcatctcacccagacccggtccacgagatccaagtcaggagccaggactgccctggagcaggatctcctgctaagttaggaagacggcagagttactgatgggttcatttagttcagtttagccaactaaactaaaaaggcatgtctgactctttgtgaccccatgaactgtatagcacgccaggcctccctgtccatcaccaacccctggagtttacttaaactcatgtccattgagttggtgatgccatccaaccacctcatcctctgtcatccccttctcctcctgccttcaatctttcccagcatcagggtcttttccaaggagtcagttcttcacatcaggggccaaagtatggagcttcagcat

SEQ ID NO: 34929 - DNA, 2786 bp, Bovine  19866881114883
  misc_feature (1)..(1): n is a, c, g, or t
nacaaaatggtacaaccactatgaagaactctttggcagtttttatggggttaaacatatctatttctagaaactagaaattccattcttggtgtttaatgaagataaatgacagcacatatctacaaaaaaagactaatacaaaaagtgtttacaacagctgaaaaagccaagcaaacagataacaattcaaatgcccatcaacaagtgaggaacaaatcgtgatataatcatgcaacagaatgctattcatcactaaaaagaaatgagctactggtttatacaacatggatgaagctaaaagacaaaattacactgaacaaaagaagcagatataaaaatatatcctgtggtttatatatatatatatatatatggcttcccaggtagctcagtggtaatacaggaggtccaggagatgtggattcagtccctgggttgggaagatcccttggaggaggaaatggcaacccactccagtattcttccctggaaaatcccatggacagaggaacctggcagactgtagtccatggggttgcaaagagttggacacaatggagagactgagcatatacatagatatatatgtataaagtccagaaataaaaaaagcttatctacagtgattaaagtcagaccagtggaaaaaaatcagaccaatggttgtccctggggagttggagactgactggaaggaggcgctcctaagggaacttggtgttccaagttcagaaatgttctgcatcttttttggatggtgcctacatgaatgtatacaggtgttaaaacttgcctaattgaatatataagatctgtgttttttattgtataaaattataccttaataaatattacagacatatctttaaaaaagaaaacacaatggccattaaaaacatggattaatttgtgttctgtctaccccaccccttcagcctctaggtcgtaagcttcaggtggacagaacatctgttttatcttctgtattcccagcacctactactgtgtctgggatctcgtgaatgctcaagtcacatttgttaatatcagaggtttttaaaagcctctgtgcattgagctgtggctttgtattgagctgtggctttgtatctccctctgcagacatgatccattcttggcagatgctggtggccccagaagctcgagcacaggtgctttgtctaggaagggagcttgcaggtgggagcccagcagggccctgggtgtccttgggcactgacagggtcccaactgtgagcaccatctgctcctgtgaagggtgtctgacagcatccgcagccagggacctggaaggtgagtgcctctgagatcgaatatcaggctcccatccccatcctcctgcctatggggctgcatggaaagtcactttaaccccacaaacagaaagtacccacacatgtactgctttgtaatttgccaagaattttcccacagatgatcttactttatactccctaagaccctggaagattggtattggctaactctgtttcacagagaggtaaagtgacatcccaaggtcacacagctggcaagtggtagaattgggattcaaaccaagtttctaaccatttactactatattaaatgcagtactgctgtgtcatttaaggaccttcagaagccatttcttaaatctgaccccttcaagctctactggactaatggaaagataactaacaaataccccttatcttgaatgcaagttattctacatgcccctcaaagatgagcctgcctggaccaccactgtgatagtgtcacatctctatgtcaattttccatactcttcaccatctaccaagtaaaattcactctccttagctgctgttcagtgctcttttgcctaactcatctttgtggcttcatcttccttaaaaccccttgcattctggctggttatgtcactatcctcatctctgcaactttgctcttcaactcgccctccacctggaataccagtttcatccatcttcccttgggatgcttttactgacctttcaagttgggactgaaatgccactgccattccagattgtagagttttacattacctgaatccttaaagcacctttcacttggcattaacgtcagacatcatgtacctcactttgtcttctttattagatcctaaggtcctagaatgctagattcatgcctatttccataacccctgtagttactaacatagctatatactgtagacatttaaaggtgttttgttgagtgaataaatgaccacttctccaaccatggcctatgcatttaatacccttttaaatgcacggttttaaaatttttctgcattttaactttatgtattggattaacacagcttccatcttccatacacgatgcttccaatttgacccagcctgctgctaagtcgtgtcagtcgtgtccgactctttgcgaccccatagacggcagcccaccaggctcccccgtccctgggattctccaggcaagaacactggagtgggttgccatttccttctccaatgcatgaaagtggaaagtgagagtgaagtcgctcagttgtgtcccaccctcagcgaccccatggactgcagcctgccaagctcctccgtccatgggattttcaggcaagaagtgctggagtggggtgccgttgccatctgcgatggtatctcttacgtgcaatttaaaaacaatacaaatgattacacatgcaacacataaacaaactcaggttcaggggcttcgctcgtggctcactgataaagaacctgcctgccaag

SEQ ID NO: 34930 - DNA, 999 bp, Bovine  19866881117951
  misc_feature (1)..(1): n is a, c, g, or t
ntcgtagacaaggacattttaaaagctattataactgcattctatgtgttcaagaagccagagaaaaagttggcacgttaagtggaaacatgaaagagatttaaaaaaacaaaaacctgagttgaacttctagagatgaaaaccacaatgtctgagatgaaaaatgcacaggatgagattaaacgtatgttttagtcaatgggcttccccgctggctcagacggtaaagaatctgcctgcaatttgggagactcatgttggatccctggattgggaagatccgctggagaaggaaatggcaacccactccagtattcttgcctggagaattccatggagggagaagcctggtaggctacaatccacgggttgcaaagagtcgggcatgactgagctacttaactttcatgccaagtacggaagaaaagggaggaagaataggtaaaactataaaattatagtttagaagtttattatactataaaaatacagtttagagggcattattgtcatgggccaggggtagatattgcccatactgtctttgtggtatgaaaattgcatcagattatactaaatggtgagcattactgaagtttgaatttcatataaattcttcacttgttttgaaaatttattctcttttttattttacccccaatcatttaaaaatataaacacatttcttagcttgtgggctgtacaaacacaggtggcagaccatagtttgctgagcccttacatagaacaataaagaagtactcggtatttttcaagagagaataattgagaaagagggtgatcccagtgctatgatctcttattttcatctgtctatatgataacacacaaaataataaagaaaatttgagatcttaacacaaatttgtattttttatgacctgtgaaacttgatcacgtgagaattatgaatatactaataagatacaagtacattctttaaacaagaaaaagtattccttgtctaaaaaagggatt

SEQ ID NO: 34931 - DNA, 1778 bp, Bovine  19866881128239
  misc_feature (1)..(1): n is a, c, g, or t
nttaaactatggatctttcccttctgtagtgtcttctacccacttttaggccttagaaaatcccccaaccagaggtcagatatgcattcatctttattttcttacagtttttaacatttcttattctatctagaatttatcttgatttggatgtgtggcataaggtgcgaaggcgttgtatttgagataattaatgctagctgctacaactgttaaactctgaaatctcaaagccttaacacaacaaagccttacttttcactgacgtcaagcccagtgatggtcaggtagcactctcgagcatgtgcctccaagtggtgactcaggaacccaggctgcttcagcctgcaattctaccatctcagtcttttgcttctagttctcagaccccatagaatttcaggtaagaactaagcgctgttgcctgaagacctaattcatttttcaaatagccaaccaattacctggtggcatttactgatcatgtatgaacttgttatgtatacagtggtctaaactacttattttgttctattgggcactatactagatttttttccaaactaccttatgttttagcatcctctcaagtgagttcctccctcgttgttttccattttcaaagttttcttggctgttaccggatagatgatattacaggttacatattatctcagctctgtgaacatatcagatgtattagtgcacatcagagactgcacctacccactggggttcaatgaacagctcgagtagaggatgtctgctatattctaaatgtttgcgtctctcctagacccttatgttgaagtcctaatgtgatggtgtttggaagtggggctttgtcatgagagaggaacccatgatgcgttagcgtccatgtaagaggaggaagggagttagccctctctctgccatataaggatacagagagaaagtggctgtgcctacaagccaggaattgggccctcaccagacacaggatctgccttgagcttggatttcccagcctccagaactgtgagaaataaatgcttattgttttagccacctaatctcgcatgtttctgttacagcagcccaaacggactaatacaatgtccaaatccttgtctccatctttaaacccttctccaaactccagacctacatttctatgttcctgatatatacttggaaatacctggaaatttggctagctcctcagggaagagctaggtcatgctgaagccgatggctgattttctttattagtcagaagtagaggtaagttgggaaaaggaaaagaactgatgcttcaaaatattccctcatcttcacacaaaacctggaggaataatccaagggtctctttacttgggagggcctgctcctccttgggaaaccttgagaaaaccatttcatgagtctacactatcctcactgtggctgaggttgagagtcaggaggagaggaagttcagcaagggctcaagggatggtgtggacgttagccctagttgccagcaagagggccttcaggatgagtggggcctttaggatgctttttcaccatcctcaatgaagaatggatgtcactaaaaccgtaataacagcaattgctctcaagacttccctggtggtccagtggttaagaatgtgccttgcaatgcaagggacacaggtttgatctctggtcggggaactaagattccacatgccacaaagtgagcccgtgtgctgcaaagagagagtctgtgcacctgaaagaaagcttgtgcatgatgcaggaagatcctg

SEQ ID NO: 34932 - DNA, 1816 bp, Bovine  19866881147872
  misc_feature (1)..(1): n is a, c, g, or t
nactctgagagacagtaaaggacagggaagcctggtgtgctgcagtccatggagggcggggtcacagagtcagacacaacttagcaactgaaccacaacatttaataaacattttgcccctaaatcaaaggatagttttgtatgtagtgtagtcagtattttctggattccacaggaaccaacacatagaagaggaaacatttttagattatagcacatttcatttgcaattttgggttggtgttacatttacatgccctctcccttcatactaatctggattgtgatatatttttagaatttttcccataaaaggtagggataggatagccatggaaagttttagccacttcctttttagtatgagaatctaattattggcatggattaaaatgcactgtatttatactatcaaattttgtagaagctgcacaactcctccccccgaaaaagtacaaactcacttttttcagaaagattaattgctcaggcctggtaacagctccctctgtgatgttattttatcgaaatccaaacaggctttgagctctctgcttggacctgggcagctatttagatttgatttcccttaaacttcatagttctttgccacctactgtgaggtccatgggaacttaatgcttcagattaaactgtagcttggcacagtagtaccataggtttccattttgcctgttaaattagcacctgcatccatgtaagaatattgttgccaaaaggctccatgcagaaccaccactaggccattctgttgttacttatttcaaagggttggtacaaccaaaaggctgggagaccttggctccatcttcagtctaccatggcccaagttcaactggattcccctttccagtcttggattttgaacagattctctcttatatattgtgggcttttcaactttgtttttaatcctgataaaatacaaacacatgaaacttaccatcttcaccatttttaagcacacatgaaggacattgacattttgtgcagtcattgccagttcagcatatctccagaattcatcttgaaaaactgaaactctactcattcaataactccttatcgcccctctcccagcttagccctggcaacagacagtctactttctgtctctgaatgtgactgctttagttacctcatgtaagtagaatcatacagtgtttgtctttctgtgactggcttgtgtcactgagtacagggtcctcaagagtcatttagttacagtgtgtgtcagaatttccttcttttttaaggctgaataatcttccgttgcatgtatacaccacgcgttgtttatccattcttctgttgtggacaccaggtttgtttgcacctcttgcctgctgtgagtaatgctgctatgaacatgggtgtataatatctctttgagactgatttcagttattttgggtgtatacccagaagggttaatggaacatagggtaattctactttttgaggaactaccatacttttttcccacagtggctaccctattttacactcccatcaacagtgcacaaagattccagtatctctacatcctcactatggttgttattttcttggttttttaattgtagtatataattgacatatactattattagtttcaagcatacagtggttcgatatttgtgtacattgcaaaatgatcaccatagttatctagttaacatccatcgccttccatagttaacaaattttttttcttatgatgagaacttgtaagatctgtcctcttatagcaacttctgaatatgcacagatcttccttaatatgtgattatgt

SEQ ID NO: 34933 - DNA, 1743 bp, Bovine  19866881334854
  misc_feature (1)..(1): n is a, c, g, or t
naaactttggactctgtggtttcctgtgagaaatgaaatggtggttacagatgatgctctataaattatttcatagtacaggtattttgtctttttcattaagtatgggacttttgaaattaaaaatggtttggactgattagagctattcagtacataagatattagaaactttaattgatttacaatgtgttgatctggcagtctgttaaatctaattgcaaaaaagttcactttattagtgcctgatttaatacagtagtttttcatttaatttcttcttggcttattgtgaattctgctttagaatctcatagaagcgtgacattggtgtgacaaactatttgtaaatagtcttgatcttaaaattttgtattttcttaggggaataaagaaataccttaggaaaggtaatttgggtggggtgttatagaagagtaaattcaacctaaaaaattcactaaatgtcagtaagtgctattaccttaaaatgacttttttcccccccttctttagaatccagcaactatcacaagaatactccttagccacttcaattgggataaagagaagctaatggaaaggtaaggaactatattgtgagctttatacttagaagtaattatggaaagcctgttgaactgaatttatgagacacaagtaagggattgatttatatacttaccaaactcgtgtatgagtagtatttgctttgatatattcccatgtatgagtagtatttgctttgatatattccccatctgtaagttttgcaataaacctagtgttaagggaactcaggcttgtttcttcttttactttggaggtgaggtgtggtgactctgcctcaatatcttctataatacatccccttgagtactgagaactaaaagtaggtgtttttttgttttttaaggacttgatacagccttagaacacatgaataagatcttcctttaattacttaaaactttcttccccataaacttttaaatctactgtaggcacaataatgacatttcttcagtaaatataaagaagttgctcagggtatccttaccagcaaaacagctgtttggagtgattctctggtttcagtgcaggactaaatcccattgggcattttctcgctggaaatgtttctggttctaaaggcaagaaattacaaggactggagaatgatagtaatactgccgtcttgatctttttgtctttcttagattagaaatttgaagcacttggtaataggatgagagccgttatttattctatcagtctaaaattagcagttctaattttaaatgattttaaaattgcatacagtttttgttacaacctgagaatccaagtattatgagaaataaatggaaaatatttcctgtgtgactttaaaatcaaaaacgctttgcaaaacagatgttaattaataccaagaatattatgaagtttctcacatcttgcaccccgatacaatttaatagtaacaacaataattgttaattattgagccctctgtgccaggcattatttcattttatcttggtgatagctttatggagctacaaattattatccccacttaatagttgtagaacctaagacttagagcttgatatatttgtatgagttttgtaacacaaggagttagcacttaaactcagatttgttggactccaaagcttatgttcttagacacatactgtagaactttcccaggtgcttgaagaataaaatgctccttga

SEQ ID NO: 34934 - DNA, 950 bp, Bovine  19866881355800
  misc_feature (1)..(1): n is a, c, g, or t
nggccaacatgtggggtgacaggtgagagcagtccatgaggcaggttgacaagttaggagttgtaaaggagggaaagggaatacatccagcttgtctgtggccctaacaaaccagagctggtgacagtaatattcacaaaacttctaatagtaggaactgcaaaaatattccaaaggcccgctagtgacaagggcaggtgaagtaggtacctactctccattcctcctctcagtgtctgggcagagccccacctcttctagtaaattgctccttctccctttccaccatagggttcccgtgggagctgccattttgttacttggtccactggccatagctgagagctccagagacagtctgatgtcttttctgggactttttgaactggtactgagataaagacctcatctctttcaaggaggtaaggctgttagggatgaagctcaggaggtgtaggaagttgatctatagtcagatcggagcagagacaggaatgcagatgtaaggcccccgattcctggcagcattcaagacttgagctcagtgttcctgaggcccagtggtattcctgctccctctaggttgactgctcaatgcttcttcgggttggaatgttttgccagtatcccatatatgactccagccagcttttcatgagggacaacctgggaccagcccatctaccagcaaaatctcttttgtgcccaaggcggtatgacctgggttcccttgccaccagagacctgaccaatccatcccctcatccatcactacttgcatgaggaggacagagccagcatgttccagaaagctggggcagtgaagccaaccagagaggctcaggtgctcagtggtgacacagggccaagtccagagaaatctcagacctggaacagccggccccagttccgggctgcagccctggttggaagccaaacttgtgggctag

SEQ ID NO: 34935 - DNA, 1060 bp, Bovine  19866881416693
  misc_feature (1)..(1): n is a, c, g, or t
naaaaaaaaaaaaaaaaaaaaccgcaatacaagcacatcataggaaatttagaaaataaaggtaaatacaaagaaaaatcacccttgattccacacccagaaatacacactgctacctggtatatattcctacagtcttacatctgtccatagttagacctattacatattcttctcaaaaatcagattgtcgtgtttatactagtttctcaatgaacacatcctgaatattttttcattttatcaaatacattttttttcctaatatcattttgaatggctgcataccattctattacatgaacctgctttatcaagttggggtataaattagatgaacatttcataagcatttttcattaaccacttaagcccatctgaagtaaaaagaaatacagtatctctcttgagttcatcctccaccctgaattgctcaagcaaattccttgaaagggtggtacatccaaggccaggtgataagagcactggagcctctgattgcgtgactcctgttgctactcccaacctgtccctgtataacgtggtcctgtacagtctcagcatctttgtccaccaatgcagtgacatcctcactgtccagatttctaagagatctctaaggtaattctccaatggaggtaggcactctgtgtgccaaagcgcctaggagggaggggcttccagctctatacacacacaagccagaaccctgacaacttagcacttggctctgagtttggacagcctatcaattcccaccagcagtggacctcattcagaacaatccttatctagtagagagagtctgaccatgttgatctcgaaagggaagaagttagatgtttccagtcctttccttttggaggcttttgcatgtatgctcgcatgctaagtcacttcagtcatgtccagctatttgcaaccctatggactctagcccaccaggttcctctgtccatggggactctccaggcaagaatgctggagtgggttgtcatgcccttctctaggggatcttccccagtcagggatcaaacccgagtctcttacatctcctgct

SEQ ID NO: 34936 - DNA, 1272 bp, Bovine  19866881627190
  misc_feature (1)..(1): n is a, c, g, or t
nccctgggaactggtgctgcttctgcccgtgcagcatcgggggccgtgtggactgggcttggaagagcaggtagtgttcagtggatggagcctgggcttgggactcggggccaggattcagaattccgcccatcaggtctgtgtccttgggccatgcttaggctcccagcctctgatgtgttactatgaggattgaatgagctaatgaataataaagcacttagtgtggtgcctagctcagagtaagcacctggtaatctacaaagaaaaaagtcttatcagtcattcaagccccgtgttcagcactttttattcatcttcttaattaatcctcagtaaattatgtgttattcttcctatttttgtaggtgaagaaacagatttggttaccgccaagttcactcagctcataggaagagattaggattcaggtctatctgactccagagccagtgctttttgtaccccagcatgctgccttccagaacagctctgacgcctcttcacttattttgagatttttgtcatgtttttcccgagctgccccttcttcaggctattgtgcccctgttttttcctctggacgcccaaacacctcgtggcattatcttaaagccgtcggcagacctttggactttttggctgtccaggcctcacctgagctatggggctctggctctggggaggctggcgcagttgccagcgcgcatgcggggcctgtggcacggcctctcctgcagggaccaccaggcctcggggcagagctgctccttgtcaggcacccaggaggccttggtgatgtgttgtctgagaaaggctagtctcagaggctgtcagtcagtgaataaaattttaaattttcttgtttacatcttaacagacaacatatcaggaacctttatgtgtgttccatagtgagtactgagaagagctttaaatctgtaaaattgtgaccacttagctgtatgggtgaaaaaagtccagcatctggtggacagatactggggggactctgaaattagaccattcttacttagccttggcagtggtgccaatctgtgttcccttgaactagcattgacccgaagtgcttattgagccagtttcaggggccctcagaggtaggtagccagaaccccagaatgtgcatacgttcagtggtaaaataaatgctaacatttagactttcctgctgtagaatctgttcgaaacacccccagcactgacaccatgccagcctcctcgtctcaaacatgctgtaccgcatcatca

SEQ ID NO: 34937 - DNA, 1700 bp, Bovine  19866881753869
  misc_feature (1)..(1): n is a, c, g, or t
nacacaaaagagcatgattctccctatctgtttatggcacaaaagagcaagtaaacaggattccttaacaaaagggtctctaaccaagggattcctggataatgctcattctcctcaggactcccaggcagctatcttaacaaaaaagagcactgggactctgcctgccttgcttaagaacactaggtataatctattaataccctcccttcccctaagaagggaaacaatgttacatggctagaaccagggacccaggctccagttggggatttgactagcattgcccattgtgacactgccatgcattaacaaagcttccagtggatgtttactgagggatattctgattatacttacaagtgggctgtatttgatattagggttgatggagggttgggctgctgcttatataaggttctctcatcctaggagaagttgggtgacctggaacgggcatccaggtggggcctacagggccttgctctccaaccacacctagccaacctgagagatggtacaaggagttcaacccctacattactctggcaacctcaaggcagttagaattgctcaaagcctgcccagtgtgctggccttgctccaaacacacaggaatatggaagcaaaacaccaactggtgcccgtcaaccatccattaggatcagcatgggaggtgggtggctaagagctgtctattttggacaagggcatgaagactgaggacagtttatagaaaattgtttgtggctcaatcccagaagcaaggatccacaattacctgaactcaggatgttgtgtgctgatgtgtgtgttcagatccattacccagcatgactttcccaattagacgttatgaaaactaagctgtcatggagttgaatacgctgagagatggagtgcacatctactattcaaatgaagcgagctcactaaacaggtgccaacctgaaggtgtgcttgtttgcattcagaattaaaattgcacccaaaaaagcacgttaaaaacttaacaaaacttcaaaccagaggtaaaaatattcaaactcagtgtgcgtttgagtgtaatcttacatatcaaatataaagaaatgtaagcaataatttagtgaggtgttactttatacatagtaaaatgcacaaggattaagagtagaccttgatgactttttgtaagtgtgtgaccttttgcatatgtggccacttcccagatcaaggcatagagttcttttttacccccagaaaattcacttatgccccttcccagtcaatcctactccctgataataaccacaccaattcttccaccatattttaactttgcctcttcttgaacttcatatgaatggaatcatacccatgcatttctggcttcttgtgttcaatatgtttttgagattaatccatgttgttgcatgatcagtggttaattcttttttttctttgctgagtagtaattcatagtatctatgtaactgggtttgttttttcttctgtgaatggattcttgtgttatttccaatgtttggttattacaaataaaacaggagtgaacttttttgcttatatgtgttgtacaggtcttttcgtgtggaaagatgctggcttcctctagagtctatacctaggtgtagaacactaacagaatctgccaagtgatatatgataagtttaaagataacttatagaaatgtgaaata

SEQ ID NO: 34938 - DNA, 1536 bp, Bovine  19866881775819
  misc_feature (1)..(1): n is a, c, g, or t
ntttaacataggcttttaaatctacccatgagccacttctaagtgcatcaagtgggttggcatgctgactgcagtgcctgttgcaggaactgaatatgtctcagcatggttggttaagggcagcacttcagaggaagagaaatcttggttcttacaccagttgaaacaaataccttgagcaagttaactcccctgagctgcagctgtagtttgtcatctgtaaagtgagataatagaaactcctttgtaggattgttgtgaggattaaactacctgccatgtaggagcatgaagcagatcttagccgtgatggtggtggtgatgatgaaagagaagaagacagcaacaacaattatgttggtgcctctgcagctgagtcagaggttcttaaaaaggagatgactgaaaccatccacggacttttttcagaacacaaatggagaagtccttctccagaccctctgaatctctgggttgagagatctctatcctctctatcctccagaagactacaccacagtgggcactgagttatgtgtctggtcaccaggtatcagaatggaaggaagaaatttccatgtatggattaggagagaaaagactaaagtcagcattttgtggttggagaagaaactaattaggtttgcttaaattttttttctttctatagttactacaaaagaagacactagagggcatatgtacaataaactttgaaataccctgtcttatgttctaatatgtgagaaactagttatacagctgttttgtaactaatagtcccaaacctctcacatctgaatgagtatttcctgctatatagttgccttcagaagccaaatggttacttaactggacttccattgtttaacaactcttggctctcctcgaaactgccttcaaaaccagtttaggaaccccacaagaaagccaaggtcgttgatttgtgtacatcacactttggacttgtaatgatacccagccgattcacttcccatattcattaggctcatttccagaaattgtaccccaaaataaagatagctattcccaggaatattcagaagaatacattaaaggttcagaatataattgggctctagaaaagtttagagtcatcatcataatccttgaaataaggtatctgacttcccaaaggtatatcctgacttgggtatggatgtgtgtatatgtgaatgtgtctcattttaaatgacttatatatggccacaccttatccaaatactgctgtcaacatgaggacactggctcctgggttagcctttcaggttgcgtatctgtgtttgagatgctcatttgtataaggtctggccaagaacagtcacatgatgtaattgaaattaaaattttttttttcatttcctttctgttttttttttggtctgtgcagttcccagtgctgctcctcagaatctgtctttagaagtaagaaattcaaaggtaaaactttatcttgctgttgttcatttttactggtagacctgttaggcctcaggagggcttataaagagggag

SEQ ID NO: 34939 - DNA, 1177 bp, Bovine  19866881828280
  misc_feature (1)..(1): n is a, c, g, or t
ntcatctagacctgaagcattagaacataagcccatagaagtataaaagtccatatcaaccagcaatactgaggagacacagacacccactccagtactcttgcctggaaaatcccacagacagaggagcctggcagggctacagtccagagggtcgcaaagagtcagacacaactgagcaacttgtcaagagacctaggaactaaaggagtaattgttctatcaactgaagcaaaatgtaacaggggcaataaatgcaaactgcacatgatgaaaaatgagacaagtgtgaaattttctcatagaacactaataagaatgatgatgaaacgggtattgcaataccccagcttccaggaatgacaacgtagatgattcgtatcaactcttccactaaaaagaaataaaaagctagacaaaatacaaaagatctgtgtgagggcaatcaaggtcatgaggaattatgggaccaagatccagaaaacgaggtatttgacgctgtattttttttacctagaggtatctgtggattctaaaggccaccactgctgaagagacggagaggatgagtgaagcttttgacagacgtaagccctgaggggacaaactggagtgagggactgccgaggaggagggtcaactccttaaactgtcaattaggacctcaaagggccacatacaagaaataaaggtaaacccaaaatatttcagctcataaattctgaagcccaattttaaatcatctcaatccctgagtggattacagtgatctgagattgttagtgacttcatataaccacataccagaagagaagcaaaggtacatcctttctgggagaagatagtagcattcagatttttcatacacaatccctgacactcaatcacaataaacaagcacataaaaacacgcaaaaatccctaaaccagaagaaataacaaatacaaaagcaaatcctcatgggaacacatgtgacagggtggattaaaggaataacaataaaatatggagaatttcagcagggccctagaaactataagacaaaatagacagtctagatttgaaaaatgcaataaatgaaattaagaaatcaataaatagagagctgtctctgtttagaatgtagaaagtcgtaagagacttgctcttacccaacagcccaaataggacagacca

SEQ ID NO: 34940 - DNA, 719 bp, Bovine  19866881832386
  misc_feature (1)..(1): n is a, c, g, or t
ngtctctctctaaactttgaattacgctagtctaatgactgctccggctgttgacttacacaaatcaaaaatggtttaaaagaatttgtaatagttcagtcaacttctgacctgataaaaattgtaaaatatactcttacagattttgcctgttctgtggtgaaattattttaatgtattatccacgtaaacaaagctacataagcaaagaatcttactcagtctaggtggtagcagaggcctacaaaatgatttcttctaacactgacaccacttgggtatctgtgacctgaaacagttgtgaatggccacagccatgcaaggagaacgtttgtcctcaagggtatctttccattttcttatttcctcacttgaaccccgcagctctaagctgcaggagataaatacgactgcaggagtgttgctgagaaatctcaccaaaggagcattactgcagaactggtcatggatgtttttaaaagtcagtctgattatactccagacccaggtgaataacatttcccaaagatgaggcttttattttgaatatttaatagtaggtacttattatataccagttgcggttcttgtttctaataaataaaaatagatacagtccttgcccctgaggagactattcattttctcaatgaaacatttgatgtataagcaaaataccactttcttaataaaaagagcctttgtttatcaagaaaagt

SEQ ID NO: 34941 - DNA, 1788 bp, Bovine  19866881885754
  misc_feature (1)..(1): n is a, c, g, or t
nactgagcacacacattgggtacacagcagataaagcacgtgtgataaaacgttaacctgtggggaacctgggtgaagaataaaaattgtactatttttgaaagctttctataaaaataaaatatacaataaaaagttagaaacaaatcacacccgcagttacttcctttacttagcatacatacccagattttcgatggtgtaatagcgttgtttatagtctacctttatggtctgggcatgagggctgccaatgccataaccaatggcataacctctgaccacaatgttttgattctctggaggcgtccagcttactacgatgctagtgaccagtgggcggacgtgaagagaactaggcacttctggaacacgagtttctgcgaaggagaggagagcaagatgagattcagatgcaccttcctttgtaatatttcattgtccttggggcaaggtgtttaggcttctgccaaatcatctggggctaagtttttttttccattatggccaagaattctcaaagagaatctgcatgtatagtgaagtacggccacagtttaactgcagcctaactcaacctgaaacacaagacactgcaggattattataatttggaaggaaagacaaagaggtccaagagccttcccaatggagaaaaataaactgtctttccactgctgcccactcctcttggtcccacagctgattaccacactccatcaggtggaatgagaaaggaacagcacactaaatagaagcctgctgtcaacaggtgatcacgtttcacatgacagtgatgatatcagttatttactccccaaactaatacggtaagtcagaaaatacgaaactcagaaccataaactgatttaaatggtgggagactaagaggctttaaaaggtggcaatttgcagtatcgttcacacacattatctcaaggcataaattcctacctctatttaaaaatcagtaaacaaagaattacattaagtactcaggtcttttgccttttaagcggagcacttgtctctgataaaggcaacatacacacactcatatggagtcactgaataaactggtgagaaaaacggcgaggtttctaggactaagggaaaagggaaacgtaactaaaacaaaggccagtctacagggtgcagccttaaattttagatcatctgcctacttaatggccttggtaaaaaagccagacttaaagcacctgcacatttttacttgttctggttctacttacagggacagttctcaaaaggccactataaaaaatacatttcaggagacttgctatattacaggaacgacagcagtataatccacaaaaattcataggttttagccacatacaccccaaaatctatgcctttatagtttgactcatttgacttcagttagtacccagactgttccaatcctgctgattgttgctcttaccatctaagtcactttcaaaagtttcagctgacagccagtcagtagctgggcctgtaccattgactgttagagcagccactcggaaattatattcagttccccgatcaagacctgcgatgcgaacaatttaaaaaaaacagatgaaacaagagttttggaaaaacaaaagattaaaacctcccattaaagccagtatctcacttaccatcttagtacaaagctactaccctggtggcttagtcggtaaagaacctgcctgctatggcaggagacccaggggtcgatccctgggtcaggaagaccccctggagaagggaacggctacccactccagtatt

SEQ ID NO: 34942 - DNA, 812 bp, Bovine  19866881998953
  misc_feature (1)..(1): n is a, c, g, or t
nctgctgctgctgctaccctactattactccttctactatttctgatactactactgctgctgctcctattactactgctactattgctgctactacagctgctgctgctactgctactagtagtgtagcactactactacaacaacaataataataatgaagacttgtctctggaattttccccacttttttttaaccctactaatctaatgacctggtgggtcttcttgggtcctttaaaagcatctaaaagtgaactattacagtttccctctgctttctcctcctgtagaggtctctgaaagctcttggggggaactgcatgaggtaatggatgcaaaagtgctttgtaaaatacaaagcattccccccgtgcaagctattattggaagaagcagaaggatgaatttaaatcgcaagatcccctgaaatactgtgaaaggtggccccgtttagatcgtcgtcctcctcgtgaatttacagaccatttagcaatttctccaagtgctcacacccgttccctcggtgacatccttgccctgtgctggggagagccgtctctcccaagtctggcctgttggacagcagcagcgcctgcagaggaaggggctcggttgctaggagaccagcaaaagtgggcagccagctcccaagcaggttagaattcggcaaaggattttaaaagcctatttctgtctgcttctgctagaattgaaattcttttcagggtccggccaccagtgatacaatctgcttacactactggtattgagaggcccttaaaggaaattattggtcatatcttgtgtct

SEQ ID NO: 34943 - DNA, 1518 bp, Bovine  19866880155696
  misc_feature (1)..(1): n is a, c, g, or t
ncatgtccattgagtcggtgatgccatccaaccatctcatcctctgtcatccccttctcctcccgccttcaatctttcccagcataagggtcttttccaatgagtcagctcttcacatcaggtggccaaaggattggagtttcagcttcagcatcagtccttccaatgaatattcaggactgatttcctttaggatggactggttggatcttcctgcagtccgagggactctcaagagtcttctccaacaccacagttcaaaagcatcaattcttcagtgctctgttttctttgtagtccaactctcacatccatacatgaccactggaaaaatcatagccttgactagccttaacttacctaactgtaaattatgccaaatctgagccatatattaatccttcattttacagcagagaaaaactgaggctcagagaaaggtaactgtctacaagttataatgctgcccaggcaatggcagtaaagaactgttctctcttccacacaccatgccatgaccatgccggctagaagatgcataaagatcatctttaccttagggaccacacttcttacattatcttcctcccttaactgtttatattaggaaaaagtcaaccttacatttgtccacctggtgttgattagcatgaatctgacatagataactgagataataattttcctctgacaactggctcccttttaatgtgcttatgcctttgtttgtttgaacattaagggagacaagccagctgtatagacttaagtccaaagcttcagtcttccatagaaaaccttttccatttcttaccttctgcatctgctgatcagacttggccatctctgcaaaataatccgtaggccgcttggtaggcactttgagctgatggaggcggggcaatactgcaagcactgctgcctgggcttgacggtagctgcagaagtaggacaaagtgtgaaataagctaaggcagagaggtcttattacatccttctgattgcctctcataaggtatccaaggtcggaagagcccgcaacacctgacctccaccagcaagaacacacacacaaacaaaatggtaataaaacctcattaactcaggagaaatttagatgtacacgcttttaaaaggggtgggggagtattgcttaaaatgaattagtagtttaatagaatgaccactttagaagtgctcactagcttacaaatgtgaattacacattcttacttagtcactaaaaaaagtccatataaggatcccacataagcaactttttgttctcataatcaactgcacaaaaaaatttaaaacttaatatttgaaaataaactggactttaaattgtgactgctggaccacggggcctttctctcaaccacggagcatctcctactctttagtccaaagaagctttcctccctactcccaggctcaggacacctcggaggaacacaggctcacggcttccaccctctccccactctctagcacagggacctacaacttttccca

SEQ ID NO: 34944 - DNA, 1400 bp, Bovine  19866880568612
  misc_feature (1)..(1): n is a, c, g, or t
ntacagatagggctcagcctacttggatggagtctgcttagggcttaggactcttagggcttaggaccctgcttaggactctcacagtcctggcctcactcatccaccccttggggctgggcagtgttggcatggtggcgcactgttccatgtgcctccagggaaataaaccactgttttcctactgtgtgaagtcctaatggaattgggaccctggggatttagctagttgagaactccaggctaggcatttgccagggctgcaggccaagacttctctgaaccagcttttggaccctcttgtatgctctcttaggagtgttctcactctcctttcagtttatctgtgccctagggctgcctggcaaagtcttagtcctgctcagatttcacattggctttggtgccagcatctggagtgacctagggatgatcctgggggagctaaatggagctgttggagtagatgagagcagctgtgcctgggagggttggaggcggggggtggctcaggctgttccatgctcttctcaggcttagcttcttccttatggagccactccttccacctgggccttgccctttacctcaggtgcttttcctttggggaacttggcctcctcttttgctgcttccctgcagttcacgctcccaacccctaaggttttgctgtaaagagaagaggctatggtggagtgtgggcaagttcaggctctcaagatcccggccggaccccaggtccatgaagcactgctgagcctgagctctcccttcccgctcagccccctggtcagaaagagaggacagttttgcaggaccaagtcatggcctatgttgtgggctctggcaggatccagagtggccagcacctgctcagtcttgtgctgtcctgcaggcgctgcaccagctctactatgaccccaacattgagaacaagaacctggctcaaaagtggctgatgcaggcccaggcgtcccctcaggcctggcacttcagctggcagctcctgcagccggacaaggtgcctgagatccagtactttggggccagtgccctacacatcaagatctctcgctactggagtgacatccctactgaccagtatgagagcctaaaggcacagctcttcacccagatcacccgctttgccagtggctccaagattgtgctgactcggctgtgcgtggcactggcctcactggctctcagcatgatgcccgacgcttggccatgtgctgtggcagatatggtacggctgttccaggccgaggactcaccggtggatagccagggccgctgcctggccctgctggagctgctgacagtgctgcccgaggagttccagaccagccgcctgccccagtatcgcaaaagcctggtgcggaccaccctggcagtgg

SEQ ID NO: 34945 - DNA, 3503 bp, Bovine  19866880584236
  misc_feature (1)..(1): n is a, c, g, or t
ntggatgaactgcagagagggaaggaaggggagtcagagctgaagaaagaggttctggctgcgactgtcccggcggctgcggtggagtcacgcagggagcctgggaggatgctgacctcccacgtcagctggcgtcagcttgcagttccgcacgagcatgaccgtgatgacgtctagtgtggcctcatccaggcgccgacgcagaacccgtacgagctcatccgtgatctcaggacctggacacggccacggtggggaggtggagacactggcagaagatccagccaccccatctcatcccttaaccccagactcaaacaggctgccatacatcagaagctgccagcactaatttctagttctgccaagctactcagcgtttgacaggcgagtcttacctctcaaagcctcggtgcccccctcaatacagtgggaataataatagcatctatctcatcagtaacattcttagcccaaggctagtatacatttattgagccataaataaatgagccagttgcctactggataccttgggttcagtgtatcccaaacccgccccagtatctggccagtgggaccaccatctatccacatattcagtcagtttagacgtctggctgcattttagccagctataggtcctacccttcaacatcccaggagcctgtcctttcccacccagctcctgctcgagagatgcccggagctagtgtaagaagtcccagacaactgtggaaccacatctggccactcccctcacctgcctgccccacgccatgcaccagcagctggatatgtctgtccacttggcccacaggacgagcagcatcggaactgcggctggacgccatgtccaggggagaacgaggaccctgcagggacactgtggtcagggcctggctccagggagcaaagtctgcaggagcacggggcaatcggggagtgggggatacatgccgaggcttcctcggaacagatgggctcctggcttcgggacagagcaagggacgggggcagggcatcactgtcccatggccgctcactgcaggacgtctccaggagcctgggagagagtggcacgggagggctttggaccacagctcctccactgccccaggctgtagcccggcttcccaggacccacataccgcaggtagtacacagcttttgttgctcgctcctgataaacaaacatgttcttccggttcaccacagagaaggcattaagcacagagcgtagggcctggatggctgtagggggaacctgggtttagaaaactctttttcccagattccccacccccacccctgaccccgctacactccacctgccctctcatgccaatcacataccccgagagacgcccatgctgggtcccattttgaggcgtgagtggactcgaatcacggttccccatacgacatcacaggagaaatggccagggacaaactgcatcgtggcggccaggtaccctcggggcccacagctctcatcggcagcataatctgggggacgggagatggtggatcagaaacaggacacagccctctgccctcagacttctcacctgtgaactggcctacctgtcctcaacccacgactcctctggccgatcgctctgtggggggaaagacggtcactttgggtattaagataagctcttaggaagacaggtcatagcacagaggttttcagaactatctcaggaagacatggagaaggagctaagaagaggtatcaggaaaggcaaagcatagtcctggggatgctgccaggacactctgagcctgtcggaatctaatatagaacatatcctactcatgtactcattgggcagtgcaataataatacacaccccactaaaacagaacgtgtgtgactgctcacatacccctacggcaggggcgacactacgccctttgctctggaggacagctagcccagaaaacccgaagggttgggtggctctttgcaagactgtggctgcagcccacagccttgaccgaccccttccaggttgatgaggaaccttccagtaggtcaaggtggcaatctggtttcccacagaagctgctctaagatgtgagcagcgtacaggacacccagggggctgcacagtctggactggaatgctggttactaagggtttcagcgaaaccatatggaaagactaaaatgaggaagggctgggtctgggctccgactagtctcacatcctgggctgctgggagccactgggaaggagtgctttggcggttgcagctcatactcaatttgcagaagatgtcttctaaaccctgggaagtccatcaattacggggattctgctttgatatggaacacatcccaggacgtgctgagagacgcgctctcccgtagctgttagcaacatttgtctacagacttgccaagcatgttaaagacaaggagtgatctgacatgacttttagaactgagggaaaacggcaaaggaatggcacaatctggctttttgctgtgagctggggtgagaggtcatgaggaataagagaagggagcagaagtgtggagattttgattcccatctcaagtagatgatcgtgtgttttctaaccccaaaggtttctgtgcctgcctgtctggagggacagccaatcagagggaaaatcctatgggcactcaggctccacccctccgggcttctcgtctgtgagctggcctacttgtccaccatcccctgccctttccttggccccggccatcacccagcaggggcgagatggtcatttcagaaaacaaggcagggccagtagagcatgcccttaggaagacaggccacagcggcgcctgctccgtgtcccttctctcctgtattcttcaacggtgccccctctgctggctctttcccatggaacagaaacatgttcaagtctctaccttattttaaattcctgccttgcctcccaccttcctttagtttctgccggatctatttgcttctcccttcactgccaggcgacttgaaagaggagtgcctcccggctcctccagcctaatatcctttcatgtttccactttctctggtttcctactcctgtctccactgaaagcactttcactagccactgatgaccccgtggcagccaaacctggtgatccttttcggtcctcttctccactgtattacctggcaccgaggaccaagtaatggtgagtgacttggtcctcccccagcttctcagcagtcttcggtaaaggaaggctcctgagtgggactcaccatcgctgggcagtggtacccgctgacgggagtggaagggggtctcgctacgccacaggtcttcttcgctctcagccaccagaagagagttgcacacatgactgtcgtgcaggtcctgaagaagcagccgctgagagaagaaggaaccagctctcagggaactgaaatactcccgcatacactgctggtggtggaggggggatcaaaggctagagagaatgcccattatcactgggggtc

SEQ ID NO: 34946 - DNA, 1211 bp, Bovine  19866880623526
  misc_feature (1)..(1): n is a, c, g, or t
ntgggaaatgtttggacgaggccagggaaccagttgagacattaatgcaataatctggacagaagagctaaggcaggaaagacagtgaccatggggtgaggaagctaagcaggagcacaaaagctgtttgggataagatgggctgattttagatggcctggtcagacagactttgtttaaaccctggctgcatgtccttaagcaggtcattccatgtctctgagcctcagtttcttcattcttaagatagggatgatgagccctgcctgaaggcagttgtcagaattggaggccatgcacgtgaagcatctgggttgagcaggtgcttcatcacctgctactttttttttaattaagagagtgatgaatgatgggggaggggcagagagcagggtgacactaccttgggctttagccttctttgtcctcccccacattgtatggcggagtgccctcccccaaacccctgtctggccatgtcacttcctcacttaacatcttctgggacaccctcatctccttgtttccgagtccctatgccctgaattgtcctccctaggccctggccactttgatcatctgttgcacctggtctctccccagcccaggggggtccccaggcccaacctgagacccagagttatctttaatgcccagagcacagagtctgcctctgtgtctgagggctgggtgggctgtgtgggccacgccttaccctgagtctcctggcagtgccaccagtgcccctgactgccccgaggcttctggccaagcagagccgccagctcgtggtctccccgctggtctccttctctggggacggacccatcgcctccgttcgcctgcactacaggccccaggacagcaccatggcctggtctaccatcgtgggtgagggggcaagagctaggggcaggatggggtgccggacaatgagggggtcagaggaatggaagggagtggggagtgtgcggagaagagaggggctgagggagagcagaggcttctggacggagttgggactgaatgctgcgtgctgtgcaccccacccccagtggaccccagtgagaacgtgacgttaatgaacctgaggccgaagacgggatacagtgtccgtgtgcagctgagccggcccggggaagggggggagggggcctgggggcctcccaccctcatgaccacagactgtcctggtgagaggcccagagtca

SEQ ID NO: 34947 - DNA, 1008 bp, Bovine  19866880642383
  misc_feature (1)..(1): n is a, c, g, or t
nacagacctcttcactggccatcatgcagaactgtccaggggggtatatggggccctgagccagaaggcagggtgatgaacaagacagtcatgggctctgccttcagggcacttgcagaggactcagactcaaccagaacccatcctccccaacccctcctccaggtccctacttcagcgacgagcaccaccatgaccagtcacccaagccagctgggcctcctcaaattctcccttttcctcatcccacctgtgcagctggtcaatacgtttgaatgcatcctgcctctaccccaacaaccaccacgttaggaagatctcatcagcacccatgtcttcagtgggcttcctgcctctggtcactcccttccagccccgcctgcacacaaaccaacgctcccttcagtttacagaaatgcatatccgatcaaggccctcagctttgcctgctgcttttagcccacagtagacatgcagataacgtttcatgaatgaacaaatgaatgggagaacaggcggatgaatgtgtggatgcaggttctctgagtaagaactttcagtgccttcatatcgtgctcaggagagtctttagtctgacatccaaggcctaacacacttcaactgcaaccaaaccctccaacttcatcccctgcaactacactctgggcttctagcagatagaagtcgatttcaaagagacgtggaagaatgggccccagatcttgtgaggatcctgctctttcttccacaacgtacagtcaacaggaacagtcttttctagagaaacatggtgaatgggaagcacagacatcctggtggaagtcctgcaatgttatcctgaagcctatttcacacctacagcagctgacaagctgtatatcattccccagccacctccaccacccactccagccagagactcgagagccatccgcgacacctccccccgccaccccccgcctcctgccccacattcaacccttcaccatgtcctgtctactcggcctc

SEQ ID NO: 34948 - DNA, 1405 bp, Bovine  19866880653134
  misc_feature (1)..(1): n is a, c, g, or t
ntgtgtatctgtgtgtgtgtgtgtgtgtgtgtgtgtatgttagtcgttcagtcacatctgactctttgcaaccctacggactgtagcccgccaggctcctccatccatggcattctccaggcaagaatactggagtgggttaccatgcccttcaggggatcttcccgacccaggaattgaacccacgtctcttacatctccttcattggcaggtgggttctttaccactagtgcccacctaggaagactatatatgtatatatatcccctcttcttgaaatttccttcccatttaggtttccctgttctttagatctcagcttaaatgttgctgcctggaaaaactccctgaccctcgtacctccctgctgttacgtctggaattttgtcttttgttcatatttttttaagcggtatttttgctgctgctgctgctaagtcgcttcagctcacgccctatgtgccgcaggatacatcaatgagtgaaagaatggaggctctgccctcacagagcttcattctacaggttttcccgcattctctaggcacttcttaaaattcgtatataaaataattgattgtgagattctttttattctgcctcttcccacaacagtaagctctctgagggcaggatcaaatccaccggttaacagttgtggctctaggatataagacactgcctggtatgtgttcgacactcaataagtgtttgatgaatgaattaatgaattcatgctatttgtagaagtcaggactctcagttacaatccatctcaaactaacttcagcaaaaaaaaaaaaaaaaaaggaagtaaaagaaaaaaaaagagaaaaaatgaaaagaagaaaaaggggagctgtggcttaaaggctcaccgcagggggaggccacaggcagcgctagagcagtgtgcacggtggatccagcacctccctgatctcacagggctctctctgcttccctccacgtgttgatcttctcctctccggctctagacggatttcctccatgttgccaggggagataggtgctgacagctccaaagtcacatattctcagcttagcaacacaaaagaaaaaagcctttgtttctcacagcgtctgtacgtttgcagggcccagaaaaccagtgattggtccagcacagatcacatgccttctctggcctgatctctgtgtcctagggaatggggcattctgattggccaggcctgggtggcacacctctccctgagagtctggggggaagtcaggtgggcaggacactgtgaccttcacaccaagatatctcaaagttcaggagatagtcccccaaggaataacaggtgtcactgacaggaagaaagcagcatgccactagaacgaatgcaacaatggctccaaatcacagggacaggttct

SEQ ID NO: 34949 - DNA, 821 bp, Bovine  19866880706689
  misc_feature (1)..(1): n is a, c, g, or t
nttgtaacaaagcgtatcactctgctcttctaatggagttgaaaagctgatgaggattttggctcctagccaagcattatgagaatctatagttgacagcagctcaggagctgtaggcatataaaaataagggataataggtagtatttagcaagtacttgctatgtggcaggcactgtgctgcttgttatatggatcactcatttgatctgtaacatacctgcgaagtattattatccttatggtcagaatgaagaaactccagcacacataggctatattatgcttgctcaagatcccagttagtaagcagcagcgtcatacttagacatttctaatcatgggggtgggcatgttaagagaagggaggcccaccattctgacaaagaagatcggaggataaagaagaggtgaactgcatgagggaaacctcaggtggtacctacgtggaggctgtgaggccagcctggagcccagacttccagaattgctgttgagaattccatctttcctagttcccttcacgtttacttccccttgtccagtactccttcctttccctcctcttggtccttcctcccatgaccccctcccgcctctcccgccccactgcaattctgtgtctgatgtatcctccccaggagcctgattcgggaggatggggggccaggcaccgagtgtcgccacctgcagcagctcctggtgaggcgagttggggagatctgcagggaggtcaaccaggtaaggggcagggctctccaggcatgggatgcagcccagatgaggaaggagtttctaggaacttgactttcggaggctgt

SEQ ID NO: 34950 - DNA, 890 bp, Bovine  19866880708959
  misc_feature (1)..(1): n is a, c, g, or t
ntgaggaccctagcaggccccagtaacacccagcactctgctcccaccccgtcccaccttgctcttgtaacacagcctggaagaccgggtgctgtgtttcaggcagaacctctcctccagagctaaagcaacagaaggcagccatgcaacaggagctgcaggcacccctgaggccttcctatgtctcccccagccacaggtaacccagagcagacagacagctgaatgaggcaggctgaggggcaggccatggcccccttgcagctactccctcccattcaggccacagcccttggagtcctccagccagggcactggactcctgccttgcctccatggggctactagagtttgggccaggcttctccagtgcttcctgcccgctccccgtctggagcgctgccccaaacttcgcagcctggctaccacctgccactggggacagaagattcagtgcctccctgggaaaaggccagcttctactctgatgtccagtgtagcaccccaggccccaacatgaagggctgctcaggaaggaggcttcagcttccattggaactcgtcctgtctactactgctttcagctgccagggtccagcccacttcagatctagtctaggatgagccctccccaggattccactgctgtctgtctgtctgtctggcccccaccctaccttcttaccagggcctcagtgtccggtcctgactgtcacagcctctggcctttctcctcccaggcatccccccaaaggcctggcaggaggaggtcttgtcccagccctgattcttgtccccctggaggacccagacaaagcacagcagcagctcagaaacaggaatagaaatttcattaaaacctatggactttaaaatcctagtggtacgca

SEQ ID NO: 34951 - DNA, 805 bp, Bovine  19866880712472
  misc_feature (1)..(1): n is a, c, g, or t
ncccagttgcccgaatatctcaagttagtttttcgcgttccccatctggggcccactctggcttctgtgtgggtcctctacttctctcacccgtcgcctctctccttccttgagctcttctctccccttttcctgtctttgctccaccttctcaccaccccgtcttttccttctcctccactctctcctcacctcgcccccttcctctggccgccccgtcttgtctctgcctctcccacctcccgactcagtccgactcctttctggtgcctctcccatctcctcgccccagcgtctccctcctcttctcttcctctccctctgagttcttcctcatcactctgccgtatcgccgtacatcatgatcactccatccacatgctgggtgctgggatgatgaggtcacagagcctcccatggtgactggcgccttgagggcaggagcgctgtccagaggagggcctgcgggcggggcacaggctgaagcagcccagccccgtcccgtccgctggcctccacctgggcgtccggccctgacctgggaggagggccagccactcagcaccgtgtcacgtggccatgcccactcgtgcccacggcatacatacccccctgccctgtcccctcccgccccccggccgctgtgtgccctgccacccctgtcgccgcatgtgccgctgtctccatgccaccagtgccgagtgctccatggtcacacgtgttcacatgcgcacatacatgcatcgggctgtctccgccaccagctcaggccccacgctaactctgctcatgtacccccgctgct

SEQ ID NO: 34952 - DNA, 978 bp, Bovine  19866880721556
  misc_feature (1)..(1): n is a, c, g, or t
nattggaggataatgggccatcagccccagggagcagggagaaaggatctctggagggcactgaccttgctccctccttctggcccctccctgactatttccccacccacttctgatacctgcaccccagagccatgctctccctcccaggtcaagccacctttcctcaatacccggtagaaggctctgggagaaccactcacctgccgcctaggcccagcccggaggggcagcacagaaaggcctccacgtccaggctccatctctgtcaacaccaggagctcccatcagctgtagccgacctgttcccccaccctcctcttgaggcagcttggaacatggagagatgagttatcctcagagcaggtcatccctctacttcagcttctccaggtgagggacaaggggcttgggcagctgggctcaacccaagagaagtggctgcatcgagaacctaactatgtggtggtgctttgcacctgtttcctttcagatctcataactccatgaggtaaatagtatgtatcatcgccgttttccagaccagcaaacaaggctgagagaagctcagcagttatctaaagtcacaagggtagacccacaagctgtgcggggaagggaacttcctgctctgtgctgcagggctggagaagggagcagctggacaccctgacctcacagagagcctgctgtccatactgcagaggaggaagttgtggcctggagaagaattagggtgcttgcgggttgccccgagttattggatgatagtgaggtccaggcttcagcctgtgctgcccacccaagtgctgctgcagcttgttcctctgtgatttctgtctggatgcagagccgcctgaccacagaagtctctcctgactacagacatccttcaagagtcagcaggtggtagaggctgaggagccctctaggaacaagggagggggtctgggccatggctctctatggccaccaggg

SEQ ID NO: 34953 - DNA, 4666 bp, Bovine  19866880731541
  misc_feature (1)..(1): n is a, c, g, or t
ntcggaaaggtcagatggggaggaggggtatggggatacccatcacctgtccatccacccgttatgggtctgaccttcctgggagcccagtctcaacagaaaaggggcctgaacatggagcccctctgtcctctggggaggccacttgctgatggcatatgtgaggggtaggactaaggtgtgctatgtggctgggcttctggaagcaagactgactgggagggggtgggcaagaggccttgagatctagaggcctaggttcagctaatgtaagagtcaagcatacctggggtcttggggtccagggtactcatagggactgggttctggggcaggggccagggcaggatctaggggacatcagggaacgatcttgctgtccatattcagctcagttcagttcagtcgctcagtcgtgtccgattctttgcaaccccatgaattgcagcatgccaggcctccctgtccatcaccaactcccggagttcactcagtctcatatccatcgagtcagtgatgccatccagccatctcatcctctgtcgtccccttctcctcctgccccccatccctcccagcatcagagtcttttccaatgagtcaactcttcgcatgaggtgtttctcaacctcaggactgttgacattttggaccagataatccttaattttggggggctgacccgttaactgtaggatgtccagcagcatccctcgtttcttcctactatgccagtagcacttaccctcccccatcagacaatcagaactgtctctagacattgcctgatgtcccatcgtggggcgagatcaccctggattgagaagcactggtctgtgccactttttgctgccttctttgtgctgtacaaatctggaaaactgaggagggccactcagggaagattcgcactgatcggccactggagctgagttctggtgggtgagtagtggctgggccaggagaaggccttttttccagtggagagaaaaatgagtgcagaggcctggaggcaccacgttggtgaacattaacccaggggagcctccactccccagaggaaggaggccagagggctggtggcctaggagttatagctgtaggaaggtgcctctgctggccccttggtctcctgcccccagagctaagcctctgctggagctcgtgcctcccccagcgactctgggacagtcttcctaggatccccgtccgctcacacaggaacctgaattgctgagggctgccagggggtcagggtcccagcttcctgggtagggggggctgattctggctgtgccctagaccctgaccaactagctggaggagcaaaggcggcctgctgctggccacctcctttctcagggccgaggtcacggcacggctgagactgatttattccggtcttaatctggtggttggtttggtgagagttggaaacacgttggttttcccttcccaagtgtaacaaggcctgtttccgcctccgcggccgctgctgcagtgccacgcggtgaagtgtccgggacgtgacaaaagggctcggttagctgcccgccggtgagaagatgaacagctcgcagcgctgcctgccctcacattcctcttgcccaggcgctggcctctccccttggccggccgctccctggggccctgcatacccctctttttactaacatccattctggggccccaggccccactgggagccagggtcctggcccagggaggaagtggggaggaagctgtaggaacaggtggtatttggagactaattaatatttgtgaataataacacgtgcccaagggaaacaaatcaatctgtgtttgcatattcatgaggaggcctcggaatgatcccagctgttctccagccagggaaacacccccccacacaccatggctggcgtcacatggtttctctggggcagcccccattgaggctggcaggggtggatggctgcatggaggtggcctggcctctgtttacaggcctgtccgagatgtttgtgtttgaatcctatggcttggtgtggtgcctgttccttttttttcctcacagcagcgatccccaggctcttcaatttcacaaaccagtacaatttccagaaggacttggaggccagacttggggttagccatttttattttgccaaagtaaggacattattaaaaaataactggtatctgctatcccccatcacttcctataagaaaggacattttaacaccaaggacaaaatttcagaataaaggacagttcttcccaagaaagggcagttggcagctttatgctgatgtagtaaagaaaaaggatatatgaaaaccatcctgagtgtagaaaaatggcatccagtgatactgtacaatagcattcagtacggagttgttttcctacccaagtgtgtcagttggtagaaccgacggtccacagtgcaatccagagacgagccgagtgtgcaagtgctcaggctgtgttttcatctcggctgttgagagtccagactcacccagccatgggcagaagtggacactctgctcctaacaccatcgcactgaattcagaaggttctcggccaccccaggcaggagggtgtcagcccgcctccctactgccctcctgccgtctcctcccaggtgaccctgagcaccctggggctgggggcagggccagtgtctagacccggggcctgggactctgatgggacttcagcgtggggccctgaagctgggagcagcctgcaccgcctgacactggggtgggctttgtgcccagagtcggggcagaggcagcttgcttgtacccggagccgatgagggagaagccctggccaggacagctatgtgctggccagagtaattccctgagaacgtgtctgtattttgtgtccccgtgtttccccatcactctgggtgtccccatgtccatggaactgctgggagaagctgtactaggagggaacatcatcttttcaacctctttacctctgtctcctctttctgcatttgagcagtgaccttggcactccagacccagatacacagggcaagccaggagtccccaggtcagggccagttgtctttgtttcagtggcagtgggcttaccagaggcccagtttctctgacacccatggccagaatctcatccaagaggataccacacgatatctgctctggaataacaaccccccacgatggctgtactgggcttctctggtgactcagcagtaaagaatccacctgcaatgctggagactcaggttcaatccctgcatcaggaagatcccctggagaaggaaatggcaacccactccagtattctagcccgggaaatcccacggacagaggaacctggtaggctacagtccatggggtcaaagaagaatcagacatgaccaagtgacgctgtggctgtactggggactgaacaccccctgatattgataactggtgttatttatctgtgataatgtacctcggtgatgtccatcgggcagctgcacacccatgatgtctgtccacactcacatggcgtctggccaggatggctacacctccatgatggctctgcctgggagatgcactgtttgtgattactatgccaaggcagctacaggggattatggctcagtggccattatactggggagttacactccatgatggtcgtgctgtgctgttcctccacagtgtctctcccgtgtagcttcatcacctctacatccatgcagagagctgtgtgtgtctgcactggtggtagagggggcaggctcacacctggactgcttgtacaatacctgggggggaaacctctatgaataccgtattgctgcaccccgtgatgtctgtactagtcccctctgcctttgtcctttggtgcgacatgccactgatatgcataccaaggatgcagggtggttttatcaagggcccatacccccgtgacagcccggcccggcagctcaccacctgatgtctgctgggaagttgagtatcattggtcacggtgcagcatgacagtgccgtggtgaccaggcccagacagacagggccttagtgatgcgtgacctccatcccaacttggccatacaaggcatcacggtggggatgccttctctcctggtctcagctacctgaactctgatcattcagcagaaccccaggtgtggggtaaatggggctggatgcccaccaggctgcctcagtgttcttgcttttgctgctaagcccatctcagacttctggtaagatcttgagacaagagacagctccccccttcccctttgtggtcagcccctgcctcagttcacagtcctcctgctttgtcccagcaccttggctccctttctgccctctgcccttctgaactttgtcccggttgagactggggtccaagttccagggcagagcagagccatctttgagtcctgtctcttcctgttaccagccctgtcacctccttgcagattctctcaccctgtgggtctgccgggtctggtcccctctcccacccgagtctgtaggtaccaccgtggagccccgaggtgtgtccaccagcactctgtgccctgttgtgtccccagggcattaatgagggactttgtacaccagcactctgtgccctgttgtgtccccagggcattaatgagggactttgtacaccagccc

SEQ ID NO: 34954 - DNA, 742 bp, Bovine  19866880775492
  misc_feature (1)..(1): n is a, c, g, or t
natgctgctgctgctgctgctgctaagtcgcgtcagtcgtgtccgactctgtgcgaccccagagacgacagcccaccaggctcccccgtccctgggattctccaggcaagaacactggagtgggttgccatttccttctccatatacatatgcaaataccacaactatactccaataaaaattttaaaaacaaacaaaaactggtccttcttcccaggtagtttgagaagcatggactatagtggtaagagtacaggctttgaaagtgaataggactggttggcataatctctccagacctccctttcttcccctgtacccactgaccccaggattaagggaagcagcacctggacacacacagccaggtgtatgtgctctgggagaggcgaggacagcgggtcctgagtggaggcgcagaggaggcccctaagcagggctgggcgatgacagtttgacccagaggattcgtggggcaggggatgcgtgggctatccccgggaagatggggcttcagaagcaagtcagacaccctggtgggagcagcttttccccttgcagtcccagctccaggctgtgcctgagagcaggaagctttagaagtgcttagtagcccagcgcctggtgagagcagaccggcaggctgcattcttgtggtatttggagaattgatcttgtcaagattagcagctttgcttttcttagttcaggtacaagatcctcacgtgggtagctccgctgc

SEQ ID NO: 34955 - DNA, 1279 bp, Bovine  19866880781783
  misc_feature (1)..(1): n is a, c, g, or t
naaataggatgacaagcatacagcacttcagacagtgtctagaatattgcaagagctcagtgactgtgaactgctgtcatcactgttgtcgtctgtcacacgtttcaccattgcctctgtgtgtgtgtttgctgcctcatccatcatccatgaagccaggactctgagctgtattgtcatattcccaaggactagcatggtacctgggataagctggggcttagcaagtattggagagctggagggctgtcactggggctgggactgtgtccttgggctctgggttatgtggcccctgtagacaatctggccatcatccaagctctgactgggggaggtgctcttgcctcttgtgcttcccgtctcgtggtcctttcctcacctccccacgcttccctctccttaccaggatgccgggccccttcccttcctccttggtctgtgctgggtacagtctgtcagcagagtcgcggagccctgtcaacagcagtccaggcactgccccgttgagggcctccttcagcataggcctccctgcctgtcacacacatcatgcatgtggctccagcctgtctggacacagatgtggccagagtccctaaacagaaggaggggcagcagctggcagcatttccgagcaggaggggttttctaggaaacagtagggacgtcactggaagcctggacatcactttggagcagggggggtcaaagtgcccatgaggagctgcacaaagccgccctcagagctccataggtgagcaaactcagccttaactggcccatgggggcccacactgtggagccggtcaccccaaattcttttccctcttccagccagtggtcatttactgagcacctgctgcgtcctggccgtgtgctggggagggaacaggcatgttagtatgcagtcagtgccaggagggtgcacagagaacagtggggacctggagaggctccttcagccccatgtggctcagggaagacccgacctgtgcagaggcaaagacactggagtcaggctgaagaaggagcagagatccgattgaaggggaagagaattccaggcagagggcgcagcaggtggaaaggcatggaggtgttaaagagcctggcaggttctagaatctttaagttgttggacatggctaaagcttagggagaaggaggaaaggagagggagtatctgaagcagggagcttagcataaggaaatcagatcacagtctggggctttgtaaaccagactaaaaagcttaacttatcctcaagcagcagca

SEQ ID NO: 34956 - DNA, 1509 bp, Bovine  19866880783866
  misc_feature (1)..(1): n is a, c, g, or t
ncttccctgtccttcactatctcccagagtttgctcaaactcatgtccattgagttggtgatgccatccaaccatctcatcctctgtcatccctttcttctgccctcagtctttcccagcatcagggtcttttccagtgagtcagctctttgcatcaggtggccaaagtattggagcttcagcttcagcatcaatccttccaatgaatattcagggttgactttctttaggattgacttctttgatctcctcacagtccaagggactctcaaaagtcttgtccagcaccacagttcgaaagaagccaaatgcaaagccagttcacattctttcctattagaaatcacactactacccaatccaggggcagtcatgccttcccttcttggacatgactaagatggctcatcacttaggtcactcatctgtgaccttgatggagcatggagcccaacctttcgaagtctgtgcagtcatgggaaactctggatccgccaggggaactggtctctggaggctctcacagcagctggtccttcctcacataagggatgggactggatcttcttgcccagaagcccacatcgcccatttggcctgggaaattcctgatagtcccaaattccgatgaggtgctcctaaaatcctcaggcagtggggaggaatggaggtgcgttcacaggctctggggttctctgctgttgctgtttgttcccctagttcagcagcctgcagaaggagattgaagagcgaaccaatgacattgagctcctgaagggggagcaggtgaagctgcaaggggtcatcaagtccctggagaaggacatcatgggcctcaagcgggagatccaggagagagacgagacgattcaagataaggtaaaggcacatcctctgtccctcctcaactccagcccagctggacacaggccatgaggacaaagctctaggcagactccctgccttttgacctcaatgggggatgagctgtcagtgaagtgcctactgtgtgggtggcacggggctaagtgctgtcaattcatcccattcaattcccctcaaaacgccagggaccgtgagcaacccagttatatagctcaggaagctggttcccagggtgaagtgtctcacccagggtcgtaacagtttataggtgacagacttgtggtaagaacctgagtgctgactgccaggccccagctcgcctctgtgccaggcatcccagggtgaccatctcatggactgggggcagctcgcccagcgcatcgcccgtgtggtcccccgatcagagaggaactcccctgcggtgagccctgtaaccactggggaccgcagaaagtgaaatcacttttctggatagctttctcacacaacagtaagagacacatcacctgttgtgaggtacaccacctccgtatccgacatcgcatgtcctcctcctgagcaaatccaggctcctcgccctcctctcgtcccctctgcccttgttgccttagctggatgcaactc

SEQ ID NO: 34957 - DNA, 2457 bp, Bovine  19866880809722
  misc_feature (1)..(1): n is a, c, g, or t
ncagattttactgaggtgatggaaatattctgcaactggattggttgattgttacgcagttaccatcagccactacaactatgagttagtgcagtcaagaaagcagatgtttttctggaattcctttgttttttctatgatccaattttgagcattaccttgctagtatgtcaaatgagtacaattgtatggtagtttgagcattctttggcattgcctttctttgggattggaatgaaaactgaccttttccagtcctgtggccactgctgagttttccaaatttgctggcatattgagtgcaacactttcacagcatcatcttttagaatctgaaacagcccagctggaattctatcacctccacttgctttgttcatagtaatgcttcctaaggcccacttgactttgcactccaggatgtctggctctaggtgagtgatcacaccatcatggttatctgggtcattaagaccctttttgtatagttcatctctgtattcttgccacctcttcttaatctctcctgcttctgttaggtccttacaatttcttttattgtgcccattttggggtgaaatatttccttagtatctccattttcttggaagagatctctagtcttttgattctattgtttccctctatttctttgcattgatcacttaagaaggctttcttttctcccctttgctagattgtaaacaccacaaaagcagctaaaggtttgtccccctcattactggtaggtggaaagattctgagagactttttgctggatctgataagagtaacaggtgctgctgatactatctctttcctccatatccctatgaataggggcaggttgtctggagcttcagcaatctctttatggctatgaagtgcacacatgaaggtcaaagccaagttgtgaagtatgatggagaaagatgaaaggagactgtgtttttggtgactctgtggaacattgagccaatgccaataaatgcccctcttcccttcaaactttttattacatttgggaaaaataattttgtttaagttactgttgctagggttttgtgtttctggcaacagaacacattcctaaatgataccaccaataagacccaagtgatcctctcaagatttttgtctcatggaagacgatgggcatgtaaacaaatctaggcacttgtaaagcacttgctttgtgaactctgtgtgggtgaagtgatggaccatatcaaggaatccctagttgcaaactggtttctggcctttttttgaggggggcggggaagtgattggatggatggctgcctcactgagataggagtcctaggaggtggagctcatttctggagtgaatagattagttctttattgggcatatgggttttatataccatggcaccccactccagtactcttgcctggaaaatcccatggacggaggagcctggtgggctgcagtccatggggtcacaactgagagacttcactttcacttttcactttcatgcattggagaaggaaatggaaacccactccagtgttcttgcctggagaatcccagggacgggggagcctggtgggctgctgtctctggggtcgcaaagagttggacactactgaagtgacttagcagcagatacccaggtggtggagggggtggtgtccggaaataggaggatatatggatctgaactcaggggagactttattggaatacagaatgggtgtatcaatgtgcactcagtgtgcacatatgagtgaagcctgagagtgaaagtgcatcgagctcttgtttcaggctttatgctaaatgctttgtatcatcaccaccaccatcatcttccaccatcacagctaacatttactgagcacttaataccttccagcttgacttctaagtgctctgcctgcaatatctcatccagttctcacaacttagaaagggaagtgctattccaattttagctataactaaggattagagaaattaagtaacttgctctaggtcataatgctagagctgtaaaacacctatgtgggtttgtagaatgagaaaagaaagaaagaaaagaaagtgaagtcgcttagtcgtgtctgactctttgtgactccatggactgtagcctaccacactcctctgttcatgggattttccaggcaagaggtacggagtgggttgccatttccttctcccagaggatcttcccaacccaggaattaaacctgggtctcccgcattgtaggtagacgctttaccgtcggagccaccaggtaagtcctctggtgtagaatgagagaagaggacaaaggtcagagagccatgaagacttcaacattttttttcttttaaaaataatttgctttttaaaattaattttgtaatttaaatttaaaaattaacgtatcgtatacatggaatgttatgcataacttataagtgtatatagctcaaagcaa

SEQ ID NO: 34958 - DNA, 2455 bp, Bovine  19866880822169
  misc_feature (1)..(1): n is a, c, g, or t
ntggtgtactttactgcccattcccctacgtggtgctgacctcctgttcatccgtggcgtgaccctggaaggagccttcacgggcatcatgtactacctgaccccacagtgggacaagatcctggaggccaaggtgggctgtgggtggaaggtaacctggagggatggggaggggcagagagacgccagcctctgagcgcagctcctcctgcaggtctggggggacgccgcctcccagatcttctactcgctgggctgcgcgtggggcggccttgtcaccatggcttcctacaacaagttccacaacaactgttaccggtgagagtctccctgccggcgctggggctgctcccttgctcctgccctctctgcagcctgaccctgcttcccccagacccaccagatccagtgcagcctcctggcctgccaggaccctcccttccgctcacagcctggagatcctggcagtgctgggtctgggtccagtcgttgcagaacagagaacacttaggcagaagagagaaggggtgccgacagtgatgccccaggggtctgtaaggactcagagcctcaagcccacttaaggaggcccagaacagaccagagatgagaatgggagtgcttttgttcctagaactttccccgtctccaagtctccgggcctggcccaaattgggcaggaggaactaagctgcatgtcctgaccacgtgcttccctccccattagagacagtgtcatcatcagcatcactaactgtgccaccagtgtctatgccggcttcgtcatcttctccatcctgggcttcatggccaatcacctgggtgtggatgtgtcccgcgtggcagaccacgggcccgggcctggccttcgtggcatacccagaggccctcacactgctgcccatctccccactctggtccctgctcttcttcttcatgctcatcttgctggggctgggcactcaggtacgaggtgcgggactcgggcctgtggctgggggcgggaggaggcggggccaagggtaggcccctgctctgatggccgaatcctgcagttttgcctcctagagacgttggtcacagccattgtggatgaggtagggaatgagtggatcctgcagaaaaagacttacgtgaccttgggcgtggctgtggctggcttccttctgggcatccctcttaccagccaagtaagaaccaagggaaaggctgggtgggagttgccagggtatggggggaagacaggggagagacggggaccgtagcctcaggcacccctgactcagctgcccactggcccataggcaggcatctactggctgctgctgatggacaactatgcggccagcttctccttggtcatcatctccttgtatcatgtgtgtgtccatcatgtacatttacggtaagtacccaagcttccacggcctcctgtgtcccagcccctggcctgctcacgctgttctgtgggctgctgacctccctctgtccagggcaccagaactactccgaggacgtccaagatgatgctggggttcccaccaccctgctttttccagatctgctggcgcttcatctcaccaaccatcatctttgtaagttccttgctggtcccgcccctgctgccccggtggcgagcatccttctcttgggaaccagccaaggaagagcacgagcccaaccattaggccagagctccccctggggctccacacccacagttcaggtcactggaagtctgagtgaagctgtacagagtcagacaggtgtggagactcagaaccacccaagccctggccttgggttaggaatggagcacagggccctgtatttgatggaagacagtgcacagcttcagaaggggaaaataggctggcagcagctgagagccggccctccctccctggtataaacctggcatccccccagaggagccttggaaatcataactgaccttggcgttggcctctgacagcttcactgagctcgtgtctctagtccctcatagccaaggtgcttggagtgctcagggtatgtggtgtgaatgcatgttccagaagcaggctgtgcaagtcaggtatcagctcaggatccggggacaccctcctaagccaccttggaataggctggcttgggaaggggagttctgggttttcaccagtattcaacacctgcaagacagaccccccagcagggagtagaagtggtggagggaaagcccaccatgaccaggaacaatatactaagtctcgtgatacaactctccatggtttcattattatccccactttacagatgaggaaactgaggccctgggatgttaagtaattgatccaaggttatatagcttctaagggtcagagccctcatgtaaagcaggtggtctgatctggagcgtgtgtgctgggcccatgctgcactagaaacaagtttaggaggaggagtggtctgtgga

SEQ ID NO: 34959 - DNA, 2256 bp, Bovine  19866880835106
  misc_feature (1)..(1): n is a, c, g, or t
nggaccactgcccagccagggctctgtctctctgccctcacctggatgaggctgtgaagagcatcatgggcctctcctctgagctggcagacatctgtcagagagatctccaggcccgggtctggatgcccagggacacgggtgctctgaaactcaggctcgcttaggtcctcggtctctatgctgagcagggtgggcggtagtgaagtgttaggaagcatcgcgtcctagaggagcctgcttcccaagtgggagcagcacacgatggtctgcctccgcctctcagaagggtgctgagcacaggacgctcgcaggagaggccaggagaacccacccacccgtctctgctctaaccgccatattgcttggtggctggacatttctgtgcaacagaatgagtaaggctgattcctggctttcagcaggtggagggagaggtcattcattgtggaagagagacccaggtggagaagcaaggtttggtgggaaaagtgcactcatctggggggcatgaaaggtgggagatgcagacctccagagagggaactgggcaccaccagtgtactcagtcctctgctccttccgttcccccagtgctgacccctgcagacaccagacacacagctgtctgcctgcctgcctctctcactcaacagtttctgtctgagactcagcagtttaggggatcatcactacaatctggatgtcctcggacaagcttctgctttctctgatggccactggcaactccccaccactaacctagctcaacactccacaccaaaacaggaaagctgggagaaccaggagagtaagatggggagactgctgcccatattgaatgggagacagaagcctgggcaggaggtgggaaaccagtgaccaagcatgcctggtcgcttccccagggcaagaggccccgggctataggggcttcgtctgtgtgcccccttatacatcattcaagaaccatcccaacctggactcagaagccaggacagctcgttcccgaggctcggggccctcctccatgctgctgctgaagagccctgggctgagaggaccagggcttgggggtgcatgaggcaaaccccgagtgtggccacacagtgcgagcagaaagggggtgatgtctatttcctgcagcagctcctcacaggcatccactgctatcagcaggtcctgcgaggtcacgctctgtgcttgctgcaagctccggaacagccctgggggaagcagaaggggccacgaggtcaagctctgcgaggacctctcccagtccccatggccgtcatctgcaaagtgggctcctccttgccgcagcgtcacgctcaccgcggacgtagcatcgctgtgcgtgctcctgtagcaaggcacagtggctggctgcccccttgtgcctgggctccatccaggctgaggagagggaaggctggtcgaggaactgagtcctaggaatggaaggaaagagagggcttggccagctcccctcagtgacagcccacactcaaccatccccaccttccagtggattgtccctaggtccctaccaaaggcagtgacggcccagagacttcagctgatgcactgaaggaagtctagcactgggcaggcaggacatggccaagaagctgagctcctgacactgatcatcaacttgtgtgtctctccccttgagccatggctgggggccatggttggctgggggcggggaaaggacccaggtcaacacagagggcactcaccggaagacgagatctcggggtggctgagggggctgcatgccaatcatctgctccctcaatgcttccagagaacagctatagatgtagacaggacaccgggtccggggcccatctgcaccctctgtctgtgaagcctggcgcccagggtaagctggtacgtcctgacggaagggtgggctcagctctcctggattctgggcactgtctgtgggcaagaggtagcgcatggcatccagccctctgttcccgttcccgctgctgcttagctgacttaagagtcagcagacttaccactggctggggtgacactgagggtggggacctgggactttgtcaccgtgaccccagttcctgccagatctttcgggctgggggcctcgttccaatcttcaaacttaggcctcatctcctcttgagggggtccctctaggccatatgaagccagatgtaggacatctgcagaagaaaagtgagacataactcagagccgcctggcgggccagtgagggag

SEQ ID NO: 34960 - DNA, 1021 bp, Bovine  19866880835955
  misc_feature (1)..(1): n is a, c, g, or t
naccgctcacagggtctccagaccttgccccagtgtagcttgggggaatcctcctcccccaccattacgaaacactcttcagatggacagcctcactctggctcttgtctccatccatctctaactctcttctgccacgtccatggggcccgaagtcatgtctcctcctcggatttggctccagtgtccacctcacacccctcctctgtcccgcagactaggggccccctctctcagaccctaagtggctgcatttcataggcccgtgcgtgtagagctcccagcctggtgctgggcacgcagaaagtgctgggcaatcagtagccactgctgccgcggggaaaacaccatggggctgcaccacccagtttcgtctgactttgctcagttgcctgcagctccacccacggtctagcaggcccaggcatgccgggtggaccagcctctccatcccactacctcccccagtgactcactctctccttccatccacagcgtctctctcgtctagctcttaggacgcacagctgccagggaccagggaggggccacgctttccaccgagcctggcctgcttgcccccgcccttccccacttctctgcagggacctggccgctgggccgcaactgtctgtaaacggggcgacagctccgtggcttctccccacaggctccagaccagcttcctcacactctggggctgcgcagcatggggcttcctcaaggtggcggggttctagtggcccatgtgcctcggtgggtttgtgggctgggtgggccctgagctcagtgagtctgtttgagccttggggtgcgcgtgaggcatgggggcctgcctgtgccacactcccacccgtccctgtcccgccctttggcacccggcacctgccggcgggacccagccctgtccgcccgtgtcctccatgagtcctgagtcttttgtgagcggcgtggtccgcgcgcacctgtgggcacgtgtgtgtgcgtggggcacaagagtcttgtctcgttttcgtgctgt

SEQ ID NO: 34961 - DNA, 1565 bp, Bovine  19866880837442
  misc_feature (1)..(1): n is a, c, g, or t
ntcttggtgcaggctccagaatcctcaggtattcagacccttcctcatgctgcacgcagaggtgatggcacctctccttgggccatagtcacccagagggaggctcacatgtctgtgggggtgtggctccctcagagccagagaagcccaccttctcgctgccgcttgagggttttttataaaggagagagtgatgcagggaatgggactggtgagggcaaggggcagtgtcgtcagtgtctcagccagaggacctgtcctcagcagttccccccacctggggctgtgtggggaagagaggaggaacgttcacggggggacctgctgtacgcaggtgttctgcgcatgctcagcacagcttttcccgagcctcatgtcggctctgtgaggcggggcgacgacatccctgactgcacttgatggaacaggttcggggccgtgaggtccccagtcttgggtggctccagagtgtgaagcaggctctggcggctcctgtcaggttgcgtggggatgtgtttgtgtaagcggatatacacactggctcttaaaaagcgtgtcctcctctttgcagcctggccaagcaccggatcgggacaaagaggcaccgcgtttgtcttgaaatcccgcaggaggtgagtcagagcgagctcttccccaaggaggagctgggctccggacagtacgacatggcggagtgccaggccgccctctctcccgtgaggcccacccacagctccgtgcgccaagtcgaggacagcctcaccttcccaggtgagttggttgtggtattttttcccccacagccctaactgttctgttctatgttggatgccacatcactgcaaggtcacaggcatgacatgagagaggtgggtctgtgagcagatggtgaccagggtgtgggaagcgctctgggtggggacacctagggtcacggagggacgtgggggaaggcccacagctgttgagggagctggccatggtatcctgtgatttgagcagggggcgggaaggggaggagacaggtgtgccacaggagcttctccctgagacgtgggatgagacagcatggggactgcctacctgccatctgagagcttgctcactgggggcccgaggggccattggtatttcaggaagggacggcgtggtccagcaccgtgtttgaaagccttcccacggacggttatcaagggtagatttatctggaaggagcaggtgtcagcctcgggtcaggcccagcttgggggacctctgcgtggacagaattgctccgggtgtgtgctgggagccatcagcactgtgggcacagcttcttccatggagcagacttcctggcctggctcgctgggtctctgctgagctgaggggacttctggggaagggacagctgccgtgtgctgtgtgctgggcttgggaagcagtagcatcctcacatcacagaggaggaaaccagaggcccagagaggctgaggcagctcgccccagatcgtgcaggggacccccgttaacggtggagccagagttggaaaccaggccttcctcagcacccatgttcttgtgtc

SEQ ID NO: 34962 - DNA, 792 bp, Bovine  19866880842936
  misc_feature (1)..(1): n is a, c, g, or t
naattctggaatgggggcggggggtggttctggtgtagactcttaatagatttgttttagatgcaatgacagtattgacagctgagactctggccttgacccttagtttcctcctctataaaatatcatcacctatcccaacgatgggtgaaagcacattgtaaagttaaaagtgccacataaatgcatgtgttaatggtaacaaggtgctgctgctttgagtctggaggaagtcctgcacagccactcacttcagctttttgtgctcaccctcacttggctggcagaattagaaatttcttcacactgagccagaatctgtcttcttgatattacattgacctgctctggaaatctgctctcttgaaaatacataaatcactttgggttttacctcctgaggccatagagggaaaatctgaccctctgccaaaggagaatctatcagatatctgatgatggttctgagtctttgctgctccacaataatcatctccaggttccttaagtgcatctctaacagcatggtttgagtttcctattttatatcttagatcacaagcccatgaacgaactctggctggtctacttttcaacttaaaatgtggacgccaaaatggagtataagacccaggtgaaggcacagattcagagtatcccacattctatttactttggggaaagctttaccatgctgttgacccaagaaatctctatgactttcttgcttctgctgcttagacacatcccctattctgtcctaatgcagctggctttttttggacacacaca

SEQ ID NO: 34963 - DNA, 661 bp, Bovine  19866880871409
  misc_feature (1)..(1): n is a, c, g, or t
ntgagtgcctcacctcttctctgcatgcagtctcagggcaagggcatctgatcaagtccttccacctctcagtctcccgacagccttcccagctccccaccccactgcccccccagtgcaaagattgcttatatgttgttggagtggtcagatcgggtctgtgacttgggtctgtgctcgtactgtccaccctgggctgtccccctggttgcagatatgtggaggggactagtccctgctggtcactgggtgttggtaccaatgaatctggtttctgactttttgagactttggtccataccatatggctgatttgtgggggccatggcgctagaattcaggggtctctgtaagatttgcttgtcgctttgggaaagggtatttggagaggagctgcaggtctgctttctgactctgggtttaattttctcaccttggtgtccctgttaggttgctacggggtaccccctgcaaaggcttctgaagactggatgtgttctcggtgttcagccaatgccctggaagaggtgagcgcatccatgctgtcgctgtctccccgtgagacgctcttgctcagggccactgtgtttcatgtggaccctgccccagcggtctgagcaagacctggtacacagtgatgtgagagtgttgtcagaataaa

SEQ ID NO: 34964 - DNA, 2251 bp, Bovine  19866880884834
  misc_feature (1)..(1): n is a, c, g, or t
ntgccccatgtacgccaaattctgggccggtgaggacccgggatatagtcagccctgagcaaggtgagcatatattgtgcacttggcactgtgctaggtgagtgcccaatgtgtgccacgtcatactggttgagcacttgtcacatgccgagactcatgctaggagaatgcctggtaagtgacaagccttctaccaagggagggcccggtatatgccaaaccctgtgcttgctgagctcccaggatgtgtcaagtccacactggttgagcacttgccacatgccaggacccgggctgggtgagcatccactgtgtaccaggctctgagatggctgctgcagacaagaagtatctaaacactcttgtcaaagcacaacagaacaggtcagggtggggcagccccaggcggcctgtggagctttcaaagccctctaggatgatttagatgctctggcacctggagccctagcctgggtgactctgctcttattcatcatgaggcttcccagtagcagagccacccaatgcagcagagatgtggggagagaccagtgaggctcaccaaggcctatctgcccaatgctgtatgagtggggagcaggcacaggggaagggactgagtgggactttgtgtgagaccgtgggattaaagctgagccactggggctctcctgtcttgggctcctcactaccagcttcctgtcctctgagccccaggcaacccggccctacatgtgtataaatagaggcactaggtctccatgaaagggaaccacccccacccccacccctggtgccgccaagcatcccagctgctcccaggcttggaagcaccccggccagctgggttgctgcatggccctgtcctaggagctgctgaggcatgagggaggcagctgagctggcctggcagagaccatctgggctgggagtcggggggaggaacatgtgtggcaggcagtgggcctaggcacaggctgggaagtggcttgccctccacggggcacctgctgcatgggaagaccaacagaggctccaaggatgacacatggtagacactgagaagccccaggggcccatgtcttcacacccaagcctggggcatagggggatggaagtgaggacctcgtggccagggccagctgcctgctcccgataccaggacacacatggtgacagaagtcacacacctggagggtccaagtgcccctggtttatacgcatggccctcagctccctctattctgccccaccgtggcctctaagagaaggagcatccttcatgatctgcccttaggggaccacgggcagctagtgaagtccagatacagctgcccaggttagcaaagaggaatggtgctcctcagagacaagggctacatggagtcagcactggttccaactgagtcctgagaatagtgtagcccagggtcataagcagaactgagaaagaacagactctcaagcaaccactgggggtacccaggggacctgctatggagcctcagatgcagcagcagtgggcacatgtcaaaggctaaagggcacgaaggaaactatgctctggctatctttaggcacatcctggtctgggaacaggcgtcccaaggcggcattcccttctacagatgcgctagccggcagagcctggggtctgggaagctcagccccggcaggggttctgggaccttgggattcaggctctctgtgctgcccacgtgggtcccacatcacccctgcttgcccgtcccagtcctttcagggtcactccagagaaagcagaccacccagtgagtcttcagagggtttcttaagtttcacggggctcagaatctccatggagggaggggcagagctgcactccactttctgctacaggcccatggcaattccaacacttctggcaagaaggaagccagtcttgatcctatcatggcatctactccccgctagcaagtatgtgggtctggagacctccatgtctgcccacatctgagcactcaagagctcaggctggctcaggaatactttgagaagcctaattcatttagacttgttccaatcaggagttggccagaccagagcggaactgagagctggatgctggaagttcaggaccaggcaggagacagggtcctcagcttggagcacaactgtttggctccctccccaacagcatgtctggaccgaggacaaaagagtcccagaaatccctggtgggacagggcttgtttggggagggctctgcaag

SEQ ID NO: 34965 - DNA, 1197 bp, Bovine  19866880885427
  misc_feature (1)..(1): n is a, c, g, or t
ntggttgtaggcgtgagcagggatgagggtggcatggcctctgttgcttgtgtgtgtctgatgccgtgtgtgtttcgtatgagacggtggatgtgtgaggcactgcgttagaggcctgtgtgtgtgtgtgcgtgcgtgtgtggagagcctgtggtccggcgggagagccgggctgtctggtggccagtggcggcagcttgcctggaggggccccgggaataaccacgccaccccccccggggagtagcccgcctgggtgagtctctgtcctccgtgaccggttactgtgcctgtggccccccaccctccatctgcctgcttcccccccatttgtctcccccagccccctccgcacccccccagaaggtgacgtgtgtgagcgtgggctccaccaccgtccgggtaagttgggtcccgccgccggccgacagccgcaacggcgtcatcacccagtactcggtggcctacgaggcggtggacggcgaggaccgtgggcggcacgtggtggacggcatcggccgcgagcactccagctgggacctggtgggcctggagaagtggacggagtaccgggtgtgggtgcgggcgcacacggacgtgggccccggccccgagagcagcccggtgctggtccgcaccgacgaggacggtaggcagcgctggggataggcaaggggaggggcgggggacaggagagctgcctgctacgggtgaggatgcacgggacagcccagcaggatgctgcaggcaggagaggctgtgcctcggtctaggcaagaggtgtcccaaccggacacccagggctcagcctcccgagtgcctctgggggactccccatcttcccagtacaggcttaatggccccgcctggggagatggagctcgtgggacagcctgtgcctgaatcccagccccggagctccccaagcaggggagcctcaaaaggctgaggccaaagagggcaagaatcagagagactggttctggagacactagtgaggctcacctcactagatgtcagggtgacgcagggcccagaggagacagcacagattgtgctgacttgggcaggtcgaaggcctggtgccccacctcccaccttggtcctcctccccaccgagtgaggcagtcctgggcccaagggctgcagagtcccaggctcttccccatgcaggtggagggagccctccacgttcct

SEQ ID NO: 34966 - DNA, 1124 bp, Bovine  19866880901315
  misc_feature (1)..(1): n is a, c, g, or t
nttgcccagattgcgctacagctgggccgaatgctggaagccaggaaggtgaggagagcaccggggtgtggggagagctgggctcactgagctcacaggattgcccctcacagtgcccataggagccagaaggcagcagtctccatggccctgtccccaccaacagctgccccacagctaaactgggccctggggcgtaacgccctttctagctctcaccgagttggacactgggcctttctaaagccttccaagaccactgattagcttcagcagcaagtccctgtcccagatcccatgtccaggactccctgctttcctctgctggggtcatcagtcctttcttatcttatcttatggacacctcttctcacctggcacagagccagggtggaatgcacgaatggtcagctcaccaaatggatggatggatgagtaacacagtaactgaatgaatgaatgtatagaattagtggatgaatgatataataatcatacaaataaactaattaagggaattcctgaattccttgctggtccagtggttaggactccatgattccactacaggaggcacgggtttgatccctcgtctgggaactaagatcctgtaagccacatgacaaaaaaacgtgtaattaaataactaaatctaatataataatatcataagtaaatgataataataatataagtaaatgaattatcaaataaatctaagtgaagaagtacatgaaaatgagtaatgtgaaaagagttcttaaatatcaattaatgactaaatagttttgggaattattaaactatcttaagaatgaaggaataatcaaataaccatgaaagcaaaagttgctcagtcatgtcctactttttgcaatcccaaggactacattccatggaattctccaggctagaatcctggagtgagtagccatttccttcaccaggggatcttcccaacccagggatcgaaccaggtctcccacattgcaggtggattctttaccagctgagccaccagggaagcccaagaatactggagtgggtggcttatcccttctccaggggatcttcctgacccaggaattgaagtggggtctcctgcattgcacgcagattcttta

SEQ ID NO: 34967 - DNA, 887 bp, Bovine  19866880931291
  misc_feature (1)..(1): n is a, c, g, or t
ncctccctccctcccacagcctgtagcccctgaaagcctgcttggcccacccagatcctcctgatccctgatgcttggtcccctgaggccccacctcaggtcaagctgtccctttctcttgcccaggatgagggcccccgggacacagtcgacagaaaagtcagtgacttggagttttcagaggctgagctcatgggagaggaaggtacataggccagtgggtacggggtaaaggctgcttccagccagcatccagggcctccgccgccagcctctcctgttgaccacgtgacatgtgtctccaggagatgcatctgcctgctgcgtggtcaccgagagtgacccagagctggaagtggagtaccgcgagagccgtgaaccagacctggggcctgctgggctggactgtgcctcgctgtcagatgcagacaccgtgaacccggacgaagactccttcagtatcctggggggcgactcccccacggggcctgagagcctggcgcatgacctaccgccgctcttcctgcacctcacgtgctccgtgcggctgcgtggccagcacagctcagtacctgtgtgcagcctgcccacctgcctgggtgagtctagaggtccccaggggagggccataggacctggtccagcctgcctgcctgtctgggggtgggagagagcctctgggtataactctttagccctagacacttggaatctgtgcttgtcccagggctccagtgacccctaacctcccccctctcccaggccaggtgctttctagcctagagggcccccctattggaggccgagttgctctgcgggacctcagtgtcactctggacgtactttgtgctgaccttgccccggaagtggagcttcccccgacctca

SEQ ID NO: 34968 - DNA, 1116 bp, Bovine  19866880943726
  misc_feature (1)..(1): n is a, c, g, or t
ngatgctggtgagtacagggactagactgcagggagagggtgggggtcatgagcaccgtccatcccttctggggcctgctgtcagctgctggccttgacaggagggcctaggaggctccatggggccccaagtctggcactgccaggactcctgagtggtagggctgtctcaggcccaggcaggcagcccctcacccagcaggttagatattgccgctgtttggagcccacagcaggcagattctgctacagagcccaaaagtcatgctgggaggcaggaagcacactccccaccctcatcacaagataccctggaaagcaggctgctgttgatcctgccgggagggctgtcctatggctgacaccccagcacccccatcctgtgctctgcctgctgtggagagcattcagtaggtactgatcgaggagtcctcagagatggatgtttctagtcttccactagagaaatagcatagagcatttcatgttgaatcctcttgtgaggtctttcaggaaacatccctctcccctttccccaagtcacggctcttcactgcctgctgcctcagagcacagaagaggtggtacgaagcagcgggcaagagcagggccagctcatggacggatggctcatggatgggcggagcaggccagctctggaatcagaagccaggaaaataccccaagggcagtcgttgtattccttctctggggatattgcctcaagaaccagtgagactgggcagctgccctgaaggaagccagtggctaaacatggcccttcccttggcccctcccttccccacatggattctcctgttgctgttctcattcactgaaagactgattgacctagggtctcttgctgagccctccccaaacaagccctgtctctcaccagggatttctgggactcttaagtcccgggtccagagaaatgctgttggggagggagtcaaacagttgtgctccaggctcaggaccctctctcctgcctggtcctgcacttccagcatccagcccctcaggcccgctctggtctggcccactcctgattggaacaagtctgaatgaactaggcttctcaaagtattcctgagccagcctgaactcttg

SEQ ID NO: 34969 - DNA, 803 bp, Bovine  19866880964363
  misc_feature (1)..(1): n is a, c, g, or t
nctttgcggccccatggcactgtagcccaccaggctctcttctgtccatgggattctccaggcaagaatactggcatgggttgccattcccttctcgtctcctgtgaggttggtccccaattcctctgaagttggagacagtcactgggggaggggaaaggggtgcagagagtgccccactccagacccagcacttctacagaacagctagctatggtcctttagccgacatacacatatatttctggggaggtttctcaaagatgtctctgatcaaccccccagaggtaggaacccctggtttattccatatcctcctctcaaccacatctcttctgagctctgttcttggctcactgaattcccacccccactaccccagctccagagacctgctgtttggtgacaccatggggccaggttccatttttctccaaagaagaccttggccacagggttttcttggtgcctttggaggtctccacagtcaaaactccacttggggtctcaagggtctggaaatgccaagtgaccaaaatgggcagcttctgcaactgacatgacttgagtctcctttggggtagttttaagaagtggggaaggaagcccccatgtcctgcgttcccactgtgccaggcctggtggcagtcctttgccttctgcagcctcatgttattggccccatcgtgtaagtccgaaaccatgggctcagagagaagggaatggaccaacaccgcccaatgacagagctgtgaagttggacctgacccagatctgcttcctctgacagcatgctgccctct

SEQ ID NO: 34970 - DNA, 895 bp, Bovine  19866881021833
  misc_feature (1)..(1): n is a, c, g, or t
ngtctggtacaaagtaggatcttagtaacctaagatcggcatgaattctgatgtaaaggacatcttccctgtgagtttggtaagtgtgctgactccaatgggaacatggcaggatgacactattttaaaatttgttgttattattattttaaaaatatttattgggctgcgttgggtctaagttgcagcgcacaggctctctagttgtggcatgcggggtcagcagttgtggtgtgacagtttagttgctccgtggcatgtgggatcttagttctctgaccagtggcatcgaacccacgtcccctgcactgcaaagtggattcctagcccctggactaccagggaagtcccaacatcattattttttaaaaggcaaagtctttagtcagacaggcctgggttcaaaccccagctccggtggacctccctctatgtatctccttaggcaagttactttacttgtctggtcttagtttctttatctctaaaatggggatcatatctacccatctttgaagctagtgagcattattaataatagcaatagatgatatatattaagtgcttactgtgagctagacgctgtcctaaacacttcatatgaatatatattaactcatttaatcctcccaacagccccttgaggtgggtatgctactatgcccattttgggagagaagatgggggagtaaccttggctcaagcaagtctcccaagagaacggcctcagaccctagcgactgagctgcttccaggccagcctcatgcagcccgggtccccagacacgctctgctgacttctgctgacttcctgcgagtccagactgagggccaagcccctggctaggccactggttccaggaaggcccagtcatccatgatgcccaaatgctca

SEQ ID NO: 34971 - DNA, 1616 bp, Bovine  19866881044104
  misc_feature (1)..(1): n is a, c, g, or t
nctgtgccgctgcttattattcagccgctagtcacttaaaggtgcgtaggaaacccacagaaactgagacacctcaagccctcccttctctgcatctgaggagatccaggacgcaggctgatcaggagtctggaagctgcaagtatccaagagcatcttaaagcccaaggacacctgacaatgcagaggcctgctgaccgctgtcctgtgtctcgggcagattcctgtggatccacagagcaatgacccaagtcagtcggacaaacaggacgtgctctgcatgtgcttcagcccctccgaggagacgctgatcgccagcaccagcaagaaccagctctacagcatcaccatgtccctgacggagatcagcaaggtgagtctcgccagcagcgcttcctgccagcctggggacgggtcaccactgggcaaattttaatccaattcctgagaataggcccatgcaccccttcataataaagcaaaagaaactctgatttcaaggtgtccttgtaggagcactccaacacctgcagggggccggggtgggggacaccagaatctgattgttgtagcttctttggatggcatcaccgactcaatggacatgagtttgagcaaactccagaagttggtgatggacagggaagcctggcgtgctacagtccatggggtcgcagaatcagacacgactgaatgactgaactgagcctctttgaagaacaccttgaaggtctctctcagatttaaattgtacctatcttttcctcagcaagcaagtgtacttcaggtatttaatgtactgcagtacctgctcctgtgcacaaagatgtttatgtgtaaagatttatcattgcttttgtttttaaataataaagccagtatgaatacactgtagatattgcagcaaaaaggataaaaaaaaagcactttgtacttagaaaaggttcattttatcaagcagacattacagttttaaatttgtatgcagataatagcatggactcaaaatatagcctgcaaactttggcagaacaacaaggaaaataaaccacctacaatcacaggaggttttaatatatctttctcagcaatgatggtttttaaaataataacactattgagttattcatacactatacaattcacctacttaaggtgtacaattcaatggtttttagtatattcatagagttatgcagccattaccaccatcaattttagagcatttcttcactcaaaaaaaaaaaacctgctattatgctcccatcatcccatctgcctccccccagctctgctgctgctgctgctaagtcgcttcagttgtgtccgagtctgtgtgaccccatagacggcagcccaccaggctccccgatccctgggattctccaggcaagaacactggagtgggttgccatttcctcctccaatgcatgaaagtgaaaagtgaaagtgaagtctctcagttgtgtccgacttttagcaaccccaaagactgcagcctaccaggttcctccatccatgggattctccaggcaagagtactggagtggggtgccattgccttctccaccccccagctctagccagtcactaatgtactgtgtctctatagattt

SEQ ID NO: 34972 - DNA, 1360 bp, Bovine  19866881067755
  misc_feature (1)..(1): n is a, c, g, or t
ncagggcagcttagaagaggtatcacaatgcagaagaagaagttacagttgagtactaactaggactttcccctgagatcagagaggtaagtatctcaagaagccaatgctaacatcactccccctgccctcctttagacaggttttctctcaattgcagccttcatcaattcacccttgcaacacagaaaagcccctccttccccaccaggatggcggtctcactccctggacctcttctcttcccccattcagttccccaagataacttgtgagtcatatctgcagatttgatcaataatgcctgaatggacacctcctccccaaaattattcttgtgggaaatgtgttggcattctacttcccatttttcaaggtgggtttctttacttcaaggattttcttttcaatagtccatatccatactggtttccttaaatactgaagttgttaaacaaatacattcatacccttaaagactacttcttaggcctagtacattttaaagccaaactgagaaaggaaataattccttaactgcctcaaattagcatcgtgtcttcccttttccctgggaatcagtaaatccgattattgtggcaagggtaggatgtctgttcctttcttgatcccctttgggatttgtttgaataagaatatggtcctagtccctttaatgacttctcaatgattttcacaagagaggatttgatggcttgattttaggacgctggcaattacattcttgccaagagctaatatcaatttggggaaagagaaggggattggcctattctcccagttaacaaaaatggaaaaggatggaaaaaaacaaaacaaaacaaggacagtattcaagactatgtaggatagacctactaatcagtgaaacagactttagagcccagaaataaacctgtacacttatggtcaattgatttttgacaaaggtgccaaggcaattcaatggggaaagattgtcttttcaaccaacagttctgggaccactggatattcacatgcaaaaatattaatttagactcttatctcatgctgtactcaaaaagtaactcaaaacgggtcatatacccaaatctaagagctaaaactataaaacttttagaggaaaacataggagcaaatcttcaggactttgggttagaaagagtttttagatatgatactaaaagcacaagcaatgtaagaaaaaataataaattgggtttcacaaaaattaaaaacttttcaattcgaagaacaccattaagaaagtgaaaacaagttataagctaggagaaactatttacaaatcttacgcttaataaaaggatttgtatctagaatgtgtaaagaactttta

SEQ ID NO: 34973 - DNA, 3459 bp, Bovine  19866881077545
  misc_feature (1)..(1): n is a, c, g, or t
ngcgacagcgactacgctatggcatctacgtcatcaaccaggtgcgcagccgcagcctccaggctggtcaccggccaccagggaacccccgagcacctgtggggaggggcccacgtgcctgttggtgcgtctgtgcggttgggggcattcctggatgcctggatagctgtgtggacatgcgatgtacgtgtgggtgtccgtgcatgtcacttcgtgcacatgtgggtttgcatgtgccttcaggggattgcatacgtgttagtggtggtggacacacggccaggtgtgcgtagcctctgttgtgggtgagtgccattgtttacctttggtaggccccaccccatggtggtggtagcttagggtacactggctatgagatattgagggtcctgagcagagagagagttagacctgaaagagagatcaagactgccttagggccaagtgctgagcacagctgagatccaggaattcagctcaggctccaagcccactgccatgggcctggctggggctggcttctggggcctggagaaggtctgatacaggccctcctccccacagagaatccccagacttgaacttggatccctttgactccaggacagtggtgtgtcactggagtaggagcagggagctgtgaagcgaccaagcggcccagtttagccccagggtgggaaagtaaccattgagatgggtcttgagggataaataggcatcagccagtgcagggactggggaaggcaagcattctaggcaagggacagaggagaccccaggccccagtgagagaactgatctcctgtgtttgggaactggcagctgaggtgagagatgccacatgcagggtgggtagcagaggtgaggttgggaggactagtggaggccacagccacaagggtcccaggaggcatctcaagcagctggattccagcgtgaaagtgatggggcaccgttttgtctttttttggctatgctgggtcttcactgggggcaacgcaggctctctagttatggtgtgggctctagagtgtgtgggctcggtagctgcaatgcacaggcttagttgggatccccatggcatgtgggatcttagttccccaaccagggatcaaacccatgtcccttacactggaaggcagattcttaacccctggaccaccaggggagttcccatagtgaggttttagggagagggtaatgtgtgtgtgtgcttcttagaaagattgctctgactacatgtggacaatggggtggaaggggagtgggaggtagggcgcctggttgggaagaggctactgtgttcagggtggaggtggtgaatgtgcctgtgagttgggcaggagtcgtgcagatgagaggagagatgtgatacaagtagctgagaggaaagggaggtgccaggacaccttgaggctctctgtcttgactgctggccccatgtatggttgcgcctgtgagatgggaacacaggatctgggccgggtctgggggagaatgtgtcttttttgcatgtgatgagtttgagtgcctgggggaagtataagaggaacggtcagcaggcatttggacaaatgaactgacctaggagtgaagtctgaggtggagagggatctgggagccaccagtatatagatggtccctaaaaccagccatgttcagcctgcctggggtggggcctgggacctgagaggagaaagccagcatgtaaggaatgggtggagaaagaccacagaggctgcaagggttggccagaaaggttcgaggagacccaagagaacttggtgtcccagcacccaggaataagcgtcaagaaggcagcgtggcagctgcgtgagcgctgctgggggagtaaggaaggatgtagaccgagaagcgtccagtggatttagcaacaaggtgggcccagcgagagccatttcaggggcatggtgggggcggaagcagattgcagtgggttgcagaaggaatcagatctgacaaaatgcaagtagccaattggagacaactctttattaaaaaaaaaaaaattctgctgagaagggaacgcaaaaggtagggtggggtctaaaggaagggctttctttgggtgagagagaaatgggcaggtttatgagccctgtgggagaaacctagggctccggggtggtgagagaggttaggaaggagtgcagatggagaaaacggactattgctccaagggctggtgggaaagaaggttcagggcaaggaggaaagagagcaggtggggccgggccgttcagggtccaggggagcagctcttgctctcttgggcccaggttggctggtagggaggaggggctactactcctctccttccaagagagcctacttgaagaccaggagcctctctggctccagcctggagatcatgggttggcacagggacttcaggggccagccagctccttccatgaaaccctccttcctctggccagaattcagagtttggggctgcatggccaggaggccaacctcaaggagacctgatcccacagccccatttcttgggggactccaggctcactatgcctctcattttattggggagacaagtgaattgagcctggtcccagaggctgcccagggagttggacgtggatctacaagagccagaggggacaggtggctcatcttagatgctggccatttggggacgttctttgttcatttcactccatgacatgctcagtagggaagcagtgtgctcagggccactcatctttaagatcctcactggcacagagaagatgcctggcaccaaggacagggccaaggggcacgattgaaggaatgaatgaaatgacagccctaaattgcaaccgtttgaatggacctggcataagtgaagcacaggggagggaatgagtaattatactggggcggggaggtttgctaacagaggcctttccagacatgaatttgaaaagtggagaaggagagcattccagacaggggcaactgctaacactgaggcctggaggcaggaaagtctggcatgttctggggttgtggagaaatatagtatagctgggcttgaggggtctgaggtcattggccagagaggagatggaaccaaattctaaaaggctttgcaaagctaggtctaagataaagagctggatttgatcccgagagtctggaggccccggtggaggatgagttgacgggtagtgctaggtctgcagggactactctggacagtggtcaagtggcagatgtttccaagtctcaggcccagagccgacctgtctcctccaccaaccccagcacggtgaggacaccttcaaccgggccaagctgctcaacgtgggtttcctagaggcactcaaggaggactccacctacaactgcttcatcttcagtgacgtggacctggtccccatggatgaccgcaacctgtaccgctgtggtaccagccccgccactttgccattg

SEQ ID NO: 34974 - DNA, 540 bp, Bovine  19866881119745
  misc_feature (1)..(1): n is a, c, g, or t
nagtttccgcagaaattctttctctcgctgaatgttgtgtgtccaggactgaaagggaagacggagtggcagtcagttggacagcccaagtggctgcagggatggagccctgctagaatgctgcaggctcccagggttctgtgccctcttctgagaccaccaccctccgccactccagaagcgctgtggctcaccctcctcctttctcaggacctggagaaaataaccttctaactcgtttccctcattcaggaagactgtgcctcttaatttcttccaagccttagagatggaggctttccaaccacgttcccattccttcaacccctccttgcccggcggcttctccgggcccttaggccctcggcaccccaaggtcaagccatgtgagtcattaggtctggcccaagcctggggggtgggccctgctggaaagtgaaccacgtggggtggcttagtcattctctgacctgacgcaatccactttccaggcctaggggcagctgatgaaatcctgcctcttagattagaggagccgga

SEQ ID NO: 34975 - DNA, 1111 bp, Bovine  19866881126984
  misc_feature (1)..(1): n is a, c, g, or t
nggggtgaggggaggattagacctgggaggcccaagggagtgtatcaggcgtgtggagccacccatcaagcgtgtcatggtgagcacacacagtcctgggaccacaaaggcaaggggtgctgggaactcagggccctccgtcacttcccccacaatctcgctagctagccacacacccctccacaacagtcacacacacacacacacacacacacacacacacacacacacacagagctgcactttgccatggctagtttcacacaacacaaatgaccagtctaacaaaaatgaccagtctaactatggttacactcacacaatacaatcatatagccacgcaaaacgtctccatggtcaaacacccaacctcactgtgctcaaaaccaagtcacacgattttgatttcacagctgaagaatttcagtgagcgcacacccaagcatcgctgcattccaattatcagtacagcacataaaactttgactaggtcaccacatgaccgtgtgtgtatatggttcgcagggtgagagcataggttttggagactggccaacctgtgttcaggctcaggttctaccacttattagttctttccccttgggcaaattacttaccctgcctaagcctcagttctagatggggatagttcctacttggaaacatgatgtgaggaaggcataaagacagcactttgtctggacagatgtgccctaaggataggctgtaactgccatggatggattttgtcaccagagggcaccagggctccaagaagtcagtgcagggcactggaagaaactctgccaggaagcccaggattcctggggagtctggagtcaagtgcagactgggatggggtggggatggggctgcacagattctggaaaaccccgcaaggctcagaccagccgggagctgctcctgggccaggtagggccctgggaggatcctggccttccctaggaaggaggatgagcacttactatgtaccaggccctcttccgtgcctacttcaccctgtttaatccccacaacagcactgggattggtggccagtactgatagtcttctgttgaggaataccaaggaaagggaggttccggtttac

SEQ ID NO: 34976 - DNA, 3100 bp, Bovine  19866881129382
  misc_feature (1)..(1): n is a, c, g, or t
ngtgtggaagcgaaaaaaatgggaagatgaaagggacagataattggacctccttcctgaaggagcaaacaggccccaactcaactctctgatggtcataaacaagccccttgtctggtgggctctgcacccctaactctctctgtagaattcacaggacttggtaagacctgcatgcaggagtggaggcaaaatgaaaatttgagggtaacattcaggttccaagcttacacacccaggttgcctatggggagatgcaaacctagaaagggaagataggagggaggtaggaatagctctgtttgggacccggtgagctggaagcacccatgggacaacaactcaagatgtctagtaagtaactgaaaacttgaagttcaagagtgttaagatttggaaagttactggtagattttataaatggaactgaagccatgaggctactcagaaactagtaacaaaaagggggaagcaaggagatctttagaacaataacatttaagagaaggagcaaagaaagaaagaaactggaagggaacattacaggagtgggaagaaacctggtgaatgtgacatattgcagaacccaaggaaggaaaggagtgccaagcattgcagaaaggttgagcatgatgagaattcaaatgagagatacaatgaggttactgtgaccaatacagagagaaggagacagtggtaggagataggatctaagtaggctgaggtcagatcagacaggatcttgtctttaggaggtatgctaagtgcagtaggaagcaataggggttttaagcaagggagtgaagaaatgtgatatgcatttggaacatctcacttcattctatggaagatttgctggagggattaatagtggaggcagtcaggaaacttatcagtgactcaaactgggactaaaatggtaggggtacaggtggtaaaaagcattcaggttcagggtacattttgaaagactttctggcaagagttgctaatgacttgaatgtagagtaaaaggaagataggaatcgaggagtactgagatttggtgcttaatcaactgagtagatggtgacaccacttacagagtaggtaagactagaggaaacaaaaaaaggtgtagggaggaagccagactcaagagttttattttggccatcataagtataagatgtccattagacgtggaagtagagattcgaagtaggcagttggtgatccaaatctggagcccaggagggggagtcacagctagagacattaattttgaaatcatcaacacatccgcagcatcaaagccatgggactccatgaacattacagttatttcccctctcacttgacccgacaaatttggtgccccttgcttgggggctgggagaggcatccaacgtcatctccattgggcagaggaagctggtcccatggaacctgagagatggatgggaatcagggcaaatctggcctcagggacttcttcagagaagtgatgccagagaagctaagacctcacaggtgaggctgaaggtttcacatcctacaatcctcctacccctccctacagcactctgttaataacattaattcaggaggaagaaagaaggatactcagtctgtaaagccaatgaggggagccccaggtgaggtcggcggggctaaatgtgggaagttaccatggcctgcactggccccacgcgctgccagagtcaaagctcctgagagtcggcgcaaaagccaccacagttacaatagtcgcaggaggggacttgggcttcagagaagggattccaccaactcttccaccacaaatgtgaagatgagctagagttggagagctgagaccaacccatcccttgattctgagccaaccagataaacgcactgaagcccagagcttctcaaactttaatatgtactcacatcatctggggatttggggacagtgcagattctgctttagaaggtctggggcggggcccaagagtctgcattttaataaacttccagggtagtgcatttgctgatggtccatggaccacactctgagtagcaacaggatgaaaggtagctgtggaggctccccacggtggagggggctgtccagttccaaggagaacatgtttatttgtgcacaaagtgacagaacctattaaagtggaaacagccaccatcttgtcaccactgcaaggcagacagtcatttcttggtggatttcaccttccagaggcactggcatggttgttaaacacttaggttctaagcttgatgtcctgagttttgcctcttaggaggtgcgtcaccttaggcaaatgtgcaattcatctgcgtctccagcttccccatcactgtaatggaaataataagactattatgaggataggctgaatcaggggataaaaagtgcctaacacgtgtcagcagtgaacaacactcagtaagtgtcgctctccgtgctcacaatacgccttcgccagcagtgaacgcggaccaacacagaggcttactctgcttctggtacgtggtcaaaaaaaaaccaacgcaatcccccatctctctcttgatgaaaggcctgtatcctccctttcaaattcccccttccctcctgcccactcccacgccccctcccctggcccccagccccagtgtggtctggatgggccccacaagggcagggacagggacaggacgtggggctgtatctgacaggaacctgaggggctggcctgggaggggactggggcccagcttcctgaagggaggatgggctgaggcaggcacacagtgccggagaagatgccctcctgggccctcttggcggtcatctcctacctcctcccggtcccccaatacctggcacaagtcaccagccaaggtgaggtgtgtggagggtagcaaacacccatacccaggaagatggagccctgggcgggcggagtggggagggaagtgcaaagtgggaggcccccactggtcccctactcttgcccacaaacatgccggggaggaccaggagcccaactcaccagctgttcctcagatgtctcctcgctggcctcggactcagagtccctgaactgtttctctcgaacctttgaggacctca

SEQ ID NO: 34977 - DNA, 1192 bp, Bovine  19866881212167
  misc_feature (1)..(1): n is a, c, g, or t
nactgccggacggggcccgtcacccacagcagctcgggttcctcctgctgctgggctggtgtcacctggacccgatctcatcggagtaggggctgcaggcatagcgcttctgtgacccagtggaggaacagcagagcgggtgagccccgggataagactgcccatcctccaacccccactcctggagaaagggctctggaccgggtctcccggaactaagaggttgacctgggcctggtcagctcactgagcccctagggccaggtcggattggccttctgcatcccaggggttagtgccctgagacctcagtgcaggtctggggcctctggggtgtctgagacagtctgggggtgtctggtcaggcctggggtctcgggtagacctggtccacgggttccttcagggaggcgagcacaaagcactggtagctcaggtctggagacagcggccggttgtagaagccttgatagttcttcttgtcccccaaggtgaaggtctccgggagaacgtccacctgagcggccacgtatggcttcagccgctccgtctgccgccggcgccgcagccgctccccgccgccctgctcgatggcctccagcagctggcagcagagcacaggagtcacacaggggccttggagcacacgctcctgggctgaggctaggctcaccatccgtgttaggggcctgagcccggcctgattcactgtccatgtagaaccacgccggacaccagcaggcggtgccatttctcccagccaacctgctaagaaggggccctctgggtaacctgcccctcaccctcaccagagagggctggctgcccaccactgctggggttccactcgagcccgtctgtgacctctagacccctggagactgtgaggctcacagggcctgagagtcgttagatctgagagatgtctctgccacttcgcaccccaggggatcctccacaaacccctctggggaggtctctgtaagccctccaggagttctctgaaagctcccaggagccagctcagagtgcgtctcctcagagacgcgggcaggctgccaatcagagaataattccagtttggggggagtccccggggcacagccaaccagcgaaatgggactgccatcagggctgccctggccgggtccccaggcacctcgtccagctccagctcctcgggcgtgctcca

SEQ ID NO: 34978 - DNA, 1604 bp, Bovine  19866881216038
  misc_feature (1)..(1): n is a, c, g, or t
naggacttgcccagtgtccctcccaccatgaggttgaatgtgcaggaagaaactgggagaatcattgagatgcagcgcctggagatccagcgcctgagagaccagatccaagagcaagagcaggtccccggcttccaccccttggccgggatgcagctgccgtccctcagtggagaagatttaaaggcccagaccaagtgacaccctctggtgagacgtctccagcctctccagaaggtgttccatgtgcctgtcctggactgactctgggctgcaacccagaccacacgagcctctcccccaggccctggggaatctgggacacaggcagaataaaggtgttggcccacaagcacgtccaactctccgcttagccacggagccggggaggggggaagggaaagagggaccctgaggcccagggggcttctgctcacccaaagctgccgctgccaacccctgtccaggcaccttggctgcccacccctgcagagatcccatgcccctccccgcaccacgcctcaagggcagggctatctgttacttctgacctgctttttcctctgccagatgcatcagggtcagacaaaccttcctatgttttcttctcacttatgaaacttagcgaggttttctgaggattttcacatctgtgtgaaagagtagcattaggagcacggcgccgttggtagcgttccccaacgtcttccatcacctgcagaccccggtggtaggaccatacgcagagctctgcccttccttctcttaccccccatgcctctctgcacttgtcatcctcagtctgcagggccctgccccgctcctccatttctgggggatgccttttccccacaaccctacactggctggtccagccgcacgcaccaggaaaggtgggtttttgtgcactaagaacccatatgtcttctcccacctggagaagacaccctttctatacccaaataacaaatattaagcccccagtctctgctgccccactggttgtcttcaatctggcatctccaaggcatctccccatctttcccaatctgctttaccccaactctgggcactgctcttgagttagtttcctaagcaagagctgagacagaactgtgaagcttgccgaggctctcccgaaggttgagaacaacaaaaggagatgcagagcagaggccccaaagcaaagtctgcatggatctctctctctcctgagcgactccccacccccacccctagcccacaccgttttgcaggggccagcttattccctccagaccagggttcacccagcaatgtcccctgcccacagggagaccaggcccagaacattatcatgccgagtagatgggctcttctgggaactcagacttctccatcccaaactagctttaccctcttccaaagaaactgactcggaatgaggttggggaggtcagtagggccagatggtggggatcatgaaggcaccttacaggtcggggaccatccagaggccaccgctgagccactgagagtcactccccactgcttcccaagctttgccaaataggcctcctttcagtccctgccaaattctttcttgcctctgggtctttcttcca

SEQ ID NO: 34979 - DNA, 1428 bp, Bovine  19866881247633
  misc_feature (1)..(1): n is a, c, g, or t
nctgccatgagcatgctcacacactgaccaattatgtaacaagccctctactgggaatgcagcgagggttccacccagccttagggtgccccttctgcagggagtcaaagtgctaaagttttttgccaagtcccatggtaggtggtcttttattactttcctgttaagaacccctctcttaaaatagtggagtgcagtttgagtgtttcttcctggcagaacccttagaactgtcccttagacagttgaacggacatgagaaaggttcttgatgatggtagttgtcttctacatttattaaggttattatagctgctttttttgtcacctggaacagcagcagccagcagagatagcaggtagactaggacttaagcaggtctctcaaatggacctccctttcacccttcttcttactgttccctcagagtcaggactgtctccagctgggtcctcctgctgaaggggaagtagtccaggtgagatggacagatggccaagtctatggagccaagtttgtggcctcccaccccatccagatgtaccaggtaaccagaggctttgctggggatggggggaggctgctgtttggttagttaagtgtttcctcttgagccagaggcggggcaagtctttgctcttgggagaggagagcttaaggtattggtcacaacccttttcagagctggggctaccctgtgtccagtctgctgggtatggcttcagtgttctaaacccttcctgtgtctgcaggaaatggcaggaaatggccaatgtgcatggtggaccagggagtgacaggatagcttaaggcctttgtttccttggtaggtggagtttgaggatggctcacagcttgtggttaaaagagatgacgtgtacacgctggatgaagagcttcccaagagagtcaagtctagactggtgagtatgttttctgtgtgcccttggttcccctctgggaggaagggaacaaagcaaggacatgatcctttgtttttgcttcgggaggtgggggcattggccacaaagtgctcgtttatttggcttgcctattcttctatagtcagtagcctcagacatgcgcttcaatgagattttcacggagaaagaggttaagcaggagaagaaacggcaacgagttatcaactcaaggtaccgggaagattacatcgagcctgcactataccgggccatcatggagtaggggtgcttccggcagctgagagagtcccagtcatcaaggcgaaagcactctggggttccacagcacagcagacacttggaactctgaagtctctaaagtgaattgtaaaatgaaaaggaatgaactaaccgaccccatcatcttctcaccctgccctcattgcattccgctgtggtgcaaggatgagcccttctggacatgggcaagatgctagctcccag

SEQ ID NO: 34980 - DNA, 549 bp, Bovine  19866881269880
  misc_feature (1)..(1): n is a, c, g, or t
ngccaggggagctgctgggagaggggagggacttggctaggtctcccaggccttcttcactctccaaactttcaccaaactcttggcccccgcctccccgaaaccaaaacacaacaaggacagggcggacaagcagcaccgtggggcgggcagactcgcggaggcacagagcctcaagaggctgatgcaacctttccctttaagaaagtctcctgggcgcaccgcggtgcggaccctgcccgcctgggccagggcctgcatcaaaggaagggggctaagggaagggcgcgctgcggccgagcctctctctatccggccttcggtctgggtgtttggtggctccaaggggctgagcctcaggaaaagcgagagagcgatcgagtatgtgtgtgtgatcgtggatgcatgcgggcatctgtggatcagggtgggtacacgcgtggggatatctgtctagccagaaaggctgggtagttgcctgtgtctgggtgtcaccgctgtcaccaaggagctgcagcgggcggaatggcggcggcaaggtgggaggtg

SEQ ID NO: 34981 - DNA, 1072 bp, Bovine  19866881302084
  misc_feature (1)..(1): n is a, c, g, or t
ncctgcggcaaacagttgcagcagaaagcagaatccagacccagactgtgcccaagcacagcagcgacactgacagccaacacctactgatgtatcaatattgacttcccaagatcctctgctaagaacttttcctgtttgttctgtttaagaatctgcctgccagcgcaggagatgcaatagatgtggattcgatccctgggttgggaagatccccctagagcaggaaatggcaacccactcccagtattcttgcctggaagatcccatggacagaggagcctgctgggctacagtccatagggttgcaaagagtcagacctgactgagcacgcatgcacaagcacagtcttcccaacaatcctctgaaatagaacagttattgatacacttttagctctaaggaaatggaggcataaagaagttaagcaattggcctgaggtcacatggataggatgttttgaacctgagtactctgacctcagagcttacatgctcaactgccaccttctactgcctcttgctgctgctgtcttacggacagggtggctgggggccagatcacagaggtctaccagatgccctgtgggggctctagcggcattggtgtggaactgccctcttgcccagctctacagaggaaaacctcactcccttgagatgtttgttgccttgggaaggccagggtgtgtagtgtgtgtctataactgtgtgtgtctgtgattctcatactactaaggaatcatagctgtcatccaagctgaccaagttccccagagtgcaaaggatggcctgtgaaaccttgctgagatctctgaggcaggaaatggggaggaatgacagtcccagctgcctgtttggggaaccgtgcatgagaaggtgccggaggcccattgcactgccctgggggatttgaaaatttatagtcttctggccagggtgactgggtatcttgtatccccacattccaaagcccctccccctctgtccttcatggattctgggacttttatcacttcaacaccagggaggagggaaagagggaaaggcatccttgtaaagctctgtccc

SEQ ID NO: 34982 - DNA, 1860 bp, Bovine  19866881365961
  misc_feature (1)..(1): n is a, c, g, or t
ntcaggtgggcactgggcaggaaattccagaagtaacaactactgagctgatcctctagggatgaggaggcaggtgttctcccaagaagaagggccctgttctcagagaagccctttctgctgtaaacacaggaagctgtcctctgcagatcgaggcagcagcccagaggagggacaggggcagactcactgaggaatctgcaatctccttgagagtctggtctgacccaacagcaaagatgattttgccgtcaggggagatggtgacgcagttgtagctgcaggacttgagcacgcactcggtctctctctttcctgtggacagactccattcgtacacagcaccgtctgtgccacaggaaatcagcttgctgtcatcggtattccacgcaactgaacgaatctacgggggatgaagatgcgcccagttgggagtgcgcatgtacactcacacacacacacacacacacacacacacctttcaaggagaggaggagaaccccttatgtgattcactatgctgaggcagagtgtcctttcctggaacatacccttcagtaaacacaaatcatagctttgtaggaaagttagcattctatttcctcagacgtttgcaaaatactgaagattaaatattctcatttctgtctcactttatgaatgtaaagactgaatcataataattcctataatgctgcaatcaatcactgctatgttttacaaaagttttttattttgaaataattatacatacatatatatatatatatatatatatatatattcaaagggagttgcaaaaattgcatagagagagtacttccaaatggcagagtaagaacttcagctggcctatcccttacataataggtaacttaaaaatcataaaaacagttatttagggacttccctggtagtcctgagaatccacgctttcactgcagggggtgcaggtttgatcgttggttggggaactaagatcctgcacgcctcgtggtgtggccaaaaagtttataaaaacagttatttaaagtctctggcaattgtcttaagggcatagagaaaatgcagaaacattcactcaagaaaatctactcaatctcaggaggaacagagactgggggagataagcactgatctgctgctttaccctcctcatcctcaaacactttattccagtgtactctgggcagctgtagccaaaaggtggggctccctctctgccccagagcttagtcattggctatggtttcatcctgggaaacctgctggcatttcttatccccacccagaagctctattccaggcaagtgtggccaagagggcctcatctcccttcccctagccggtccccacctgctggggaagctctactccaagtgcagaagcctgagaatactggtaccccagttgcccctgccccagttaactcaatgggtgggggttctacaccatgaggggagagctgaagagacgagggatcccaccccctttccacgcacagagtagggaggtcactcttgggaaagaaagtcgatacccctcaccctccactcggtgcagtggagcagaacttcttcccagggggatgttggtcataagacaatgagctccacagctctgctggaggagactgacttatttggaacagagcatggagaatttcatcctatggacatcatctaaattggtggagatctaggtggagggcagttaagagaaggctggaaactccctgacagaagcaaaatggcagagcagtaacagaattagaacaggaagaagaagggaaggggacagttgagagagcccttccgggatgagaggcaactgtggggatcgggaaggctgatgtgtgtg

SEQ ID NO: 34983 - DNA, 1673 bp, Bovine  19866881382208
  misc_feature (1)..(1): n is a, c, g, or t
natgttgaagtccccagtagatgggagcttcctcaggaagtggctctgccaggcagggctacatgagaaagggttttgtgagcatgtgaaaatatcccttgttctccagacctttttttttttctttcatattttggagggaaagaggaattgcacctcacaccgtctctcgtcatggttgagtcatcctcaaagtatgcctggttcctgggctcagttagcatggcttttctccagtccatagagccagtagttccaataagggtcaagtggatggtgggaggtggcagccgccagcacttttgcctgcttctataaagctggagaggagagtgggcttgggtcaccagcttaagctgcctttcttggctctcctttgcaagcaagggcaggagttgagtcagcagaagtggaccaaaggactgctctgaataaagttatttaagttgatgaccactgtgtcagggttatctacagcaggtaaattgagagagctatgtggggattggagactacatgtcagagactttcaaggttgctgcaaggcaatatttgtaaaaattttacttatttatttggctgtcctgggtcttagttgcagcctgcaggatttttggttgcagcaggtgaactcttaattgcagcatatcggatctagttccccaaccagggagcaaacccaggccccttacaatgggagctcaaagtcttaaccactggaccaccaagtcccaaggcaattcttgtttgttctccaataaaaagttttcttaggttttttgtttttttattctcttatctgtaggtttgatctaaaagtcctgagaggtaataaaatggcctgctcattcctcccagctgccttttttctgttctcttctgtcacgtattagtacttaggtatttgttcagtgccaggcaggactctgccaggctgtggcagcaaaggactggaaaagcagtcacagatgtcacatccattctagttccatcacgaccagaaatgtgtccacacagctcactgatcatagtacacagagcatggagagtcctgccgtcagctctgaggcagtgtcaggggttttccccactacagcagggctgccttagcgatctgtcagcctgctcacctgttccttctcctctcttccgtttgcactggaaatacccgagctcactgtcacattggataggattcaaggtgtgtgtctccaaaacccctggagtagcttggtgaccactgtcctttattccacccaaagattccttcctgttgaaagtttcttaaaaactttcaaacctattgaaaccaaccccaagtgtctttgttgtctcagactaatagcaatgtcattcccaaagtactatttgaaatggattccttgccctcccagagttgaagtgccctcctgtcccaagaggagcatactcgggaccccacctccatctcatgcccttaagcaaaccgtccttacgtctgtattccctctgagaggacatgctctcgttcccagcgtcccaaccccgggtcctctggagtgcacaaacctagcagcgtcaccaactgtggggctcatacagcccaacaagtgtctcagtggagagcatctcccacccctaacactcatccctaacgggagggtatagagagaatactacagagtttcaagaag

SEQ ID NO: 34984 - DNA, 1055 bp, Bovine  19866881396480
  misc_feature (1)..(1): n is a, c, g, or t
ntttgcagacaggctggcaggctttgtacccactcttccattgacacatgtgcacacacagccaccatgctttcctctgtcacttttaataaagacataaaggagtgagcagcctccacaggctgtattcccaggcccctcacccaccctgacctttggccaagaagctcctacttcattgtggggtggagaagtggggagcctgggtccacagtgacagattattgctgacctctttcagtgtgaggaaaaaggccacaagaccctggtgggggccagccctgagtgctcctctcccaagtgtaaggcagggagggggaagtaagtgtccagccctttcagcccccggctctggagtggcagagggcaatgaggccacatccctggggctggccgggaaaagtcagggaggaacggaagcggtggtctctgtgtaccagctgtgggaagcagagagctgtctgctgctcagtcctgaccacatagccctggtcacaggtgtagctggggaggacaatgacagctgctgcctaaggtgcagtcctgaggcacttaggtgggcaccaagctaggccatgtttctcagttggccttgactttggtggtacctggaactccgttttgctgagatacacggggcagccgcttgcctttagtgtaagactgataccagaaattggagaagagcacgaagaagatggtgccgtacatccagatgaggtggatgatgactgggtactggtagttacaactgggcaggaagtagtattgggagatgtgcagcgagaccaggacaaactggatctgggaccaaaaggcatgggtcagaggacacagggagagaggactggagagcaaggggacagaacacagtggggagggctggggtcaaaggtgaggtaggctggataaaggtagggtccaaacccgaatgtcggggggacgactgtgggtcaggctcgggcccctcaccagctggatggctgtcatgtgctttttccaccaaaggtagggctgagccacaggcccaagggcagacaatccatagtacaggt

SEQ ID NO: 34985 - DNA, 1624 bp, Bovine  19866881396655
  misc_feature (1)..(1): n is a, c, g, or t
ncttctctcctccggcagtggctcacgctccggccacatccaccaccatgacgttcgggtagcggaacaccatgtggccacgctgagtggccacagccaggaagtgtgtgggttgcgctgggccccggatggaaggcatctagccagtggcggcaacgacaatctggtcaacgtgtggcctagtgctcctggagagggcggctgggttcctctgcagaccttcacccagcatcaaggggctgtcaaggtgagagtggggctgggccgggcctctgcactctcacctagaacctggggactgttaagaggacatgggatggtgaaagtggactgagttaatctgtgtgcccgataactccttgtcttgctctagtacctgctgacttcacctttatcccacctaggctgtagcttggtgtccctggcagtccaacgtcctggcaactggcgggggcacaagtgaccgacacattcgtatctggaacgtctgctctggggcctgtctgagtgccgtggatgcccattcccaggtagttttcattattccagcctcactcccagatgtgttatcctgtatagctttcctgggcaacctcctcccctccaatggcttcaccgacgcaatactggcatgatctccaagctcagatgtcacccttgaactccagacacacattttcaacagtccacagccagtctgtctctaaccccatgttctataacgtggcaccacactagtatgtcccaaattaaactcgtcgcttccccttgcctccctgaaatgtgtgttcctcctctgctatttgaaaaggatactaagaaatcagaacaagtaagactctttcatcttcctcacctagtcaccaagataagtcagttttccctcagagtatcattcacatgtgtcccctcccctcggcctcatccttcttcctgtggagactcacagcactggtcttttatcgcttccagtctgtcctctatattggtctgggtagtctatttttgtcctccgcaagccctgcaagggctcccaattacctacagtgtataatccaaatgttttagaatgatatctgaggccctagctcaaaggtgggtctccctacaagtgctgcagcttcctctcctgacacccccctgcccagtacatgcagactttgctttattcgagcctcaggctctggagccagagttcaacttaatttgtgtgtgagcttagacaacgtactgaacgtccttccaactgattcctcatctgtaaaatggttaacaattctaactctcaaaagggttttgtaaggactacagtcattcaagtctgagtctgtagcttctgggagtgcctaacaccgcggtggatgcggttgtgatttgagtagtcctggctctgtgtgtgtcatgcccgtgccatttcctgtacgcaggtgtgctccatcctctggtctccccactacaaggagcttatctcaggccacggctttgcccagaaccagctggttatttggaagtacccaaccatggccaaggtggctgagctgaaaggtaggtgctaagtgacaaaactcaaaagggcacacactgtatgactatttgtatgaaatgtccagtagaagcaatgcag

SEQ ID NO: 34986 - DNA, 861 bp, Bovine  19866881397173
  misc_feature (1)..(1): n is a, c, g, or t
ntggagagagtgacagagctggccccggcgtctgctgagctgaccgacagccgcaggccaggaggcttctggtccaagcagtgcccctccccgatgggcccgcagtgcgcaggaggacaagaagtgaagggggaggcgtgtgaagagagaaagaaggactcctacctttcttgtttactaggtcccgagagacaggcaaggacagaagaaaggaaccgtcactgtttccgccacacatgctcaggccctctcatgacacggggacactgcggaccgatctacggcacccacgtggccttcacagggaagggggtcacctctcctggcctacaccaggacccagacggcactggagggggcttggttgggtgtgggaagtcgctcctcaggtccccacccagggatcttccggccctgaaccaggcgagcttgtccctattcaccctgggaggaaggagctaacttcaggtagcaggcactgggtcaagggtcagggtccaaggccgggagagacggggcgctgggcacaggccccctcgggtgtgcacctgtgtgcagacacaaggaccaacaagtgtgcgctgacagccttgtgctgggtgctggaaacaggcccagcgatgttcccatgcgcagcaccatcagacagtgggggacggtgtgagcagggagtgggaggggcctggcagagcctcgtggcaccagagcccggaaaggcgtctccaaggaggggacaagagtgcagtggaggggcgcaggccaggccggccgggaactgcattagttcagcgatgacgtaggggtggcggcggcaggggccagagcagccaggcgtctgatgaccgtcaggctgcagacagg

SEQ ID NO: 34987 - DNA, 1070 bp, Bovine  19866881426218
  misc_feature (1)..(1): n is a, c, g, or t
naaagggctgttcagcaggttttgggaggcagggcgagacaccggccctgaaggggaggatgaaggagacttaccatagtcttctttacataaaccctcccttccccccgagaaaggccaaaatctgcaatcttggaggccaggttctctccgaccagcacgtttcgggcagccaagtccctgtggatgaactgcaggcatggttagaagtcagggacgatggaggatgatggagcctgggactccagggccagggagggggtccacctcatggctggcttcctgggccctctgggcctttagcagccctttactcttctgcccacctaccccaggcctcaacctgaggtaggttgagactcagagactcagagcgactcagagactcgtgcctgggaaaaaccacagtggggactgtcatcccttcctacttgtgatctgggccatggccaagttcaggctgtatccttctcctgggacaacggttgactttcccccagtgaccacactgcatcttctcctctttgaatgctccctgaccccgtctctccctgacctctccctgacccctgctccactgatgagagtggaaaggcccttctcttgcccaaagcgatctctcccttgagttccagatcctcctcactgggccctccaccttcctcagagaccttgctctatcatccctccctctgccctggccccctgccctctactttcaaagatactcaatacattaacaacttcaaaatgcctcccttagtctcacatcccttcctccaactgtcccctccctcctttcattcaagcggggtgtccttggacttgggctcaggcttcccgtctgttccacccttctcctggtgagtctcacccactccctggccaccagcacccctatttctgaagtgacagcttccagactgttgtccctggtccaggcctccctccttggttctaggctgacagttggaaaatgctaagccacatccccaaacacagacctgctttgggggtggtctcacccactcacccaggccagcaacttggggtcacatcctctctatcct

SEQ ID NO: 34988 - DNA, 906 bp, Bovine  19866881524328
  misc_feature (1)..(1): n is a, c, g, or t
ngccctgacacaggctgcaccacaagacaatgggcaccttcaggccagactctggcacaatgagtaggggcagggccaaggccacggccgtgagctgcccagtagctgagatggcagcaggaggtagtgccctacccccacagcatcctcactgaattccagggctccctcacatcttcaaaattcatgtacacagtaggtaatcaatgttcttaatttgtctcatctctgcctcataacagggtaaatcaaggacagtatagcccagtagaactcagagcattactcaaggtcacagagcacacagtgacagattccaggttaagacagccccatgcactgctataggtctgcttctgtttcagggcccaacttgaatttcctcaaaggatctatgcagatctcagcatatatctcaaattctaactgatgggcgctcccatgagcctgtctaattcatcttttttcccttctccagcccaccagcaaaaagctttcccaggattaaaaacaaatctcaggaaacattttttttccaaaggagagagagccaggcaaaaagcagcagctgtggatagggtgggaaaatggtgacttgagtgcaagctcagccaaggagagagccaacgtcaggacacctggggaatggctggatgacccaaaatttaaagccactgaaggtgactttctcaagccaaagttaggaaatggactagacagagcaaagcccaaacactgactccaggctgggatgcagtccacccatagggggaagctcttgcattgatttcctaccacccagacacctatgcctgagacctgtgagcaaacagaatgtacctgaggcctcaaggtttctagggtctgggggagggagacagagaggatgcctttagaccaccacag

SEQ ID NO: 34989 - DNA, 1398 bp, Bovine  19866881596415
  misc_feature (1)..(1): n is a, c, g, or t
ntgctgtgtttcaggagcaggaggggggctcactcaggcccacagctccatctcaaccgggccaggagcaggcctggggccgccatgcgctccccaatctcatcagacacctctcacacccagaagcatgaacacacccctgtcccctgctacagaaaccctcctccaagaaggcccctccagaactagcatgtagggactttgtggggacttttcctccaacactaataaggagtctctcttccctttaatgcgagggcctgagagatgccctctggggtgggagccacagtctggcccttcggccacctcccaaatgccagggcagggcagatggctcctgctggggcagcgagcaacagaagggacggcagtgctgaaatacttatcctgaggtcatgagtggggaaactgaggtcaggggtggcagggaggagctcgagagcacccaaccgtcagggatcctggtgcagggcctgtcctctgggcccccgcccctcaggggagtggacggtgggggctgcgtcacccagaggccaggcagcacagacaccaggcgcaggcagctcacgtgtgtggaccttagggtgtgtggctttcagccctacagcagcgaccattcaggccggaatccagcaaagtgcttaactgcatcccatttaatcctcccaaccagcttgggtggcaggcatcacatcccccgatttacagatggagtaaaatgaggctcagaggcacagctactcacccaaggtcacaaggaaaagagaataagcagtccagagcccctgatcctagccgctgcccctctaagctggagggccctgccctgcctcgcaggagacacacaggcacaaaggagttaccaaatggatatgaacgtgaacacataaagccacagtgtaaaaacggctaacacaaaaagatgttcaactgttcttgtaatcaaaaaaatgcaaattaaattgagatgccattttttgcctattaacttggcaaagatttttttaatggtaattcccactgctggtgaggatgtgcagaaaagaggccctctcatgccctgtttgatgggtgtgtaaactgacacagtcttctggaaatactgaaaaggctaagcatcgcatgtggccctttgaccaagcaattccacttccgtgcatctaggagataatcaggaaagtgaacacatctgtaaggaagcacacagtcccttatttatacaaccaaaatacaggaaacaacatgtgtgtccaacaataagggaatggctgaataaattagggtgcttgcatgtgacactcccccacagccattaaaaacaatgaagcagaaaaatacttaatcggcaggaagatgttcatatgtttttttaaaaagcagtctacaaatcattgg

SEQ ID NO: 34990 - DNA, 1101 bp, Bovine  19866881685055
  misc_feature (1)..(1): n is a, c, g, or t
naattggagagggttaggcggacaatgagatccgacaagagctcgagagttactgggcagggatagggacccatagaaggagagcaaatcatccaagtcgtgggacagatctgccgtggggcccaccttcttacgccccacctctgcccgaagctccaggctcagatccaccgtcgtctcccctagaattctcttcacttcgggccgctccgggagcggaacgtgctcttccaccagttcccacagcgacggggagtccccaggcatggcccgcccgcgccgccgccccccagactcggggccgcacgcttggacctgcgggacccccagtccgagcgctgggttactgggataccgctagtcgcccagggccgggcacgcccactcacgcctcgcccgcttccgggtctcacaggccacgcccccagcctgtcactcggaccggcctctcccaagccccattctattctgcctcccgtccccacgactagagttgctcggtccagagccgctggcctctggcgctcttctgccctactactgatcgactctcggaggccacggtttcaggtcgcggccccgggagccaggcggcgggactggggccctagctccgcctcttccgcatggccgtcacccgggaaacggggccagctagccccaagccccgcccccagagagtcccgggcccgcccattccaggcggtgccggctaacaaagcccaacccacagccgtggtaggtggtttccaagtctcaaccatgcacatcaatctgaccccaagcacctttcatccccgggcacctttagacgccagggcaggtgaaagaaccgagaaatttgagcccggtgggtttattacttccttgccttttccggccaggaggcagcggcagggtaaaatttgtccttccagcccgcgtaagtctagtgaacccctgcgcttctagggatttggggaaccaggacagtccggaccagacagattgggccaggcgcccttccccaaacacaccaggatccgagattagggatccagatccccatccccaaacagacaaagggcttatccattcacgttttttactaaagcacccaca

SEQ ID NO: 34991 - DNA, 1611 bp, Bovine  19866881827914
  misc_feature (1)..(1): n is a, c, g, or t
ntatggtcactacaagcgagtcaggcacttcttttgggcggtactttacacacctgtacagtgaagcgctgggtccagatcagtggtttccaaacccgacctcccagcacagtctgatggggggtaattttgtttgaccagggaacatctggcaatgtctggaggcatttttggttgtcacaccttggtggggagtgtgcagttggcagcttgtgggtggagagcagggaggcttctaaacatcctgcagtgcgtaggacaggccatgctcccccctgacaaaggatgatcctgtccaaactgtcatagtgctgggatgcagaaaccctgccttagagttaaagcatctcttgttatccttaaaggttgttttggtttgttttttggggagattgttttctctgttggtattttcatgcctagcaacagtggtttaggtatttaatctgcccagatataatcagggagagaattggatgttgacataaacatgatttgtgcagttttgtagcaggttgtgtcataggtaagaatgcagactgcttgggtgtgaatctcaggtccacgcttgctgtgtgacttcggcaaattatagcgtctctctgtgcttcgttttggggtcataagaatttctgcttcactgggttgttgggatgagaaattgagaatatacttagggccttgacgtggttgtggcacacagtcagtgttcaaggatggtcacagcctggtcactgagagacacttagacatttggagtgctggtttggagtaggtgtaacagtcctgtgtccacatccaggtgcaaacagaggttcttcagaagcggcagaaggagaagtcacacatgatgagcgccattaagaaatatcagaaaggtgagtgtgttctctcataaggctgcggggagcaggggcacctgctgctcccatcaaacacacctgaaggcttgattgatttggaactgttggacctcccatttgggaacggcacggggagcgagatgtgcctctcaataccaactccataagtaacacctcacatttgggaatggcacggggagcgaagatgtgcctctcaataccaactccataagtaacacctcccatttgggaacggcacggggagcgagatgtgcctctcaataccagctccataagtaacacctcccatttgggaacggcacggggagcgagatgtgcctcttaataccagctccataagtaacatccttcttttgaagttgaatctttcttttaaagcaccgtggtgctgatcgaagtgcttcactcccaggtttctctgataaactggacttcctcgagggagatcagaagcctgctgcacggagcacaaaagaaggagccaaaggccagcaaatgaggaaggggtgagtgctgcgttcgttttggtggtggtgcatgcagggccgcagttcctggtgtggcctcggtgcatgcagtgcggctgtgctgcggccagaactgtgggccacgtgatgggcctgttcaaccacatcggtctttgaaggttcaagtgaggtgatttcagtgaatacgcagtagaagttgattcctcgcgtgtgagggttgtgtgcagacctagggttct

SEQ ID NO: 34992 - DNA, 850 bp, Bovine  19866881901039
  misc_feature (1)..(1): n is a, c, g, or t
natactggaagagaattgcgttctccacttgtcagacgtaaggtgctctgtttttcagctagttcaaatttatttattcattgttctgttcaggtcatctgctttctcactgactgtgagcctggtttttcagtggtctgtgagtttcccattatgatgacaggagacccattgtgtcgttctccttgtaattcttttaattttgctgatagagacattattaggtacatacacactttagtgcatggcctccttttgtctatgtccaatttctgaaccttctaggagtttatatgagttcagaacaccaacttactgctttgaaatggcaatggaagagttaatggttaatttcaagacttgaagcatttgaacaggcactttatgcattcacaagtctgacttggtacaggggcaggaagagaagaacagagacttgcatcgttcatgccactacacacctggagccaggcaagggacacacgtgcactccttggttaggggtttttataatgctgggctctccagcctggctgaggcaggcagcctaaaccaccagactaaacatttctccttcactgtgcagctgtggtattgctgctctgacacctgcgagagaggaccttcagctgtgtatgcacatcagcatgtgttgtgtctggtgacttgagagtcccaggatcttccattcttattacagatttggcatcagttgactgccagtgagaactgggctttattgccagcttccccagaggtgaattttccctgaagagttggtgcactcaaaatagcatttctattgtataagctgaattcacatgctacttcaggaacacgtttgtataca

SEQ ID NO: 34993 - DNA, 1110 bp, Bovine  19866881988590
  misc_feature (1)..(1): n is a, c, g, or t
ncagtcccccaggcttgggcctccaaggggcacagccagcagggcggaactgttgagcgcaaggctcagtagtgtgctgctcgtgaatgcgaccactgactcctgagggctcattcagcctgtgactcgctgctggccaccctcccagggccctccacgccaggggaggagcagagacctcagaggcccaagtctggtcctgctgcacttggtcaggccttgaacatcaaaccttaggaccttggtctctgcaagatgccttgccctggctccacccgtgaggccactctggaccctcagttgtctctcttacagctgtaactgctgcttcgtgaccccacccatgtactctgcagctgccacaatcctccattgtgcccctaagtaaacaagcctctgacagaataaaactgttattgtaggatcaacatataggaggcctatttggctgggctttgtttgggaatggataaactaccccaggcagggctcacgccctctgaaaaaatgccccccgaagccccaagctattgctaggcctgtccccaaaaaaggccctaggagatggagacaggcttagccaggattctgtagggacctgtagatctgggagctgcccccccgccctgacccaaggtggccttcaagcctcttcgtcagggcagccttctgtgacctcaccctgctcccacccccaccctagtcatcctttcacgctctcgtgatttgagaaattcccctttgtggtcacgttgaagttgcatgtaaaaattatgtgtttatctcatcaatggcttacttccccctggacttctagctctgagtgagtcggggtgtgttttgttcacttctgaattccctgagcctgaggtagggcttggcacatagtaggtgcttgtaaacttccgaggctgcaaatgaatgcacacaggctgtcctctgggcagtgctgggtgggaggtgacacctttgtgcagaacaagggtgtctgtgcagtagtgctcatgtgctgtgcaagcctggagcagccccccagatgcgcccactgagagcaaagggtgcgtggctacgagggccaccatcaggtgctggggcctctgggcctgcctt

SEQ ID NO: 34994 - DNA, 1051 bp, Bovine  19866882018124
  misc_feature (1)..(1): n is a, c, g, or t
ngttggctgcgtagctggagccagtaggagttaccaggctggagtcctgagatgaggcagctgccacccttcgttgtcagagatggagccttgggagaagaatcccagcctcacaatctaggtctgcctctcagccaagatagcctccatctcttatatttgaagccccacaacatgcctgtggagagacactcagttcttcactggatatgatacgtgcacagactgggggccaggtctgtgggtttcaggtggagttcagggttttttaggtttccctagtggctcagacagtaaagaatctgcctgcaaggtgggagactcaagtttgatccctgggtcagggaagatccgctggagaaggaaatggcagcccattccagtattcttgcctggagaattccacagacagtggagcctggtcggctatagcccacagggttgcaaagagtcagatacgactgagtgactgatactttcactttcagggctttttagggaaacccccactaacttggggacctgaagcgctcagttgtgttggtctgaatgacctaaagtgggagattcctaaataaacatggcttctgagaactaatcggagcctatgctagctctccaagggccaacccagtctggaatgcccaaagcatggcctgtcctttcttggggcaaaattgagggtaagagataggaggtggagcagaagaaggccagggtacctctctagttggggaggtctgctccggtccagtctgttgaggcatcatgggctgtgaacatggagacgggtccagggctgccgctaggtttggcctccgctgagctgggcagcaggtttctgcagacagcagctgtgtgactgtggcgccacttggagttcctggggtccttggggccatagcggagttcatgcctcagaaattcatttgatttcgggagctggggcctcccagctatcctgaagttcccctggctggctcccacccatggccttgatgaactggggggggagtttggcaggcctaagggagaagacagagcacatcag

SEQ ID NO: 34995 - DNA, 800 bp, Bovine  19866880602605
  misc_feature (1)..(1): n is a, c, g, or t
nttttctgaacagataagaaacgtgaaccttggtaatggcttgtcccttttctacccatttcctgggtctacaagccggaggtgaatgctcctggacagaaggcaggacactgaccttaggaagcgtcctgggatggagcagcagggtcctggctttcaggctctggaggcggtgctggcacggcttcttttttctgggctgccaggaactcatgaattgctcgttctatctgtggtctgaagatgtggttcagtttgggatccaccacctgggaaataattctgtccactccagcttccaacatccctgaccttgagaagacaaacagattattgcattatttagcctgcaagtgtcatgggagagagcaagaagtatccacctggtccaagatacagccccatgagagagtgctttcaaaggacggtgcacacagggttcaagccatgatgtctttagagggcaagtcattattcctaattcacaatctcagtcactcccaatgcaaccttgtacaaaagaaccaaacaaaactctaccaacgacaaacagtaacagtatggttgaaagaatcgacgccatgggtagatttgaaaacctcaatctagcaaagccagcatgcctcccacttgactccacttccctcagtatctattcttctacacgtcaaagcaaaagtgggccccagcagcaacctggctgctgctgctgctaagtcgcttcagtcatctccgactctgtgtgaccgcatagacggcagcccatcaagctcccccgtccctgggattctccaggcaag

SEQ ID NO: 34996 - DNA, 2811 bp, Bovine  19866880668563
  misc_feature (1)..(1): n is a, c, g, or t
ncatgccatgaaaagagaaaagtgttgtctgttgctaatagctttaattaatccacatgtgaaacttgggagtctaatatgaaacaaaatctgaaaatttttctacaatttaaaaccaaatacaaggattttttaaattgtaaattgcttcacttaaaatttcagtgtgttcctgtttagggaagaaaggtagggatggagaccggcaaggaggaggtgaaaattaactttgatatttcaatttcttcctaaaaattggctttgttacttaatgtttatatacacaaccaaggagctaaatccagtgaattccagcttaactgctttaactgcaagcccagatcatatgacctgtcacaagaatatctttaaaaaagcatagacttgagatgctggaacaagaacatgaccttaactgttaaaaacttgggagggagggaatagtgtttctaaatcacttaactcagagtagcagctgattttctgtgatggaacacttggattacttttgtagctgtaaaaccttatagtcagtgaactaatagttatcactcataccatttttatcataaaacacattttaaaaagatgttataaatcaacacaggaacaaaaaatatttaatgatattaactgaagttaagtttctactatttcgaagaagatactgttaatttttttaaaaggtaacattaatgaaaccaagggctgttctatatgaactataatgcctcttattcgatactaaaaaaggataaataacaatgagaatccaaagataaattcccaaactagctggcccaatttaactagtcaagttccaccttatcagaaactgacttttggggtaccttttaaggagaaagagataagaacagttcaacaaaacaggcacaaaaataccccctcactcagttctctcagtctgcctcgacacacacgtcctgagatgccaccctgcactcacaaagtaggtatcctttgagactttttctgttcctcagacttctaaatactgtaattctatcctttagctaagacaatagggcactgacaaaatttgcagtttaactctgaaagtgatacttgtttttattttttgacctgttcttatgataagtcctgttggtctgaaatccgttatgccctctgtatggtaaatacacctgttaaatattttgttaaacaaatagcaatgctttctatttcaattttaaaatattagcagtgacatgagaaaacttttggaaaaaactttcataatgcttccccatcctacctgccctatcctataaattctttctataattaaaatatttagagtcatccattcatgacatctaatatgaagaacacagactccttcctttctgcaagtcctctgaaagctcccgttataagttccatgttactctaaagtcttctacaagcctttcacattctccttgtgccccttttatttctgctctacagatgccaattttcaccaggagttttgcattttctagtccatggctagattactgacaaccccctccgtcccttcaagacctctttgtttccaatggagaatattttcaaatcttttttgtttgtttacttgtctttttttcaattattttccctagggcacctttcccaaaaaagaacccccctttttagattaactcaccaaattttatttctatctatactgcaatagacaaccatcttaggtaatcatctcagctacttgctaactgtcttatctcttaagtaacagcccccctctttaagatctaaagcttcattgctgttgttgctgccattgaacctaggtatcttgagtttcctgtttgggcaccaaataagtattcaatgagtttactccactgaacttaaaacaccatcatttcacaaatgaatacactgaagtaaaataaaaatcactgagatacctaaatatgaatataacccagtgtttttgagttttgttttttgctttttgataactcatttacctataaacataacccaggctttggtacatttagaattgaattcctcaagggagaagaagagcattaggacttctggcaagtgaatctatttcgtggataaaattcagtctttgagggtcttagtattgattatgttataaacacaaagaaatactgccagatcagcagtcctaaccttaagggacgctatgacaggaaaagtagttgtccctggaggccagctgtggcatttggagccagaagcctggcatgcatcttgcagaaggcatagactatatttggtgacatgactcaacctagccaaatataggcaactgatacagtgtgactctggggaactacactaccaaattctacagcctagaaaagattcagattccaagcaggcatttgcgagttggaaagaaccaatatttaccaaccagaatgactaagaattactggggggaggaggtgctcaaaagaacagtatgcactatcataactctcatattaagacactagctaaagtaaccgagttaataagatcaaaggagggaaaaaactagaaggaaatactctaataaattagtatctcttactttcagaattaggtaaaataagttattttctaaaaactaacccagatagtattgctactgatgactcagcaggaaatgatataataaatgctgccatttcaaacacacaagcaataaaaaatatcaaatgttctctagtgctattagatttcatgctatggccttctctttcctcagtcatgcagtattggtgggggcatggtagggcaaggaatgataacaggggacag

SEQ ID NO: 34997 - DNA, 967 bp, Bovine  19866880668949
  misc_feature (1)..(1): n is a, c, g, or t
ntctttactctgaaaagtttgtttctgtgctgaagactcttggacatcaggcttgggcttctaatttggaaatgtggaaaagtcatatgatttcaaatattttccatgaagtgctgtaaatttttaggcccaggtaattgtgctgtctcagggtgatgaaatggaaaaacccgctggtgtgaaagactttgttttgccacaagccacagctgtatgattttggagaaatccttcatttccctgggtcttcatttcacgatgatactaatgatggtgatggtggtggaggagaactcttaccacacagtgagagaggcatgtgccaggctcttgacctctaatatcttacaggaaaacccaaatgtactttttggccaacccaatattatttaatactcacagcaaccatatggtggtggtaatattagccccgttttacagatgagcaaactaaggtcctaagacaatagcccagcttgctgaagaccatacaaatatcaaagtaaatgtcaaagtcaagttcaaacccagggctatttagctaaaaaaatcagtgatcctcaccactccctccctatgtttttccttctgggaaaatgaagagatttggtgagatgacctcaaaggatgctttaaactctaaaatccactgtggagacgtgcccatcctcatccaaaggttgttgatgttattgaatataaggtgggatctttgttccaaacaggttattctagcccacctggcagagcagggcaggacagagtacgtggagggtggaaagttggtgtcatgagcatctatatttattctgcctcagagtagcaagcgtgggaggggtgggtcttgtccatgctttctgatgccaggtgggattaaattcatcatttgatttgggaggttttgtcattggctggtctcagccacaccttctgagctagttgctttttatagacaagggagctgggg

SEQ ID NO: 34998 - DNA, 1520 bp, Bovine  19866880704987
  misc_feature (1)..(1): n is a, c, g, or t
ncctggactcccaccgcctgcctcctgaccctcagctctagcctctctgcacctcctgcagttcttcgaatctgcttagcaagctcctgccccagggcccttgtacttgcactcccagaacccagaaccctcttcctgccgatatcactatagtgtgtgccctccactttttcatatcacaactcataggtcgtcttaccagtgaggcctttctgcctcccttacgaagagaaatgtccctccagcaactgcccttccccctcaatgcccttcaccttgttatatttttcaccatagcatctattaccacctggcatgctatatttctcacttattaatcctgattatcatcaatactcttccccccatgaaatgtcagctccatgagagccaggatgcttcatgacctactgtcctcccagagcccttctcaaggacctggtgggtcctcagtacatatgtgccctgtgagtaaatgaatgaactcagtgtgcccacctgcagaggtggtgacttgcagggttctcaagctgcaaaagtctaaaatggctgagattcactgtgatgtatctttcttaggagaaagagcatcactgtcttaatcacttcaagctaaccgttccttgagagtttactggataacccgtggcccagaccaacctgaagaatgagacagactgggttcccctccccttgcctccactgtttctgcagtaacctcttccagactctgtgtaaaagcagcccctctaacaggcacctttactaaaagggatgctgtgtgcctgcggtactagggtggacttctgggtcctctggggtgaggacagaagaaatgcaaatactcctccctgggggcctgagtttgctggtgacatgtagcagaatacacagcaaattctttacaggcagagcgcaagcctccctcccgaccctctccactcaagctgggacttctccttcctgtgctctgtggcaagcctgccctggtcacggcatctggcaacttgtccccgagtccctggctttctctgcacgttgccatggaaatgggttcctggctctccagaaagacatattccagtgacattcactggcacttccgagggccccaaaatgggcacacacacatgcacggtgacctggtgcagtggctctagctgcccggcgaccccaccaacatgagaaggagagagtcacatggcagggacttaagactcacgtgggcggctcgtgtggctcatgttcaaagaagaggggaaatcagctggcttcacaaatgcgataatctttgcgggaatctctcgctctctcccccttgcattcagtctagaggcaaaaccagaaggggagcgttttgctctaaggtaaataaaattgtggttctaggccccctcagtgaggcaggcgggaatgccaatgcctcactctactggagagtgactgtgactgctgttccctggcagggtgcccacctgtaagaagggttagtccgcctctgagactggtgagggcccaca

SEQ ID NO: 34999 - DNA, 2084 bp, Bovine  19866880731546
  misc_feature (1)..(1): n is a, c, g, or t
ngaaaactctgcagtatagtaaaatgagattttttgcagaaaaatattattttgtggggtagttttcataacatcagagatagaatggcccttaaagaacacctaatctgtcattctcatctctggctacacatgaacatcacctgagatattaaaaaaaatcataagcttcaccccacacctggaatggggcccaggcatctgtgtttttcaagttccccattattaagtcccttattataagagtggttctaagtactttattaaaaatgaagaaattgaggcctagtcaaactgcaatatcttattcagtacaagaatttataccagaatccaagtgggaatagcatgacttttttaacataatatataaaaaggatttcaagaactacaaagcttcgttttaactttgaaactgttggcaattaaaaaaaaaaatgtgaaactaggccgaaagctctatcaacatttgaactcttcctagtgtatggttattgtcattggtgagcagacatacaggtgagcaatactaagcaggttttgcctgaaagattaaaaaaaaatgagaagtatggttcccatctttccagttaactgccctcccttagcaatcagtactcttgtagttcccttaattggtactgtaaagggcttacagtggatgtctatcaagtaagtttgatttttgaacaaaatgagatacatgtataaaatagatggaactggatacaaaatgtgaacctataatattcgccatattgctcatcaagttactcagataataatacacattttacactatttactaaaatcaaacagttatatttggaaaattacctttaattgaatcattttcagctctcattatgtcaatgagtgaactctccaatgagtgcatgtcaaaagtcctggggcgatcctgtaaacacaaacagccacaaaccacttttaaaatagcatataattataaaagaaaataataagctgcatctgatgagacacagatcaaaaagcaggaattttcttccctctccatgtaaggcacattattactacattttatttttaacacttgcaaaatatcaaaatcacaagtacccagggctcagcaaagactgacttgatttccaataataattttcaataaaagcattactttcaaaaacaaagcaaaaactaatttccatatggttaagaatattaaacatatataaaaacagaattcataatctttttctgtcacttaagatttcagtaatgtggcaaagcttcccaaacttgtttcagcagtattctgttaaggtgacatctacatgttctattcagaatagctatatttacttataagccaagatctgaaaatagtcatcaaatgtctacaagaccactaagtagcaaagtagtcttgatttttctgccattagaataaaaggaagacaggatatggagaacactgctggtctcaaccctggcttaacaaaatggacttcatgaatgggtgaggaatctgaaaatacacaaccatgctgatgctgcggcattcttcagggtattagacatcattaaaaccaaagtttagctcgacagtgaaaaggaaatgaaaacattttcaaattaaatactaaagggaaagcagtgtaatacctgtttctgacccaccttgagaataaatatatacttacaaagaccacagcaaggttattaaagaaaagggggaggtgaagagcgagcgagaaccgagttctgtgtagttgtttccaaggggcagcaagggggaagggttaaccatgttgtctttggtcagaaagataatcagcaccacgaaagcccccgcggccactggtccctacagtcaggctgtgttagtcgacaggaccatttacatttcagcacagctaggcatggaccctgcaagtggacagcttgtgccaggaggggtggcagaagaggctaaacaggctcttacaaacataggtgaaattctgaaagcagcaggctatgacttcacgaatgtggtaaaagcaactgttttgctggctgacataaatgacttcagtactgtcaacgatgtctacaaactatat

SEQ ID NO: 35000 - DNA, 1856 bp, Bovine  19866880780954
  misc_feature (1)..(1): n is a, c, g, or t
nacccaaagtctgacagtatcaacattaagttcaatttggtattatcttgaaacctcttttagagtaaaatcaaatttgaattaaaagtatatattaagtagaaattttaaaaacacatttgggaaaatgttagtttagcaacaaacagttgtacactgaaggcaaacacttatgaaaaaaatataaggataaactacacatgtatttgaatccttagaaattacctttaggaggaaaataggatttgctctctgctttatgaggccaatccacaatcaaagggccaaagcgacgaaaactggctgtgatctcatctaatgaacaacaaaccaaaaaagtagatgtaaatattcttatgaccattttgggaaacagtttagaaaaaacagtctcaaatctactatttacaagaacagtacaccaagaacccctgcatctcttcatctggatccccccactgttaacatctgtgcatttgtcttccccctcttcccttttctccttctactgatgcacgagtctaccaactggtctaccatctttttctgatgtgatgctctagtaccacaaaatacaactactggtacctgctcaaagcaaggtcactcccttatgtaccaacatacaactcccctccaataaggaaatcaacagtgatacaacattctcccaattcacagactccatccaaatttttaactgtcacagtaatacttctcttttcctttctgatccagaatcctatctagaaccatgctacatttagatgtcatgttctgagggtatctatttttttcagtttacaatagttcttcattctttcctgtcttttctataactgatagcttcaaaatatacaggtcattccttctgtaggatggctctcaacctaggtctgtacttgtttcctcatgacctatgtattccaaccaggaatactatcataatgatgctatgtcatcctgtcctttcacaagatgtgttaatcttgatctgctagtcgagttgataagtgtctgtatttttccaccaaaaggaaaccatttccctttggatatgatcaatattttgtgggggaatactgtgttaaccatcaatatcctgtttcctcattaggcctggcatttactgaagattcctgcctatatcaactaccacaatgataactgccaaatgctggttatctatttctatcaacccttctacatttactagttagtataattcagtaaggaagagtgttcccctctcctccatttatttagtcatgcatttatttatatcagtgtggacctattttattcaatggactataacctgattctggagaaggaagtggcaccccactccagtactcttgcctggaaaatcccatgggcagaggagcctggtaggctacagtctatggcgtcgcgaagagtcagacacgactgagcgacttcccgttcccttctcactttcatgcactggagaaggaaatggcaacccactccagtgttcttgcctggaggatcccagggacaggggagcctggtgggctgccgtctatggggttgcacagagttggacacgactgacgcgactcagaagcagcagcagcagaacttgattctctttcatttattcagtttgtcctcaaaactgcccctgattcagccagtgggaggggttcctgtgtcctttgacttaccccctccccccatcattcttcaagtgcttccatactatctgacccaagaagataccccaggctttcatcttgttctttctctgccctagccccagaatcagcctttttccccctccaagatatcctggttcctttcagtgacaaaagatacttagaaactccgat

SEQ ID NO: 35001 - DNA, 1168 bp, Bovine  19866880845969
  misc_feature (1)..(1): n is a, c, g, or t
nctgcttactatccattgtatgtatgtactatattttgcttatctgttcatatgttgatggattgtttccacttttccactgttgtgactaatgctgctttgaccactggtgtgcaaccaatggtccctgctttcacttcttttggatgtatgcccagatgtagaattgccaggtagagggtaccaatatatattttttttaattggaagctaattactttacaatattgtagtggtttttgagggtaccaatattaaatgtacaccttgatgatggtttagatatgtttacacttgaagagccactacccagatcaaaatataaaatatttgcattactgcagaagttcccctcatgccttcttacaggcaaacctgcccctcccctgaccatgattgttccatgttctcagcctcagggtccctcaatggttggacttagagactcatcagggctaactaggtgaatggattaaagaatcacacacacatacacacggatacacacacatgcacacacgctcataactggtctctctgtaatcttataggttaaaaaaaaaacaaacacactttcaatccatcttttcatttgggcttttttggtttcttgtcctctgagatgttttgagaggacacggtgatgctcagcatctcttgagctttttgaggtgggaggataggcttggagggccaaaaagtcatctctctgggatggattgtgtatttctgggtctgaaactgtaaagtcggtaagaagtgagccactgagatgaagaagccccacccggtaggaggcaagacgtcacagggccctctcctatagcacgtggtctgtctgcagtggctgaggtggggggcatctttggctaatctggtgacccatgaagatccctcgaaggagagggtgggttgtggagaatacaaagggcagaggggcaccaggaaagctttgggagctgaggtggctctgagactgtgaccctccctctctctctctttaaaaatatttatttatttggtcttagttggctttatttgtagcacatgggatctggttccctgactggggctggaacctgagcccctgcactgggatcgaggagtcctagctgctgcgcccccggggaagtccctccctgtctctcctgaggtcgccgcacccaca

SEQ ID NO: 35002 - DNA, 1786 bp, Bovine  19866880872440
  misc_feature (1)..(1): n is a, c, g, or t
nctctcctctgtcagcattctacttactcatctggagcccccattacatgatgtgttctttgaaagaaggacagtgccctccttaccttggcgttctcagagcctggagcctggcacatcgaaggcccatgtgaagtttgtgagcaatttaacaacaacagtcactgtttgttgaatgctcactgggtatccccattttatgaatgagggcttggagctcagaggtgttaagcgtcttgctgaaggacacacagcaaatgagagaactgaaagctgaatcacagcagcctctggagcccacattcctctggcatgtggcagccattctggctgtccctctctccatacacgcaccacagaacacggcgaggcggaggggctggtgcaaggttcccctgctcttcctgctcctccccatcgttttgctgtttgctaacccagtctctcagagaaggcaatggcaacccactccagtactcttgcctggaaaatcccatggatggaggggcctggtaggctgcagtccatggggttgctaggagtcggatacgacttcacttcctcactttcacttttcactttcatgcattggagaaggaaatggcaacccactccagtgttcttgcctggagaatcccagggacggggagcctggtgggctgccatctatggggtcgcacagagtcggatacgactgaagtgacttaacagcagcagcagcaacctggtctctgtcccttctggaaccctgactccggctgcctgtgtgtgcagccgccctcaccaggcagactggccaggcagcccaccaaggcctggctgcccaccgggagcccattagtcaagccgtcctctggcaggattatgccttcgcctcggcgatctcaggcccagctgccaggcccatgtgcaaatttgtactgatttgattagcttgtttagtcatcgctgctgatgagcgcgggctgcggcccccaaatgacattctgctgcctgcaactctgtaatcgcttttggaggggatattatgttaatatctcacacaagagcctccgatcaggcagaacgtcagggcggccaggcccaggccatatggtgcatccgaggtcctcctttgtaatcctgggtaattgaaatcctcttcctcattcggacgtggaaagccttcctcggtgggtagcagagggcccttgggtaatttactcaccgctcctcaggggaacatcattggggggatgatggcagggtggctgggaattcacgccagaggactttaccctttttgagaacaaaaatcccttgtacctacttaagaggaaaactggcaacagtaatagacccaccaattaccgagctcctgtgatgctccaggcactgagataattacatctgctgcctatgacaaactgccagacatgcattacgcccatttcaaagatgagaaaactgaggctcagagcaagcagcttgcccaaggtcagcagcttggagtagaggcaccaggactttccccaggtctggctggctagggctgcagtccgactgggagctggaaggggttttgagattgttgataacccccagacagcttaatgcggtgccttgaaattgtgagtgtcagaaagccctggaggtctcgttaaaattcacaaattgctgggccccgttcccagaagtatgattcagtagatctggggcaggatccgagaatttgcatttctagcaaatccccaggtgccgctgctacccaaggaccccactttgagaaccactggtttaggcaata

SEQ ID NO: 35003 - DNA, 1152 bp, Bovine  19866880874096
  misc_feature (1)..(1): n is a, c, g, or t
ntaactttaaatctaaaagtaagccaatcggagccaatttgaatattggttttgtcttccagttttggctacacatggtagtctaacaaaatcaaaaatgatatccttgaggtatctcttgatctgtttgcttgcttttttttaatgtcaaaatggagagcaaaggctgacacctgatgagtgttaggaaattaggatatagagtttatatataacatcaaaaataaaatttatacatttgttctttaggagaggaaatgctagttttcccaccagttgtcgttaactctagctttggtaggtttcctggggctgtgaccggataagtaaaagtttaaaaataaataagtgcactcccctcagaaataaatgtacccaacttttacattctaaatttaaaaacctgtttaaaagaaaataaatctagctctgcctactttactttttttttctgatgtggtagtaactttgaggcataatgaaatgatattctgcctctaaacccttaaaattagttataatgctgcttcaatcttgctcatgcatttgtgtttgctttaacatgctctttcctgttaataattgttaacttcctccactgctgttgaaagaacagaaaggggatggggaaaaaaggcaaaaaagatgaaagaaaagaaagagaaaggcaaaagcacttccctgggggaaaccccgcatcaggagagactgatagtgttattgttacgtggttattttaataaaagtattcttatctgttatattatcaacaataatttaattaaaaacccaaaatactctattgtttcatttttcttttaataattctctctctcctctaagaaaatgctgcaggaagtttggatcctcttagtctccagcgaaacaagagaatgaaacttccatgcaacatgatggcaatacaaaaaaggagttcatacatcttgttttcagtgacacgggaatctacaaaacacctatattatagggtcattctctcttttagacctactgttaagttacagactgcacaaaaggacatgccagcgtgaaagaggttgaggaagggggcagaattaacagaaagagtgcacttattctgaggcctgaaaatgagcacttgtagttatccttttagttccagcggaatga

SEQ ID NO: 35004 - DNA, 949 bp, Bovine  19866880905730
  misc_feature (1)..(1): n is a, c, g, or t
nacagaaggtaaaactgtggagccacacaccaaccgtaagctgtctatctctagactacttttatgtaaaagagaaataaatatctgccttcttttaagtcactgttttcccaggggactggaagggggagttctgttgtatccgtgaaacagatacggccataactctacctttctaggctagacaggtggtaccctgagaagtaaaattctggacatctgaggtcagagtagatgcatggcggcctcggggtggtgacacgttctcttgactggctcaggctgctgctctccatggccttgctgtcctcctccttttttggccaaagcagtgaaagagatggacataggatggtggggaagggaagctatgactggtcccagcgaggctgggctgccaagtgtcttattctgaaaagggaataggtttcacatggacaagatggaaggactgcttgttccctctggaaagttctattaaaatgaccaacccagacacactttaatattaatgggaaattcctcctgttgtttatgaaatcattttagagttgattttaaaaagagaggagagagagagagaagaaaaaaagccgtttgttagctaaacgaagcccagacaattatttatagatgcatctgagtggcttgttttaacacggagcaactgtctgaaaagactccactttgacaccggtaagcacccctggcactaagaataaatttatgaatgtcttttatgagagtcaacaaactagacaaataaccccacagaccgtccttcatgtcgagaaccagaacaaagacagtcgtattcgtcactcaccccggacgggagtggtgccaagctgcgcgccctccctggggccggatgctcctctccagctaatgtgatttctttgggcactgccactgggcaggcagatgccggtttatttccattcctcca

SEQ ID NO: 35005 - DNA, 1457 bp, Bovine  19866880953672
  misc_feature (1)..(1): n is a, c, g, or t
naaaaaaaaaaaatctgttacagagactattccaatgaatagagtcatgattgggaagcaagagaatgtctttggtcttccctggtgcctcagatggtaaagactatgaaacataccccagcagctgtgtgcagttgagaaagatccctgcagtgcaggagacctgaatttgatccctgggtcaggaagatccccttgagaaggaaatggcaacacattccagtattcttgcctggagaatttcacggacagaggagcttggcaggctacagtccatggggttgcaaagactgagactaatactttcacttcttttttgccccccctcccaggatgatttaactaaaaaaagtcttaaaaaccacctgtgtcatgttagggttcaagctaccagaaatagaatctcccccgctgtcagatgcctctgttctgctcattcacctggcaaagctgtgagtgagtatggagccttcttgcagggggagcggggctgcctggcatgcctgatgggtcactgcagcctgccctggccccctgcatgcaaggtgccactgtctttagacatttgtattttcctttgtgtggaaaggtaattatggcctccataccctgtggctgttaccattttgcatggccctgaatagaggcagaaatctttcataaaattcttttttttcagggaaattgttgggggatggggttgtggtggggatttgagtctgttttcgaagcaaggctggtgcaagtgcagcaacctttcaggatttgcaaaatgcttaatgtgcgccatcaattactgccgaatgcggctgtcatgcaaagtagcttaattggcccacaggtgggttgaatttgaaacccttggattgtaccaatgcaagagagaggaaaacagatttgacagatccaggctggggctctttcgtttacaaacagaggaaaaacatctgaggacagaatgggccttaaatggaaaatggtcaggtcatagaaggacagatcgacggatggatgctggctgagagggaccaaggaaaaatgcagacgtcaggagtttgggattgtatatttaaaaaaatgtaaccatggccatatgggagatattccagacagatgctatatactgagacgtccagggattgaagacgacaattcactctaaagagttagtccatggtgtaactaagacagagctggctgtagacatcatcagttgagttgtgtcaccaagggaaaatatttactcatggagtctagagttaggttcagtaatcagattcccaactttgagctgccaccctcaggaaaccagataaccttggtaaactgcttctttggacctcagtttcctcatctacaaaatgaatgcctgtcacggacagcatggaatgctgtaaaagacatgcctgacatacaattagagctggtccaggtgcaattatattttcaccttccag

SEQ ID NO: 35006 - DNA, 1853 bp, Bovine  19866880990695
  misc_feature (1)..(1): n is a, c, g, or t
ncatgggattttccaggcaagagtactggagtggggtgccatggtcttctcccatttacattgcttacaagttaaaatgatagtattttgcgtatgttgggttaaataaaatggattactaaaattaatttgacctgattctttaaactctttttttccttatgtgatctaggagtaaattttaaattccacatgtggctggcgcttgtagctcctgttttatttctattagatagcacctttctagatcacactctaagcacacatacttagggaccatggaaaccttgcccaaagggctaagagcccaagtctagaacctgcatagactttcccctgtttgtcctcccaaaggctgagcgagctgcccttgtgcacacctgaaggcccagtggaggccgaagtgcagctattggaggggagagggagtagatggtggggcttagacatgaggctggggtgccctcgtgcaggtacaaggtctatctcagaacaggacagggcccaggatgggggcaggaaccagtcctggggctggggactagctctcctatgtcacagaattctgaggcatctgagatttctcaattccatcttagccttccagattgttaggcagatatatttgtaaggtgtgcggacgggccttattttatttaacagtttgttagcttaatttataattttcaatatttagacctatgatatgtgtcgctatttgtgctctcgccctgggcaagtaaggtaattactacagaactttgtaaaggctgatgcgggatgtctgcagtgcagtggaagcccagaggaggacggtgctctgtctgcttcacagggaccttgagtaacgtcaaatttcagaggaaaaagtcacagcccaaggacctctggtaagtacagtgggaagaacttgaacctgcttatttttccgtgacagaaaaataggaggaatgtgctgggcatctagctactgagctagggatcccagtgagcaacccagccaacctgctttgctcgtctccactgactcacatttgtagtcacggagcatctgagtcctgtttgtcctcccaaaggctgagcgagctgcccttgtgcaaacctgaaggcccagtggaggccaaagtgcagctattggatgggagttcctttctcccaaggaagcatccatctgcttccttgggagaaaaagataattgactaagtactgtgaggacccagtctgggaacttagttcttttaagcctcctgaaaccaacatcacgtggaagatgcaggactgctgggattgggatgccagatcccatgctctgagtttcagtttcttcatcagtataaaatgggcttgacaatacagacaacctcagagacactgaaggttcgcttccagactgccacgataaagcaaatattgcaataagcaagtcgcacagtcaattctaaaggaaatccacactgaatattcattggaaggactgatgctgaagctgaagctccaatattttggccacttgatgtgaagggctgactcactgaaaaagacctgatcctgggaacaattgaaggcgaaaggaaaaagggtcagcagaaggtgatgtggttagatagcagcactgactcaatggacatgaatttgagcaaattccaggagatagtggaagactgaggagcctggcatgctgcggtccatggggtctcaaagagtcagacatgactaagttactgaacaacaacaagatgaatttttgtttgtttgtttttcagagcatataaaagttctatttacgctatgctgtactctattaagcaggcaatagctttctgtctaaaatagcaatttacacactttaaaa

SEQ ID NO: 35007 - DNA, 750 bp, Bovine  19866880998349
  misc_feature (1)..(1): n is a, c, g, or t
nggcggcggcggggccggcgggagcggcggccccatcaacccggcgtcactgcccccgggcgacccgcagctcatcgcgctcatcgtggagcagctcaagagccggggtctgtttgacagcttccgccgggactgcctggccgacgtggacaccaaggtcagcagaggcggcttgggctcacggggggcgggtgggcgtgaggctgctatggctgcagcttcgcatttccaaatcctagagaaaaacaaaaggtacttttcaaatctcagcagcgaggagaccgcttggggcagtataggaagctttctgagggatgtccacgtgcgttcggcttcccgccccatccttgctctgtgctgcttagcccaacagcatctctgaacttggggacccagtacgggttttacaacctcgaccctgtatttcccaagatgagactcctttaagcacaacagtaacaaatctcagtatgttaacaacactggagaaaaccgggtaagtaagcaggaatggtttgaatgcacaaacatcagcctttcttccttttctccagctcagtgatttgcaggcttgagtatgcagttaattaaggtacgttttcgtagaagcagcacccgtattttgtattccatcattggttgaaagattctccgttagatcctaatgccataggtcaaccgactaatactgtttcacttgaccttgcccagattcattttgggttcagtgaagtcaccggtgttaagtgt

SEQ ID NO: 35008 - DNA, 682 bp, Bovine  19866881056779
  misc_feature (1)..(1): n is a, c, g, or t
nccatcatgatgttcttgtttttttctgggccctatgactcagcacacagcgccagatggcttcctgcgtttccagccttattggctggggtgcccaggtcctggtacagtaaactaaaaccgaaaaaacagttacagctaagaacagaaaacgctctcttctctgccctctaatgtgaagaccacaggatccacagctcatgctggttggtccctctatggccttagcttgcattgttcatcccttctggccccaagatacccacactccaccccagcacatccttgatgccttaaagatgacacccaggggtgaacccaggggccaggttccgccaccaccttggttgattgaccttaggcaattttctttgtgagcctcagcgatcagacagggacactgatactgcctgcctctgaagagtgtggggttagggttgccagacaaaatacagagcacccagtgctatggactaaatcctatatctcaccaaaactcctttgctaaatcctactgccctaggtgatggtattaggaagtgggaccactgggaggtacataggtcacacgatcagaggcttcctgaatgcctgagtggtgatgcaagagaccccacggagctccctcatccttcctcccatacaaggacccatctgtaaatccgcagaagggctctctcca

SEQ ID NO: 35009 - DNA, 794 bp, Bovine  19866881082689
  misc_feature (1)..(1): n is a, c, g, or t
ntctgtcactgtttccactgtttccccatttatttgccatgaagtgatgagaccgatgccatgatcttagttttctgaatgttgagttttaagccaactttttcactctcctctttcactttcctctttcacttttaaactagttactacttttcaagtcaggtatggagatggcctggctgcctctgggcttcattattttgtctgatttgtctgacagacttagtctgagctcagtcccacatcagtgcactccgttctaaaagcagggctcttttttattctgcttattacctggtaaccattaaattaagaacattagtgaaactctgaacggaaagtagttccataatctctttggtatccggttgagctgatgccagttgctgtactttgggaaagagaaggaggaatcaaccaattagaggaaccttttttaattcttgagaaccagcactgaagcgcagatcttctgaagagcagccatgattaattactcttaatttgtataaagaatctaaaaaaaagtcttaacttccactggctataatatgccaaataataaatgtctgtcatggttaattaaatggagatacttcaattggccacttgatgtctttattgtaaaagatcagaagttgttagcttataatagactttcccaaagtgtaagaaataaagagaagcattgaggagtgtattaagacctggttttgccattagcagttacatggcttaagttggtcacttctctctagatcttggtgtcttcatttaaaagaggaagtgcaggg

SEQ ID NO: 35010 - DNA, 729 bp, Bovine  19866881085373
  misc_feature (1)..(1): n is a, c, g, or t
nacaaaaggtccctgcccagttcccaccctgagctgtttcccctgtgaaggcaggagtgcagctccatccgtctctgggtccctagcgtctggtgtgtaaccgggatttgataaggcgcccacttactgaattgggcagtatcacagacggcttctcatctcctcttcatattgagtccaggacagaagtataacttgatcatttcttatcacttttgagatttcagaaccaggctccgccaggttagggaactagctttatgtcccgcagctaacccagagtagagctgagagtcaaagccagtctaccctgttcgtgctccttttgtgttataacgcggcagatttattgagatgtaattcacatactatacagtctgccttttaaagcatacaagttaatggttttcagtttagtcacagagttgtgaaaacatcagaacaatcaattttagaacattttagtcacccccccccacccaacaacaactgaattcctacagccagggcccagccttgtaggaggacttgaacttcagaagttggctgcagttgtaaatttggagctgaggggttctgtgtgggatggctgcctctctcttggcatagcaataatgagcttttgctttttggcattttaaatgtatattcctgacttctctgaattaagaccctgattctctactgcgaatctcaaaacaacctacggacaaataagccaaattccaa

SEQ ID NO: 35011 - DNA, 1298 bp, Bovine  19866881092697
  misc_feature (1)..(1): n is a, c, g, or t
nccattccccacccatgcagttagacacacaaggggccacttggcttttccctccaatgacaggtgaattatgcctcgattcggtaaaataagagggctcaggtctttcctggattctatctaaaacattatactgcttcactgacgtatcactgccagttctcttcctggtaacaagttaaagacgcttgagtttggtggggatccttcgtggatatgtttggttcttttcttgtgtcttttggtgttgggggtggggctagagaaatgttgaaaatagtctttttaaaaatggtgacatctgcttgacctgcattgacattttgatggtgttaaggccctgcttactgaaatagaacgccaatgaaaaggatgaagcaggcggaggctgaatttctggcatggtattcacttgactcaccacactctacttcccacctatccacaagcaggtttttacttgacacttagtcagattgtatgcaatagaaaatactgtgtgtttgggcacacactggatttcaatgctgctgttcatttttaacttctttgagacaaactgtacttgtccaactctggtcaccataatgaatcacagtgacacttttttttcccccagccagccaacgacacctgatttgactagaaaaagattcgaagttaagaaacaccaaaaaagactcaggcatgccaaaacaaaatgttctctaataaaagaggctggatgagtgctgccagataaggagttcatagtggggcacaaatgtgcgtgttctgatttctcatttatctgaagcttgtggtccctattctgagcatggggtgggagtatgtgctgacggaagttggcaaaggacatttttaaaggagagaagtgataggctttcccagaaaggcagacagcatcccacagaaggccgattcagagcacaggttttgtgggtgacgtggtatttgtggcactcatgagacataagacttgatctgagccagagaggagcataatcaaaatagctttgcaagctgatagttcatgctgcagactaatctcctctttttctcctggggtgggaacagggggagaaggggagaaggaactcaactgggaatgggacaggggttagaggttaggcaagtacgtcgagtcccagttaagttcagtgcagaagtgtggtaacaggcgaggataagactcggccagggcaggaacaggaacccttgtagaacgccaaagtggggttcgaaggctgatgccagcaaacataataacatgtaaagcagggacccccaaaacccaa

SEQ ID NO: 35012 - DNA, 2519 bp, Bovine  19866881113848
  misc_feature (1)..(1): n is a, c, g, or t
ngttgctgggccgtcgtcgtcgccgccgctttaccccggtcccgcagtccccgctgtcgtagctgcgaactccgcctggctcttcttcttctctccttcttcctcctcttcctcttctgctgtcgccgccgccgccgccgccgccgctgctgctgctgccgccgccgccgcctcccggtgcccgggtccagcagccgcggctgagtccttctcctcaggacctagccgagtgaaatgacaaccagctggaaagaccgagagacacttccggttcgaaaagggaggggtgggttagggcagacaccccgcccacctgcctaaaggccaataagctgctagaattcagataaggccacgcccacaacccaggtcccctcccaggaaggtcgaaaagttacgtcgagagacgccccttccgtctgcgcctcgcccagtgaggcctggagcctggaactcgctctactacccagagggagcccagcgagtcgccatctttagtgtgggcaaaggactactgcgctgtttatttcgcttaaccgcgctctgcaggtggagcgtacagggacgcgcggaagagaacggatttccctagtactgtgaaaaagagtccaggagtaggagatcggagtggctacccatgaaaccgcggatgaacaggaggactgcccagagtaaacgtggttccccaggcatctcttgctttggctcgagctccgccccagagggatctggaagaggaggcgggttttactagctgctgtaaggtgtctagaattgcgtatgtgcttgtcctgaaaatggatcttaaacgggactctcccttcaccttccatccccccacccccactcctgcttggtttaggctcccgtccggtgcagtgtttcaggcacaaaaatacagctcctgtcggcgtccgtggccgagccctccttgtccctatccgctctaatgtaccctacccgcttattagggggacatttccgaaacgaagaatcttaaccaggatcctcacctgttctgctctctctacgactgcccactacctccttgaaaaagaccaaactttttatcctgatattcaagggttttgcactctgggggcagtatatcttaacatctcatctcctccaaacgtcccacaccaagctcctccaaatataatctcaggtcctttttaccttccgtttcctctctcctccaccaggtaaactcttatttagttttaggaatcggttcaaaagctaccaactctgtcttctgaaattcctcttgaatgaatatccatggcccagtatatttctcatgcttgtcaccctctttgtaatggtaacttatgtctcctggacctgtggtcacctgtgggctctttgaggagaggaccttgtattgatagataggaatcattagcgaatggatgctgaaaaaaaagagtgaacaaaccaaccagaatgatatctttcctgaatcctcttttcaggtctgccatttggtttggggctaatgtctctcaaactttcatcatttaggttattcctttgctactcaagggttccttgtcttgttcatatttgtacatgaccaccatcaggacctagattaacgccttgctctcagcaaaggttctaaatatgttgaatagtgagtgttttcctttagtagaaaatgaaaaatgaagaaatcagagtagatccacaagtgactatggcaaaagtagtgagtaaaaaggagagattacagacttttaagaaagatctcatgaaaagaaatgacttccacttcctttccctagcctttcctcaatggccccaacttctgctgcctcagtttatcaatcctcccatacttccatgtagaacacccgtttgggatcttagtgattttatttatttatttattgtcttatgtcctgaacatgagtctttgtaactcttctttgagttccttgagtgatagggattgggtcttactctgttgtttattccccaaaactggtcataccttgagactgagctggtttaattaggtgtcctttcctccagaatggtttccctgactctcctttttgtagcatcttgtagattcttctcatttggttactgctggttgtcagttagtttcttttcacaggcagagattttgtctggtttatctgtgtgtcgctagtggccatcagagtatttggcacagagtggactcagaatacgtttattgaatgaatgaatgaatgttcagtgttcagtagatggttgagaatcttttggggctgccaattcttagtggctgaaatggctgccatgcttgaaggaaagagggttatctttagaaccaaactgattatttgaatcccagatcttctactgcctgattgtagagctctgggcaggaatcacctctacaataccctggttccttatcaataaaatatgaatgatagttcctccctggctagaaagtagtaaattacagtgaagtgctgggctcataggaggttttcaaaaatgtcagtttcttatgacat

SEQ ID NO: 35013 - DNA, 827 bp, Bovine  19866881276257
  misc_feature (1)..(1): n is a, c, g, or t
naaatctatttggggagtagttaggtgaaaggtgaccccctacagaaatgggagcaaatgacatccggtgaggacaaacccctctttggaacccggtttcctcctggctgcatcagaacatctgccacattatatcttacgaacagagaaactgagacagaaagatgtaacgagacctgccgcaggccacggaatgctccacaaatatcaaagttggcagcagcgtcttcaccgtctcagccagggagcctgcttcacgcagcacacccgctccagagaacagggagccggaaggtgggagcggatgtgctcggctgaggtggcgaggccaccaccaaactgcgtgcatggcttccctggggacactcatttcaccccaccactttcaggggagcaagcacccctctgatgctctgccattgctctccaggtgtggggagaggaaggaacaaagccagggatactccatcatttccatccaccgctaatcctaaggcgcttcttactgccaccacgttcaccatctcctgcctgaggaagaagctgcaggtgtggtggcattgcgggagagacccctgaatgaggaccagaacttctccatgtgacccgctgaagatgcgctgatgcgaagccagcgtggagaccataattcctgaaaatgctagtcgaagcgcctcttaagttggctagtgactcaagcgtataattactcagaacatctttgcccattaaactgcccccactttttttttcaaaatctggctgctcctcccaaaatgttttgactagaaatttttgaaatgtcttgaatatatttatggtgaagt

SEQ ID NO: 35014 - DNA, 1895 bp, Bovine  19866881368158
  misc_feature (1)..(1): n is a, c, g, or t
ntaaaaacctacagaaacattcagcatggtaatatatgtattaggacatgcatgtgaaggaaagaaaatcacttatgattaagcaattcatgtggcattgttacataaattgtatccagcttaactgtttgagaatccagaacttccaattactttaataaacatactagattacatctaattttgctctgaccacaacatcaactgatgtagttttaaatatggtttaaattatgaattgttttccaggaatgaaataatgacatcaaggctataactcaagggaagagtttgctaaatgcattaaattggactgcagcatcatgaaaacgaagtgactgtatgaagtaacacagaatgtacactataatatagttaaaatgcttttctccatctatatggatgagttttgtgacccggctttcctggaggctcagacagtaaagaatccatctgcaatgcaggatacctgggtttgatctctgagttgggaagatcccctggaaaagggaagatcccctggagaagggaagatcacctggaggaggaaatggatacccactccagtattctgacctggagaattccatggacagaggagcctggcaggctacagtccatggagtatcgaagagttggacaagactgaacaactttcactcacttactcgctcattcaaattcagatttaacaaaaatatttcagatttaagagacaaacatgtttccttggctcaggaagctcagtcaacattcactttctgcactcctccacacatagctacacctgcggtctattctacactcagtgctttacaatgctctgtacttttaattatgatgaacagtgatacaatggtagcctcgaatctacagtgctatgcactgaatgtgacaatgaggaaaactactggtctaatgtgatccaagagaaataaagtattagagaagccagctctctttaatacaatgaaaattgtgtttacttactttctctagacaactgttggcatttcagcctaagtctatatttctcattttcttcaagcatttttgaaatgattttgtacactccattccatactaaaaccttcaaaagataagcacagttaaggaacactaagcagagaatgtggactacagtgtgatgcagacaactagaagtaagtcaaccgtgatgactgaaagtcactcagtcgtgtccgactctttgcaaccccatggactatacagtccatggaattctctaggccagaatactggagtgggtagcctttcccttctccaggggatcttcccaacacagggatcgaacccaggtctcccgcattgcaggtggatgctttatcagctgagccacaagggaagccccaagtcaactgtggtgcatgtcaatttgatatcattacaaagcactcagagatctaaaaattaaacaaaattgctttcccatattcactgaattctctggtatctttttctcacttcctagtatttcctctctgtagtatttaaactaactgtcctggggacttccctggtggtctaatggttaagactccacaggaggcggtttgttccttggttggggaactaagatcatacatgctgcatgccatagccaaaaaattaaaaataaataattggggaaatttataataaataaataaactttcctggatgaaggcaaggtctttcaaaggcaatgtccagtaagtcctatggtttcaacatactcaattttgttttgaaaggtagtaaaaataataatttctattcctatgtataaaccactgggccatgatatgattttttagtgtattttattattctagttaatacttaaacatttctcctaggacataccaaagcaaacttaccagagagcatgaata

SEQ ID NO: 35015 - DNA, 863 bp, Bovine  19866881428538
  misc_feature (1)..(1): n is a, c, g, or t
naattattttagatatatgctttatgggcttccctggtagctcagctggtaaagaatccggctgcaattccagagaccccagttcaattcctgggtcgggaagatcccctggagaaggaataggctaccccactccagtattcttgggcttcagtagtggctcagctggtaacgaatcccacctgcaatgcaggagacctgggttcgatccctgggttgggaagatcccctggagaagggaacggctacccactccagtattctggcctggagaatttcatggactatacagtccatggggttgcaaagagtcggacacaactgagcaactttcactttcatacgatttatagaatttcctatgtcacattggcttgtgtttatactagcttgctatactacttcaaagaatgttgacaagatataatacagatatgagaggattgtttaaattgccttacagaagggcagagattgaatgtaattcagtttctgtatttcacaaaccctgtttattatttataaaaatgcaaaaatgaataacaaaagataccacacatatatatgatggtctgacaggtgctcagtaaataataattttcttccttcctcaaaagtaacctcatatgtatatattcttaggctgatcttcaacagttactttcagctcttcattactactcccaggataacaactgtagaccactttatagagtttacaataggttttcatattgtctttttcatgaaaggatctttcagcatgctctttcctgtagcaactatgaaccatattacatacattttcagcaaggactatatctacatttctccgggtaattatgccctcccttttctttccg

SEQ ID NO: 35016 - DNA, 1168 bp, Bovine  19866882041110
  misc_feature (1)..(1): n is a, c, g, or t
nccttcttccccggaagctgtgtgctgcaatgaagaggcgtcaggcagcacccgtgggcctgacctgtgctcacggaagctccaggggcagcagagaagggcaaggagggacatggcccatggcaggtcagagataagacaagtgggggccgggtattggggcctggggagttgttacattcacaacagcagtaggaatgtcagcctggggactttgtgaaagagatcctgtcctgaaggaagtccttgaaggccgagaccaagataggtactggccacgtggaaagcttggacttgtcatcatagatggtccagcagaagcctttccagaaaacctgggtgcgaaactgtcaacctcaaacatctgtgagactcagagaggggaacaccagtctttcaacacaccagaccgttgagaattttcctatcccttcactttccttctctgtccccacgtgatccttacagggaccagaaatcaggttagtcagctaggggaggagcagatagacctaacccaaaagatcctgctggcaccaggccctggcagaaaaaggagagaagtaatgaattaaggcagttgccctgacttgaagtgaccacaggagctttttgttacctaacagtgattagaaaactcataagactgctcataatctgattctagagtgaggaacagattgcataccctgaatatgtttaaaggaaaattggagacaaaaatcaagttacttttataagaatcctgcttgttcaatgtattagatacgttgtttttacttagctagcactaaccatgggctaaggactgtgcaaaacactttctattttcagactaacccacaatgaagtaggtcccattataatgtccattttgcaggggaagaaacaggttcaggaaagttagataatctgatgcaggttgcaggatggatggggaggagccagggctgggagccaggcagtcaggctctagagtgccatcacgccttcccacctccctgtctcaggaggcagatcagacaaaggctaaggttgtccaagtatctgcagctaaaaatacttcaagagttcacaggaattttcacaaatccttttggggaaggacttcaaggggacgtgatgtttgggttagaatgactggttttaaatatcaagacccactcaa

SEQ ID NO: 35017 - DNA, 810 bp, Bovine  19866880409855
  misc_feature (1)..(1): n is a, c, g, or t
ngaggggggttcgggatggggaacgcatgtatacctgtggtggattcattttgatatttggcaaaactaatacaattatgtaaagtttaaaaataaaataaaattagaaaaaaataaataaaataaaatatgtaggtgaggaaaattgaacaagtgaccaatatgtttaatttaggactttgatataactaagaagtaagtcttaatgtttcaccagttttatagaacttatcttaagaaaaaatgtattcatgaaagaaggatgctcagatgtgtaaaaggggaaccaaagatcaagactttgaccaagtgtttctagcacaattttatagaagaaaagactctgatacttccagaaccgtagtctccagggaaaaaccttctacttagggtcacagatagttcattatcagtttccgtggctcagatgtcaaattatttagggctcttcttcaatatcctttgagaacaactctaatcagtatcctgaatattattaaagttatagcataagcagtgttgacagtggcagttgaaaggctgagaacatgcgggatttgaattaatctccaaaatggattttgtcactgatttaagtgatcacgtgactgagcaactaaacaacaacgctgattaagtaaggttgatgattcagaggtaggcctaagccatgctttcagcagatcataaaacgttatttttttaaatatttacttgactaaatctcagttagaaggaactaactacctgacttattgacgattactaaaatgatagccactccggaagaagttaattttctaaatttta

SEQ ID NO: 35018 - DNA, 2671 bp, Bovine  19866880604340
  misc_feature (1)..(1): n is a, c, g, or t
natgagattgaaattaataatcatgtattaagattttgtttgatgacttactaagtgaaaaaagtgacctttacctgttggaaaaaattggggtgtcataatttaggatggaaaattttccttatccttgataaaagtagcaatcaatttagatagaaggcaattcagaagagtaaaaagatgatttctaattcttgttaaatgacttcatttatttcttcattcctttggtattttgagtatctttataatagctgcttaaaatatttgctagataattccaacatctgtgtcacgtcagcacagcttctgttgattgtctttctccatgcaagtccaaattctcatggctattcgtatgctgaatagttttggattgtcttctggacatttttaataaatattttgttaggagattcttgtttaaatatctgacgcatatccacatttttggtttgagcagacaatcactttggctaggttcaggccttctgtgggctctggttccagttcagttttcagagcccttgtagtgttatttggatatttgttgcaagtgaatcaaccaacggccaatctggaatgtgggcaatgttctgctatgaagagtttaggtctcagtgtctttggtacgttagagccacgtgtaggcatgcacagctcatgtgtctgaggacaggggaaatacaggaatttgctaccctctaatcacatggtggtggttttttctggtgaccagacactcccttgaaactatacagaaccttcacaatgagtgatcactagcataacaaagttacttctatgactcaagaaatggacaaaattataatgatttttgaagctccttgccaggaatcagaggtaaagatcaaatatatctattgcaacacagttttcagtcacccaggtggtgctagtggtaaagaatccccctgccaatgcaggagatgcaagagatgcaggttcaatccctgggtggggaagatcccctgaggtaggcaatggcaccctgccccagtattcttgcctgaaaaattccatgggtagaggagcctggtaggctatagcccacagcactgcagagggtcacatatggttaagcacagaaaacaaaagcaataagttaagcacagtttgaaaagtatcagaacttagatatggcagaaatattagaatcatcacactggaaactttttaaaaactctgactgacatgctaatgactccaatgcaaaatatagacaccatgaagaataaataagtagtgtaaggagaacatagaaattataagaaaggaaaaaagaaatgtcagagaatcaaaacacttaccaaaatagagtgtctgatgatgtcattaatacatggctgaggagagaatctctgagtttaggacatagcaacagaaacatccaaaactgaaatgttaaaacaaaacaacagaaaaaacagaaaagaaaacccaaaacaatatccaagagctgtgggataactactaaaagtgtaacatgtaatgggcacaccaaaaggagaagaaagaagtagaagcaatattttaaggaacggtgactgagaatttaccccaaattaatatcagactctaaagcacagatctaggaagcttggagaaaaccaagcagcataaaactgcgcgcacacacaacatcaaatacatctgggtataccatagtcaaattgcagaaagccaaacaaaaattgagaaaaaatttggaaagaagcaagaagaaaaaaaattaccttgccaccttttgtttccaaagaagccaggtaaacaagcagagtggagtgaaatgttcaaattgttgagacaaaaagaaattatcaacataaaattatatattctctgaaatcctgttcacagtgaaggggaaataaagattttttcctggaaaaaaatcttcagggaatttgtagcccaggagaccttccttgtaagaatgttaaaataaggaaagaatagaaagagggaaggaaagtaatataggtcaaaaactaggacctactttgaggaataaatgagaaaattttaaatgtatctttcctattcttagttgatcacactggtaacagcttgttcaaaataatgactgtattagtttcttgtagtttatgcataagtggaatgaatgacagtaacaatgtaagggacaagagtataattaggattattttgttgttataagatattgcactattcttttgaggtttacagtattaattgaaagcatatttgagctagttgtaattttgtattacaagcttcagggcaatcactaaaaatatttttttaaaaagaaagaagtgcaatggatacaagataggagagaaaatgcaataatctaagctacccaactaaaactacataaggctgaaaaaatagaagacaaaatggaaacaaagaacaatagcaacaaatagaaaacattaacatacatggcagatattaattcatctgtttaaataatcatcttcatgtcaatggtttaaatataccagctaaaagaaattgacagagtgaaacaaaaacaagatccaattttgtattttctataaaaaatccactttaaagcatgaagatacatgtagtcaaaaaaagaaaaaggaaacgaatgggagaaagatattccttgtgaatactaatcaaaagaaag

SEQ ID NO: 35019 - DNA, 1824 bp, Bovine  19866880654251
  misc_feature (1)..(1): n is a, c, g, or t
ntgcgacccaattaatcgcagcacgccaagtctccctgtccatcaccaactcctggagttcactcactagacagcatattaaaaagcagagacattactttgccaacaaaggtccatctagtcaagcctatggcttttccagtagtcatgtgtgaatgtgagagttggactataaagaaagctgaacactgaagaattgatgcttttgaattgcagttttggagaagactcttaagggtcccttgaactgcaaggagatccaaccagtccatcctaaaggaaatcagtcctgaatattcattggaaggactcacgttgaagctgaaactccaatactttgtccacctgatgtgaagagctgactcatttgaaagaccctgatgctgggaaagattgaaggtgggaggagaaggggacaacagaggatgagatggttggatggcatcaccgactcaatgggcatgagtctgagtaaactccaggagttggtgatggacagggagggcctggcatgctgcggcccatggggtcacaaagagtcggatatggctgagcaactgatcagaactgaaactgcaaaagtgtaattctaaaatgacacaattacataagttggttaaaaggagatatttaataataaatcttgttcatgctcattcgctccagtcttgtctgactctgtgtgaccccaccgactgtagctcactaggtttctctatccatgggatttcccaggcgagaatcctggagtggattgccattcctttctccagaggatctttctgacccaggggtcaaacccacatttcttatgtttcctgcattgcagacggtttctttaacactgggccactgggaagcccaataaatcttgcaaaggggctgcataataaatagacaatataggcaacatcttactttcaatgttggagtaacttttcaatttgccaggttttaagaaaactcatttttcactaaaatctcagaattttttgtactcaaataaagatgtaactcccacacatctgtttcctgtacatgtttctcttgatttcatcacaaaagctatgcaatttataggaagttaattgaacttcttttcttagaaacaggaagttacacatttcaagggtattttttaaaggtaatggaagtttacaatttcaatcaaatcttaagaaaaagaggtaactaaggtcatagcttgatactctaaatataacttattataatgagtctggtttataacacttctataggaaaaccctaatacaaaacataggtcaaaaaagcaaacaactgagttaattaaaaaggataaaatgagaatattaataaggagtagaaatatagaacctgatgtacctttaaattcagtgatgcctatatatatatattttttttttttctctttaaatgtttgtttctggaggagcacaaatgagattgtaaatttcttttagtaacagcagaatcactatttcatgtttcttgtcacagctatgtgagttaacaaatacaatttggttattcctctataatttaatccacttttgtgtctaccttatatctgaaactgaatagatctatctagctggagaataacacaaagatttgtttaaacgtctttttttaaagtatatgtaactctagattttttttctttcccgcactatgtgacatgtgggatcttagttccttgaccagggattgaacccacatcccccacattggaatgcagagtcttggccattggactgccaggggggttcctataactctagatttctttattttttccctccctccatctctcctctctct

SEQ ID NO: 35020 - DNA, 1250 bp, Bovine  19866880677137
  misc_feature (1)..(1): n is a, c, g, or t
ntgcagatgagccatgactcaagtactcaaaagcctcacagggctacctattcagaagtaagagttacaggatctaagcctaaatttgttattcaaagagatgaagttttaaaatatataagcacatcttttagttacagaatagctactaaatattcatcccctaactctcatttccatagttccaaacataatttttaaaaaaatagatcagtttctaatattacatcccagctcaagccttgctttttaatagccttgctttttaatttagttttctaaaatcagaatgcatttctttttctccaaaaaaaaaaaaaaaaaaatggagaaataaagactctaggctatttagagatttgcagagtctgggtgtaattctgactaagaagagatggtatgcatgtgggagtcctgagaggtgaaccgagttaagaattgtagaaatattaatatcttttctcaggcataactcactgattagatatactatatttcctaggtccttgtccccaagactggctctggcatgaagaaaactgttaccaattttcctctggctcttttaattgggaaaaaagccaggagaactgcttgtctttggatgcccacttgctgaagattaatagcacagatgaactggtgagtgttcaacagatgtatgggatgtgtgtcgggctggaatattgggtcataggtaagtagatcttgtttagaccctcagtagaggagtgcttgcttaagaatcagaacatgtacatgatttctagccttgtgtggccactggatatgtgcatgaccttggatggacaggttactaagcatttctaggctccactagacatcgctgtaaagccatggagaagatgtcaaagttctttttgagttctttagttttgtgactctaatctaaaaagtccacatccactcattcatcgacacagaaatgttactccccacaggaattcatccagcaaacaattgcccattccagtttccccttctggatggggttgtcaatgaggaaacccaattactcgtggctttgggaagatggtactcctttgacgccccactttgtaagtttgatgctcttttttagttttggttatttatttatttctatctttgactgcaccgggtcttttttgctttgtgtaggctttccctagttgtcacgcgcatgggctgctccctcatatgatgtgtgggcttctcactgcaggggcttctcttattgccaggcatgg

SEQ ID NO: 35021 - DNA, 1142 bp, Bovine  19866880686280
  misc_feature (1)..(1): n is a, c, g, or t
ntaaaagtttatgcgcaaatataaatgaaggctattgctaagcaacagtcataaacaggcatatcaaaggaactgtagctgaaaatattatcaccaaataaatcatgatcccttcatgttaaaagttctataaataaatcatatgaaagtgatttaaatatatataaatatacaaagtacatgagagaaaattactatataactttcataataatatttccaaccactgaatatagtgttcttcagtggtatatctgaatcctcagtatatgctggaggtggaggaaaagaagagaataagaaaaattaacagagtttatgccaggttacactggcttggccaaataaattacctcattttctgcctaaactaagccatcaagaaaggatgaaaaagattattttagtagatgagagagactgcagagtttcattcatcataatcatagatttcaggaagtggaaaggaattaagatgcaactagaaagatgttcttccccagtggctcagcgggtaaagaatccacctgcaatgcaggaggagacccgagttcaatccccgggtctggaagatcccctagagaaggatatggcaacccactccagtcttcttgcctagaaaatcccatggacagaggaaccctggcagtctaaagtccttggggtcgcaaagagtcggacacgactgagcatgatgcacagagacaagtttacagaaagatgttaagagtttgcagacttagttgagtattaattttaattaaataactctgttgataaactactctgtgccatgaccctgctgaaacaatgataggtaaacaatggtcatactgcttgaggaatttaattcaaagtcaataacaaatgtaagagaaaagggaacaaccacagcattttaatagtgaatttgaattgtatgtacctatcaataaatgccaattttattttcatatttttcttgaccactctatgttagggttataaacttccagaaggcaagatatttatttgcagattatggaaatgatttaattgcatggttttcaatcaaaagttttgtcactttcacagaaaggcaggaagtgcaattttcgttcctctggtatggcaccaatattgctccctcttacataagccaa

SEQ ID NO: 35022 - DNA, 1647 bp, Bovine  19866880731589
  misc_feature (1)..(1): n is a, c, g, or t
nttttctaaattttatgtgtaagtgtacgagtgtgtgttcagttgtacccgactctttgtgaacccatggactgcatgcagctcaccaggctcctctgtctgtagaattctccaggcaagaatactggagacacacaaaaatttgaatgattggataaaacataaaatgcattttttgtttaatcttacctactcatctcactcattacattttgacatttgactgtatattttcctttttttctatttcttggaacctcagtattttccacatactattaatgtaatgtgggcttaccaggtggcattagtggtaaagaatcagcctacaatgcaagagatgcagaagaagtgagttccatcgctgagtcaggaagattcccctggaggggggattggcaacccactccagtattcttgcctggagaatcccatggacagaggagtctggcgggctacagtccatacagtcacaaagagttggacaccactaaagtgacttagcattgatgtatgtataaatgacattgaactaaagagcagatcaagagtatctctatcctattttttatgaaatcctgactataatttacagagaaatatgcgttgctgtgggttttttgttttgctgttgttgttttgaggaactggtgtatacattgttatctgtacagtgaaaattgattttatatcaattacctgaactgagagacttctgcattaaggtttggcaatatgtcatctgtaggttggggtttctcttccactgtgtgaagttgagcagtgctctctcctgttggatgagtttttcttgctgcttcattatagtagtggacatctgaaacacttcaaacaataacaaccattcctgataaaatactgacacataacaaaataagccttcaatctagactgaagagaactacatattactcattatatttgtgattaaaagctacaaaggatatctatctaggtgttctgccctttttttttattgtgttgttcgcttttttatattgagctacatgagctattagtatattttgaagatcaatcctcttattggttgcttgatttgaaaatattttctcccatccttagggttgtcttttagtctcatttatgtatttctttgctttgcaaaatcttttaagtctcctctgtttattttttttttttcattactctagaaggtgggttaaaaaagatcttgtgatttatgtcaaagagtgttcttgcctatgtcttcctttaagttttacattgtccagccttacatttatgtctttaatccattttgagtttatttttgtgtatggtgttagagaatgctcttatttcattcttttacatatagttgtctggttttcccagtgccactttttgaagaggctgtcttttttctaatgtatatttttgaccataggttcatgggtttatctctgggctttctatccattgacctatatttctgtttttgtgcccataccatactgtattgatgactgaagctttgcagtatagtctgaagtcagggagtctgattcctccagctccgttttactttctcaagcttgctttggctacctagggtcttttgtatttccatacaaattgtaattttttctaatcatggaaaaatgc

SEQ ID NO: 35023 - DNA, 1899 bp, Bovine  19866880781361
  misc_feature (1)..(1): n is a, c, g, or t
nggaagcccactggatacccttacaatctcacaattttgtacagatttgtttgttgaggacacatgaaactggagtgagctccatacatatgtgctggggtgctgacactctgaatctaaaccccgagattcctccatatacatgacgttgggcaaggcagcaaatagaatctttggttgtgttttgattattgttttgttgtgtcctgcttgtttttttccatcagatagaaatagtatggtaggaatatgggtcataaagatactgcagctccatctttgtcagtctgcaataatagcacagaacaggggatatgcttagttgctcagtcctgtccaactctttgtgatcccatggactatagcccgccaggctcctccagccatgggaattcttcaggcaagaatactggactgggttgccatgccctcctctgaacaggggatacgatttgcacaaaggagagaaagatgtatattctaaaggtctcatttggagtgaaattctagaagtaaaggtagtgtgagcataaagggacagtatagatgtaatcttgtttcaaaagctagagtttccttgtgtttatttgtaattattgctaatgggaaagtaaactataatgggatggaaaatgcagtggctatttcaaatcacaagaaataatatagaaatagaaatatatcctagtatatgtatataatacacttttatatgtatcatgtacatataatatatgtaattttttttaatctttgatgttattttgggatttgttcctggaaatgagctaggattaatataatctgtgttatgctacttcaaatagaaaattaaagttatttgaggaacttatttattaataatcgttagttattaatccaagtggtgatgctacatttttttcccgaagataatgtattcagtttacaagtttgtctttgatctctagtctctcaacagtcatcttgtgttaggacctggcagtcattcagggcttcatcataaaatttctggaaaatggctgagggaaatgtcacttggagatgatgctgagcttaaggtatcacagatgaggttaatttctgattttggtgattatgaaaaatatttgaggaggacagcctcaaaatttattacttgtccagttttcctgaagaatctaatggaattgcattactttattcatactagttgctgtggaagggaggtgctaggtctggaagaaaaggacaacaaatactccagctgtgagaaactaggaaagcctgagagaaatcaggcagtgtgtggcattgcacatttgtccataaaaataagtaacatggacacttgccattctaaataataattaaaattcattttagacaacacagaccataggagaagtgatatgttggaaaagtgatttttttttctgggactgtgtttcaaatgtttgacttgccaagtgtaattctttattttctctttcaggtttacaagaaatacaagtgtcataaatgatcagatgtattgtggatatgtatattatgcaaacttttattatattaagtgcactgaaactaaaaatattatatgtgagaagcttgcccaaccagtgaagactgagagtatactaatgagtgaaatattggatggaagaaaatagttagtgcaattattttgttccaagtattatcttgcacttaaaggacactttggggaccatacatcttattgaccacatctatagaataaagatacagtacgactacatttctgcctccctcctaacaatttacattttcaaactttcttctttttcttcatttgctgagtgaatggagcctaacgtcatagttatattttatgtttcattcacttaatccagatactgcgaatataaatacagtattttg

SEQ ID NO: 35024 - DNA, 2107 bp, Bovine  19866880785309
  misc_feature (1)..(1): n is a, c, g, or t
nttgtaaggaatttaccaggctttaagtttgttcagctgcaaagtgagcactaagcactttgccccgcctgtggcattgtgctagggttcttatctcacatacaccactcaacctcagttcacttcaagcacagtccttgatctcactcagctccagagatgaataaccaaggagcaacctatgcagaactgaagggagtcaagaactcaaagaggcagaaaagaaaacctaaggtttctaaaagttccatttcaatgactgagcaggaattaacatatgtagaattaaatcttcaaaatgctcctcagaatcttcatgggaacgacaggaatcaccgctccaaaggtaaacacttactagacacacatggagctgttctaggaagtgcagtggggtgcagaggtgtggaggaagagtaggggataagctcgcgtatttttcactttgaggaacagaacttaaagctggatatgggattctgatgtgaaatcggaggattacttttattctggcattactataatttgaagtctttgatcaacaactcatgtagtcttatatttgctgaaaacacaatggtatattctgagagaaagactacagtggtcaaaatgggttggggtccaagtttatatccataattctgtgttcatgtgggttcttgtgtatgtaaactctgaacaactgtccccatcactgctttctcagtttccttttctgtccctgcaggttcaccagtcacctccagagaagttcattgctgggatcctgggaatcatctgccttgtcttgatgtccactgtggtgagaatgatcgttgttactccctgtaagtacatttttgaaaaactgtaagggaacttatcactttactgagggtcagtgctgctaaacatttcataatattatagaatgtacctatcattaaaatgcatgcaattagaacaaatgcagtatgtctaatttgtcagaaatatacaacacaggagaattacagagagcatgtatatgtatattctgatttcataactcaaaagcatgctttaggaggtttaaagatctttttgaaaaatacaaattaattcttgagattagttaaagcaaatactgtaagacgtggtgaagtttgttccgttaggtttttgaaatattttttccatcaagtcttcattacctaattaatttttcttgctaaatcagttttatttcagattactctatttctaaacaataaactgaattctcaagctcataatctaaaatcattatgattcatttaaagcaatattaactttttaatgattaattttgtagctactgtaatacgggaacagaattactcctctcttataacaaggctccagaaaggtacataatgattttcaaagttgtaatatgaatacaattcatttttgtctctatcttaggctagtgaaaataagaatagatttggggatagaacataattcataaaatcaggcaataaacattcataaataaatgattatagggagagtgcttctccctatgcaataatatgatctccatatccattgttggcaattggctgtaatttcgtcctgctataatatgaataagagacaaataattttgttattctaaaagagaagtttcatttcttgattttcacgacatgtaaagagtagatatttctatgtgtttcctttatatggggacatgtattaaagacagaccctctctatgaatgcatgaatgagatttgttttatatgtaccaggcttgaggatgcatagatatgttattttatatatatatatatatatatatgtgtgtgtgtgtgtatacatatgtttatatctatgcatatatgtaagttaatttttattttccaaattcaaattgtttttgaatactaattcataatctttcttcagaatgtcattgtggtcattgtccaaaagactggattacatattccaacaactgctattatactagtttggaaaaaaaatcgtggaatgagagtttgatatcctgtgctactaagaattctaccctgctttatatagataagaagaggaaaggtaagctattaaagtttccaacacttgctaaaggcttcat

SEQ ID NO: 35025 - DNA, 815 bp, Bovine  19866881005091
  misc_feature (1)..(1): n is a, c, g, or t
ntagcttatctaatactcacatattagaatttaaaaaggaaccctttatccacttccagctcttccctgataatgtaaaatttaatccaatccaaaacagaattccttctttgtttatcaggttttgcatgagtctctgtaaatgaaacagaagaaatgactgagtattgaatccctttatctattgctggtttgcattcttctattcatcctctgaaacccagttcaagtattactttctctatgatgcctttcctatacccattggagttaattattccttacttgtaatatttctattccgttcatttatatacccaaatatttatatttatatttttgtattcattaaataatatttatttttcttatatgtccatttagtctctcagattgtgagctccttgaagtcaaggttaatacttctatctgcatagaaccttcaagactagagcacaaaaatcttgatatggttagaagccagtgctgaattgtattaaaatattttacttattaattatttaccaattcttcctgatcttgaataagcagtagactggattctcttgtggaacagtcagctagactatcattccaaggtttggaagtttcactaaaatataagcatttatctcggattcgtttccagtgcattggacacgttaacagaactggtctctctaaagtaagataagaagagggaaaataaaaataaaataagaaagaggaagaaaagaaatgaatgttatatttctaacctgtccccaccctactaacactaataacacatacacaattcagttcagttcagtcgc

SEQ ID NO: 35026 - DNA, 1548 bp, Bovine  19866881355616
  misc_feature (1)..(1): n is a, c, g, or t
ncactagtgtgttgatgaaacaattggttagcaaagccaagctgtgtaattcttcacttaaacaaacattcacagttcacactcatatttttgctaaaacagtggtggaatggattcttgatttatagcaattagaagtcattatttccaatagttcgtaacctattttttaaatttagttctgacttgtatttatgaaaacatcatggcacaagggaatgttgcataaaataacttcttgatactgattagagaaaaagcatgaaacattcaattctggaatgatgctttttcatatttatccctccctgccaatttccttaaagcttgaaaacaatggccaagtaatgaagagtgaattcaagaatgaccatgttcttttctacctggaaaatgtaagttgacaataatttttttatccacggctttctttttcttctgagggtaactgaatgcttcaaattctcctaaatatacatgatagggtttgtcaaaactatgtgagatgttaaaggtgatcagtgtacttccaccccactaattatcttttccctcttaaatactatgctatttcatacataccttggctaactggatgattctcaagtttagaagcatcatttccccattcttttattcctcacagcatctaacatagtctagtcaaagatgtacaattcttttataatttgacttgaactccagcagaggctgggatgagtttcagactcatcctttctgtgtatacatcattaatatccacacaaatgcctacatttttgtaacgttttcaactttcttgtacttcaatataatcggtgaaacaacattttacacaatttaatgttacttaactcattattttggagaaggcaatggcaccccactccagtactcttgcgtggaaaatcccaaggagcctggtgggctgcagtccatggggtcgctatgggtcagacacgactgagagacttcactttcacttttcactttcctgcattggagaaggaaatggcaacccactccagtgttcttgcctggaatcccagggacaggggagcccggtgggctgccatctatgggtcacacagagtcggacacgactgaagtgacttagcagcagcagcagcaactcattattttgccattatgtaagatcatgacaccctggatttatcataaacttctggaaataatttgctctgtggttttattttttgcaggcctgctctggtgtatttataatctgtatctttacaggtttcagatacagcaaagagtttcaccttctctgttgaggaaatcaaccatgtggcaaacattcagccagccccagtcattgtctacgattattatgaaaaaggtaggtgggcaacaaccatgctttaaaactactggaagttatatctgtatctaggattccctgaactacttaattttcgaaaatcatccttggtcttcatatctgggtttactttacatattggtttttttattccattttatatatatatatatataaacttcttactgggcctttttctattt

SEQ ID NO: 35027 - DNA, 1156 bp, Bovine  19866881894332
  misc_feature (1)..(1): n is a, c, g, or t
ngctgtggttgtagccctaatttaaatataacaaagatgctgctgctgctgctgctaagtcgcttcagtcatgtctgactcttagcgaccccatggtctgcagcctaccaggctcctccgtccctgggattttccaggcaagagtactggaatggggtgccactgccttctatgtttgggattaagaagcagtacataaactgagagacatatccccaaaatagatcagattagggcaatttcctccaaatctaaagtttaggaagacaagttgccaacgtctggaagaattagagacagaaatagtagaagtgactgaacaatgactcataggccctgtcagcttggctaaacaagatagctctgtcatcaactttgaaatttctataccagacacagaggcaagaaattcatcttccaatcttgaccagatttttccccccgccccgaagatcctttcaggtaaacatgtttttgttcagagataccagtagttccaacagaaagagaaactaaagtccctacttagaaaatccttctcttggacatttgcctagagccaaatggaataacaaatgctgtgccaactataaattgacacttgccatctacctcaacaaggtttaaatcatgagccactgcagctgctgaccttcaacaccccctggaaggaattcagggtggagatccagaaaaaggcactctgtgttctgggtgaaactggcagaacaggtcaggagaagattttatgacccccattcttgcatctccttgtatttagaaagacactaaaatcattaatggtgacatctgttcttcgtgactagcagcaagcatctgccataatgtgtgcttgactgcacacactcctcttctctaaaatcatacataacactgatcttcaccccctacctctttgaagcagtttctcagagctacctgaactgctgcctcctaggctatagtcctcattttgccccaaatagaacttaagtcacaactctcatgttgcgtaatttttttcagttgacaacaggatttaccttccaacctgatagatacaaacaaaacagacaaaatgcacgaatcagcagtttttaaaacatggctatcaaatataaagaaggacaggatccatagagtggaaacaaacaag

SEQ ID NO: 35028 - DNA, 1164 bp, Bovine  19866880342177
  misc_feature (1)..(1): n is a, c, g, or t
ngggaagcctggtgggctgccgtctatggggtcgcacagagtcagacatgactgaagcgacttagcagcagcagcagcagcatgaacactagatgcaggaggaggggggtttggtagcatttgtcaagagcaacatagggcactgaaaagtcagtttcttaatcatgaaacagcaaacataatattatccatttggcaacaacatcacaattgcccaaaacagtgctgaaatacgttgtacttgtagatttagccacaaaatgtaacttggttaactgaatttgttatgggaaaatgatataaaagatttgccatgctgagacatttctagatatcgctgactcatgccatgagggagaggtggctggacttacacatggggagaccacacagatacactgaggtgactaatgatgctaaacaagactattccctgcagattctttggcttcctgtctgttctttcatactattccacattgcgtttaaaatttgtgatctgatattcacaaggagttcaggtcagctcagagcattcaagttgcaaagcttatataacaaaacatacataatggcagttgcctagggttcctaatgactatgttctgggggctccatccaaatgttatgaatgcactgttgtgagaacagttaccaaagtctgtgattccccatggcctagcagcaccagaaaaggacaggctccatttgatgcagttcagataatatacttcatcatgatgtgtcctgtcaagagatatgtgcttgcagagtataggaaacttgagtaattttggtggaatttattttggagtgatttattccatcactagtcttgtagaagaagtgacttcatgtttagcattcagcccttcattttgtatgagtcccagaatatcaacagacgagctgaatgagtgcatcctaaactcaatactttttgaatggacaaaaagaaaaaaaaataataataacaaaacaggaaatgggaaaggggggaaaataaaagctccatgctgggtctgattactcattttccatattggtgtttctaagcatcagagtagtcagtgttccatttccatcatttttgctattttttaaaaaatgaacttgatgaacaaaaaaacaaataaacatgactttcagttcagtttagttcag

SEQ ID NO: 35029 - DNA, 1915 bp, Bovine  19866880370232
  misc_feature (1)..(1): n is a, c, g, or t
ncaatgaacacccaggactgatctcctttaggagctactggttggaactccttgcagtctaagggactctcaagaggcttctccaaaaccacaatcaaaagcatcagttcttcagcactcagttttctttatagtccaacactcacattcacacatggccactggaaaaatcaatgctttcagtggatggacctttgttgacaaggtaatgtctctgctttctaatgtgctgtctaggttggtcatagctttccttccaaggagcatgtgtcttttaatttcatggctgtagtcacccattctgcagtgattttgcagccccccaaaaataaagtctgtcactgtttccattgtttgcccatgaagtgatgggatcagatgccatgatcttagttttctgaatgctgagttttaagccaactttttcactctcctttttcactttcatcaagaggcttttgagttcctcttcactttctgccatagggtggtgttatctgcatatctgaggttattgatatttctcctggcaatcttgattccatcttgtgcttcttccagcccagcgtttctcatgatgtactctgcatataagttaaataagcagggtgacaaaatacagccttgatgtactcctttcccaatttagaaccagtctgttcttccacccagttctgttgctttaaaaaaaagaaaaagaaaaaagaaaatgtctaggttaaacttttaaaaattctcctcatattaaaatatatatttctataaattagggttgtgtctgcttacttatggagaaggcaatggcaaccccactccagtactcttgcctggaaaattccgtggacggaggagcccggtaggctgcagtccacagggtcgctaagagtcggacacgactgagtgatttcactttcacttttcactttcatgcattggagaaggaaatggcaacccactccagtgttcctgcctggagaatcccagggacggtggggcctggtaggctgctgtctatggggtcgcacagagtcggacatgactgaaggtgcttagcagcagcagcagctgcttacttacatcatgaaataaaatgagtacattataaagtgctatgtgaagacagtatttggttgtatgtgtatatatatataaaatatagataatatatgtatataatccttaaatatgaccaaatttggtggcatatggtgctctgcaacacatgtacacccgtggcagatgcatgttgatgtatggaaaaaccatacaatattgtaaagtaaaaaataataataataataaaatttttttttaattagagagcattttccttagtagtggacagtctttggtggacacactcattccatttattgcaagatgtttcctgtcaatcaggtgtatttcattagtgaaagagtgaatgaaacttgaacaattaaaagtaaactgtgttagtaaatatatactgtctgtgtattgtatgtatatttacaatttagagaggtaagtgtaaaaagaagggaggaaagagtaaataaagtgatagaatttagattctctacagaggagcaataacttgttcacactgtaagtgatttagagatgtggaattctgtggtgagcaaaaagagtaagtaattggcatagggaatttggagagcagacatgggacttcagacttttattacttattcattgcatttactcatttattcaacaaatgcataatgaataacactacagtatgtgcaaagtgcattgagaggtgctggaatataaataaatctatgtctagagtaaaacaggacagattgtaatggcataaagatctttggagaaatactaatgggggggggatccttgattacaactaaatattgataaataaaggaattagaaatggggaaaatat

SEQ ID NO: 35030 - DNA, 1463 bp, Bovine  19866880488710
  misc_feature (1)..(1): n is a, c, g, or t
nacctcccaaagcactgtcatgctgtatgaaaaagggttggttttcttctgttcaaattgcctctgactttatatacacatcattgtgtcatgatctctgctatgctttgagaataaaaggtcaatgccaaccaagaaagaaggaaagggagctagtcttaatttgaaataatttcagggccaagtttagaatattaaaatgttcagtcatgccatataaagtgaagttgctgaagttttacaaaaatgatacagataaaagaaaattctgagaagtgtggaagatatgtgaacatggacacgtgtgcttactgaggctgcaagcaacagattgcagtgttatagttagtgctttttaaccacattagaaataaatttaggcccaactgaaatcaagaatacacacatttaacataagcaaaataaatgtgaagaaatcagcaaaacagagaatcatttctttgtaagccacttgtgcccagtctccaacatgttcctcaaggaaaaccttagccccagtaactaaacggcatacatgtgtagaaacaaaacaagttagttcttaaatcttgacagcctcaatctaagccattatgagtgatttagcgctgacttcctaacttaatcctcaggtaagctacaattccattatacatatatccatatgttccatgatttgaaacttccagtgtaatatatcactactatgtataaaaattagactctccttagagtgctatgtctggatatcaggtcaaatgctttcattagttatataatttccatttatgtggaatgtatctaagcaacagtggggtggttggactaaataatttaaagttccttccaaacctggttttctgtgatgctaatggggatgatatttataaaccagaatgtacctaaaagaggttacttgactctcaatttagttattcatagcctaataggaatggaatcttacagagacaaattgtatgtgtaggacattttatttttataaactctattaacatacagtttcctttcattattaccctatgaaataaataatacatgtattacaagaatctctccatggagagcctctttgctgttcatatagatgactagtggcagacaagagagaaaactcatgtttcctaaataaaattttcatatttttcttttaaaatatgctgtcattcttatctatgctactttcagcagctttatggtctcagtcatctctctgtgacccactcagaggacagaagaccatgaggatggaaaattaggtgcaattagaataaaaaagaaactaggagttgaattctgtggctgtacccataaggcacaaagtgaaataatcagacatgggtcctctcaacatgatcatcagagtcccccaaactcagtgccctcctctgaaggtgaccttgaccagagagcagtatactgggttccaataccatctgcaggac

SEQ ID NO: 35031 - DNA, 1415 bp, Bovine  19866880492576
  misc_feature (1)..(1): n is a, c, g, or t
naaaataatacagtatcatgttttttaaatcggaatatacttgatttacagtatcatgttattttaaagaataacacagtgtctttatgcctatcagttcagttcagttcagtcactcagtcatgtttgagtcttcgtgaccccagggactacagcacaccaggcttccctgtccatcaccaaatcccagagcttacccaaactcatgcccatcaagtcggtgatgccatccaaccatctcatcctgtgtcatccccttctcctcttgtcttcagtctttcttagcatcagggtcttttccgatgagtcagttcttcccaccaggtagccaaagtatttgagcttcagcatcagttcttccaatgaatattcaggcctgatttccttgaggattgactggtttgatctccttgcagtccaagggactctcaagagtcttctccaacaccacagttcaaaagcatcaattcttcagcactcagctttctttatggtccaactctcacatctatacatgactactggaaaaaccatagctttgactagacacacctttgttggcaaggtaatgtctctgcttttcagtatgctatctaggttggtcatatcttttcttctaaggagcaagtgtcttttagtttcatggctgcagtcaccatcttcagtggttttggagccccccaaaatacagtctgtcactgtttccatagtttccccatctatttgccatgaagtgatgggactggatgcctatacaagaaaaaattattattattattactcattcttatccataaaaaaaatatttgtttcctgtcccctgaaatttgctcagttctactgaatttgagaagcagaaatgaaaagacaccctgactgttctacccataggactgatacacaatttctctggtgtgggtactttctggtttaaagcctgaaaaccctgagttattgtaattgaatttgagagtatagaaatctactctgtcacagtcactttcgatgaaaacgacaatttatgatgagtttcataaaacctgcttaattcaacatttatgagagacactgaagataaatggaaggtgtagaaatggaaaaatttctaatcagtcattttgtcaagaaaaagggactagagtgataggcataaaaaggagctggatgtgcatataaataatctactagagataaatgattaaatatttttataaattttaccaaaatattcttagttctataataaaaagcttagtttgtgtgcacccttgaaagattaagtgcatttgcctacatcatgcacctgagccagggcccaggttaggtttggggaaacaagttctacaaacgtatattccaacaagcgtaaaagaagctacaagaaagcgatttcacaagcctggtgcaaatgcctg

SEQ ID NO: 35032 - DNA, 2645 bp, Bovine  19866880506349
  misc_feature (1)..(1): n is a, c, g, or t
naactgaacgacagcatagcacattatgaagggtattttaaagaacacaaatggacagccagataaacaggtgaacagcacagggactggaagagccccaagaacaggagcctctattgtcatggagttggggtataataccctcctagatgtggatgttaccaacctgccagcttttcagactctccctggatcaggaagatgccctggagaaggaaatggcaccccactccagtattcttgcctggagaatcccatagacggaggagcctggtaggctacagtccacggggtcgcaaagagtcggacatgactgagtgacttcacttcacatagcatgattgataattataccaatctccatttcttccccagaggatagagggtgaagcttaaagttctaagcttctaatcaggcttagcatttctggggaccagcttccatcatgaagctatccaggagcccaccaagtgtttcttcattagaacaaaagacattcctaccaccacgcaaattccaaggaatttaggagatatatgttaggaactgggttaaagatcaaatgttagaacaaacgttgcttttagcacttttaccactttggaaattacaaaggatttaaaagctctggctaggagctgaggaagaacaccaaagtatatgtttcttattatatcaccatatcacggtgaatatatatttgtatatttccaaaccataaatcttcttgtatctctatctccgtaactggacatttattaactcaaactctccgctgacttctatgctactcttattggttagcaagatgcccctggagtctttgtgcctgagcttttcccaaaactgtgattccctccatgtgtaacttagaacaaattacataacctgtctgaaatttcagtcttgccatctgtaaaattgggatggcagttacactgacctcataggattgctgggagatgttgagcgcctactacaggactggcatcatataaatagtcattgactattaggtcttaaagcacacaccatacacatacatatatatgttattaagcagtagaaaaggaaggacattctgccatttgtaataacaagaatgacccttaagaatattatgctaagtgaaataaatcagagaaatataaatacagtatgatctcacttttatgtaaaacctgaaagcacttagctcacagaaacagagaagaatggtggttgcaggggctgtgaggtgatgctggtcaatgagtacagatttacagttataagatgaataaggtctgggaatctaatgagtagtgtgatgactacaggtaacaatattgtattgtgcacttgaaactgccctgagactagagctttaatgttctcaccataacaacagcaaagcaacaaaagtgagattatgcgaactaaaagatgtgttaactaagctcattgtggtaaatatttcacaatagatacatatatcaaattatcacattattcacctttaacttgcacaatgatatatgttaattatatctatataaagctggaaaaataaatattaactcctattactctcctttgcaaagagttgactcattggaaaagactctgatgctgggagggattgggggcagaaggagaaggggacgacagaggatgagatggctggatggcatcactgactcgatggacgtgagtctgagtgaactccaggagttggtgatggacagggaggcctggcgtgctgcgattcatggggtcgcaaagagttggacacgactgagcgactgaactgaactgaactgaatcttcttttggttttaccatttgtatattcatttaatttcctcatctatattgtaaatgtctaaagaacaaagattttatcttgcctgactttgttttctaatgactattcccttatacaatgagtagtacttagaaatacacatgggctttgtggtcagaaagatatgtgttcatgtgtgaattcacatctaggttccaatacttgagaacaagtttcattgtttcatgtgtatatttcaagtaataaaaacaccaagatcataggtactcctggttttctataatgtaaaaatcatgaagaacttagctcagtatctgtcacatagtattaagacaatattaatggtagttttcttattgttatcacttggaaaacgaaacatcacacaaaaacttatgtaagttttgaaaattaacgaactgtctaaaatctactaaaattctttcccatgcatacagcgaaattatttgcactttttataaatggggcagagtcttattctggagtctacagcattttagagacagcaaattttcccctcagtcaagcagatcagaaaatggagatgtaggaaggagaattagtttgtaaaagagagcacaaatctttaatgatgctatattgtgacctcttttaatatttcttggccttcatttcttccaaaggtaatctctagccaacatgaaagtaataatttggaaaagatttctaacttaccttatctgctcttttatgttttttatccttctctttcttttcctcatatctgggacaggagatctagctcatcatttaatttgagcttcaaaatagccctgtattgtatataggacaggt

SEQ ID NO: 35033 - DNA, 1098 bp, Bovine  19866880601553
  misc_feature (1)..(1): n is a, c, g, or t
naatagaggatcaattcaaaagaagagatctgaagataggcaagggtatgcgttgactcctacaagtcattatcatgcttgttccccagaatcttaattacatcttccaggagttcatgatttatttcagagagaataataaggtttccttccaagtcgttaggcttggaatctaacttttaggccttcattttctcttttatctttggcgtatggaacagagcttggattaaagagggagaaatggataatgatggcaagcctgaattagtggatatggagctgcttagattttaagagcagggtctcagggaccaggctgggttcaagtttactttagtcccatactgtgtatgagaactcatttaattttgggacctcattactcccctccgtaaaatgggattaaaatgataagattctcttctcatttatgtaatacttctcaaaccatagcaaccagcacaaaaataatgtcatggtccttatgtgagttttagatgtttgtgagaaccgggatttttttggtttggggttcttttttaatatttatttatttggctgcatcaggtcttggttgcggcatgcaggatctagttctctaaccagggatacaacctgggtgtcctgcattgggaacatggagtcttagccactggaccaccagggaagtcctaagaagtattttttaaatagactataagagtcagaaatattcttcccatgagaaagggggatacctgtttcctgtcatgtaactcgtaaactcttactttattaagcagcatgttaatttcccaaattaattcaacctattgattcagtgacaatatgagggtgacttaaatttagtctttctgcaaatatatctgattccataggtttgtctgtaaattatctatttgaacatacaattgttgaaagataaggctcaataattaaaattatattttatatgccttaatttcttctaacaataacttgcatagaaagtcacttgcttcatgttcacagactggatccaaactgaaaaattaatcagttgtttaggaaaagtgccaggagtatatatattgatctttaatatggaaaattgtg

SEQ ID NO: 35034 - DNA, 1240 bp, Bovine  19866880610355
  misc_feature (1)..(1): n is a, c, g, or t
ntgaatgtttttcatatcagaatcaagactgatggcatcttttgtatgattaatttcttttcctctagaaaagtcatctttctttattctctgtgcccagagtgtttttttttaaataggttttgaatcacaacaaatctcacctgaaaacaatgaggggctaaaaagcagaaggaaataaacaatgtaagaatcaagctacacaattaagcaccaaagaagggcaggaatgggcacgttttctgagtgtttgtgttttaccacacttagctggttctgtagcaaaggccaacctcttattgttgtggtagtaaactttttatgtaggacatatatgacaagagcaatcatttttgctttcactgctaagcaatattttagaataagatttacagaatggccataaagaaaaacgtaaaccttcctctctccaataacatattgctgcttattggtacaatatactagctggagaatttttattttctagaaatattttcacatattttccatcacttttggggatgattctcttctgaacatttttggtgtgatttaatgagacagtagaatcaccatgattaggatggcttaacgtagaggattttttgctggtatgtatgaaaaatattctcagaagtccatcatctttttgaacttaatactgtacatggtgaatgtgtctttttagaagtgagtatatgggtgttctttggaataactgatgctaaagctgaaactccaatactttgggcacctcatgagaagcattgactcatcggaaaagactctgatgctgggagggattgggggcaggaggagaaggggatgacagaggatgagatggctggatggcatcaccgattcaatggacatgagtttgagtgaactccgggagttggtgatggacagggaggcctggcctgctgcggttcatggggtcacaaagagtcggacatgagtgagcgactgaactgaactgaactgatattctaataaagcttattttatttggtatattccatacagggcttccctggtggctcagatgatgaagaaatcttcctacaatgcaggagactaggattcaatccctggggtcaggaagatcccctggagaagggaatggctacccactattacccagtatggttagtcccatcatgactggtattgttcttaatgttacctaaatgaggttgatcacattttaataataaccagattcctactcctttaa

SEQ ID NO: 35035 - DNA, 4204 bp, Bovine  19866880698260
  misc_feature (1)..(1): n is a, c, g, or t
ntcctgggagaaaaatcccctttacatagtgttttagagaatggtattttagactttagcctgttttgcaaagtgtagtaagcaggattgcaaggtggccccaagactcctgagcctctgctttattatatcatctaattgaatatggatggagctctgtgaatataatgagatctcactctatgctactggtaccttataggacaaagagatattatccacgttgacctgatctaatcaggcaagccctctaaaagcagagcagtttctccagctggctgtagagagatgtgcttctcttggcttggaaggaaatagccgtttgtgttctggactgtcctggatatgtgtcaaggactcaggtgtgaactctaggagcagagagtggtctttggttgatagctaacaggctaccaagaacctagttctacaacttcaagcgattaattctgccaccatccaagtcactgtgaaagaagtctcagagtctcaggtgaggtcacatccccagctgataccttgaggtcagccctggtgagaccctgagcagaggccacagccaaaacgtgcctggactcctgactcacagactctatgagagcctaaatttgtattactataaccagtgaatgtgtggtcatttgttatgcagctacagaaaattaatacataaataatttaaagttgctcagtcgtgtccaagtctttgcgaccccatggactatggggtccatggaattctccaggccagaatactggagtgggtagcctttcccttctccaggggatcttcctaacccagggattgaacccaggtcttccgcattgcaggtgtattcttgaccagctgagccacaagggaagcccatggaaaactagtatgccaagtgaaaaaaagtgcagtgatagtagctctgattagtaggtcttatttatcttacccactagatatgtccattttcactccatccagccctgagtggagtgtgggtttatcttctgacgtgtcatctctcgtgatgttgtacattttcactttccggcccccacagccatcctactgcctcagtgtctcctggggaagattttttctgcatcttctcctgcaaacttcctctaagctgatcctaggactgcaggctgctgttgatgctactggagcttgtacctcaggagctattgaaaaccagtacttctgtttgaagactttattttgaagttctatttatttctccatcatgttccgtcagggttcagaccttacttactcacccacctcaaaggtcatagttaggtcatcacttagtaactgagtgatttgaaagctcttctttcttgagtccgtggaccagcaaaaggccttcagtctcagtcttactacgacttcctgcctgcggcccagaatacagaatggtttctagggctcttagtgcagctgtcctaggactggcgctctcgttctgtgtggcaagtggagcaatgctattaaacattgtaaaaattgttgtgcctctcaaagcctacaaaatgcctttcttttgctcagtaaaatcctgaccgcaaccttgcctgaagatagcggtgtcttcttagtcaactgcagcagccagcccttgaggcttgaagctacccacctctcctggttggagactgtgctgctttcccacccccgcccccccaagcccctgcagtcaaccgcctcactgctgtcagacttggcttacctgcatctgtacttgtgcttaaggcctaggctgtgctttagttcctgtcaccgtgtacacagctactcacttgggccaaagctctgatgtctctcaggctggacaccccaacgctgacccctaggtgaggactttcgtattagtgagtttttgaggaaaagcttccagaaggggctggtagacaagtaaggatcagagtaggaaaggggaagcagccaagccgtgggcagatccaggccaagtcctggctgatcttgctcttgcagggaacttggggtgtaaattacccccttgaagtctgtcccatgttaactggggaaagctgggccttttttctcccatgcattcacctcttggctttgggttatgccatgtgatgtaattcccagccattttttgttttgtgcttagaaaggtgatccatctctaggatacaaggagaggtctttaatggaggttacaggtaagaggaatgaatgtttataaacacaaagcatatagaaactgggagttagatacacagggatacactgtcaaatggatataagcggatcttagtagaatatcagctattttccctaagtcctccaagttcaagataccacaagccccagacatgaatcctcgttctcaaggcatggctgtttaaccccctcttggccttacataaggtttatccatctattaatttttttttttaacccatactctaaagtttaagactcagccatcaaaatttatttcctttacccacacgataaaatgcaagactaaaagccacaggttttagtgtctgagagcaccatgtgcttcaccaactttgacactttgatgtgtccttcatagtacccgagatcgttccccgaagcctgaagacattgagagggtcctcaataaatagaaccccattcacctacttacattctgaaacagtggaaaataaagacgtctatggaagctaaatttttacatttgttactggcagaggccaagtcggagagcagttttagtgctgtgggctaagtgggcttgttaaggctgaaccctacgagtagcgcagtgtgtctgcactcttataagcaaagatggacagggtctcactgctcagactctcgttccagaaaagagcaggagaatgagcatggaatcataggatagcagtgtggaatgagctgagcatgttcaatttattgtttccaactggatcaggcacttgaatcactccacctctccgcgagcaggggaataagaaggtgcagtggtaggttagtaagactgtgtccacatagaaggagtggaggaaattgttttccccaaacacatatacatatgcttccattcaagtgcaaacacatgtgtttagaatctgtattagactttctgtacatgcagatgagaatatttccatttgccatcatcaaatcatgtaggaatcactattcaaatgtcacataacattttttttaattgttagatacatgagttctttattggacagcactgagagaatattgcctttcagtcattaagaattgatattgatgattactaaaatgcttaacagtttctttctactttggtttagaaagttacagggctgccgtgaggaatgtccctgagaacagtcaccaagtgggcttcaattagtaactcccagtttacagagaaagactgagaactacaagaactgttccaattttgctaatgcaaatattcctctagttattttccatagattgacaatttcaaggagagaaaatccagtaaattataaccaacaatgtactgaacccagctaattgttctctcatttgtattctcttagctcttttacatactcttaaatttcccatcaaattgtttttgtttagctgtgtgtctcctccatgcaactctaagcatcttgaaaacagatacccggaagcaattgtcaggctatcagcagaggaaaattatcttgtgaaaaaagcctgcaccctttatcttctcaagattcaaaagggtctacttcttggaagataggcaggtgccttctgtttcccaccaacaaggtcgctgtaggtgctgtatttcagattttgtcattgctctagtgcttatcatggtatgtgttgtacagcatgctgaattgatttctactaatacacatttatcagaggttcagaagccacttgaggtgctgtgttgctgaaggtccctttggcagagactgtaagtgccccctaatgtagattctgtttccttcttcatcctgctctccagtctgctctatgccctgagggattaactagtatggattggtctaatggactttcttgctgctcattcccccatttcagttgacaccagttagtcagttgatgacagagcatcagagggtgaggagaatgtagtcacagtggtcgttccatcatctgtatccatgtttttttttttttttttttttttaaattttattttatttttaaactttacataat

SEQ ID NO: 35036 - DNA, 763 bp, Bovine  19866880728767
  misc_feature (1)..(1): n is a, c, g, or t
ncctgggattctccaggcaagaatactggagtgggttgccatttccttcaccaatgcatgcatgcatgctaagtcgcctcagtcgtgtccgactctgtgcgaccctatggacagcaggcccaccaggcttctccctccacaggattctctaggcaagaatactggagtgggctgccatttatactaaagaataaagtacagaagactcaccatttagaaataaacaatgtcttatggaacattaagaaacctaacaataaatgactgtcctaatgactgcagtacaattacccactccattctcttctctggagacatattctgttccttacctatctactttattttaccctgaaatactcagctctcccaatacttcatcattccttccatagctgttcattgcacatttttcatgggtatcacttagagtgaatgtaatgggatatttttggacacttaacagaaatgggtaacataattgtatttactttgcaacttccactggaaattcatattcaaagcacatttcacaatattctgtcctacccataatccacaaagattggggcagtgaagctacaatagcaaagattcaacatttcagctattccctgtgatctatgaaacagtgggctacacaattctcttgcggcttgtgatagctatgtccctaaattaactacactggtgttttacaccagagattattaatgagggactatgtttatatacatttcaagtaggatgtacatataaagtt

SEQ ID NO: 35037 - DNA, 1823 bp, Bovine  19866880732058
  misc_feature (1)..(1): n is a, c, g, or t
ngtagaaacagtaagagaactagaattagaagtggggcttgaagatgtgactgagttgctgcaatctcgtgataaaactttaacaaatgaagagttgcttcttatggccaagaaaagaaagtcatttcttgagacaaaacctactcatggtaaagatgctgtaaagtttgttaaaacaacaataaaagatttagaatattacatactttaatatgtaatatttgagaactttgccttttcagaagatttcagaagattctctaatcctgaaggttctactgtgggtaaaatgctatcaaacagtactgactgctacaaaaaatcatccttgaaaggaaaagcccattgatgaggcaaacgtcgttgttgtcttattttaagaaattgctgcagtcataccagcctccaccaaccaccaccctgatcagtcaggaggcatcaacaccaaggcaagtccttcaccagccaaaagactgcagctccctgaagcctcatagatcggttagaattttttagcaataaggtatttatttatgtatttatttttggccacactgctcagctcgtgggatcttagctcaacaatcagggactaaacctgagttcgcggaacgaaagccccaggttgtaaccactgggccactagggaactccctgcaataatttttaattaaggttaagacgctcatttcaaaaaataaagttatttcacactcaataaactacagtctagtataaacgaatcttttatatgtactggaaagacaaaaacatcatgggattcaccttactgcaggatttgcttattgtggtctggactgaacctgcaatctctgaagttcgccgctagtggtactactgacaattgtctccaaaacgtagtaaattttatgtttactattttaattaatttcttccctttcacttttttcaaacaagaaacaattataataaaagctttaagagcaactgaccctttttgtggctcaatatatttaacggaaacaatacaaagaaatgcaaaacaaaaccaccacctgctcactctttcaaacattccattgcaaaatgtttctaataaaggagagaggtttccttttcaaaagaaacagcagcaatcatgtaagctattcttcagctggtatgatgaaatgtttgtttgtttgtttgtttccaagaagcaaatatgcagatctacagtataagagtattagatctggccttgatccaagtcaagaataaatatatctagaaattttaatctgtttgacataaatgttcactgatcctctttcactgaggatactgagtttcattcctttaacttctaattcaatattatgtcttctatttatttccctaacaatattacattttttattttcagaataaattcataataaacaagttgtcctgctgctttaccctgctttctttgattcttttcctttcacattacctgaggtgatataaagatttcttctgtcaattattttttcagcagttaatactctattataagcaagagtagtacatttattttagttaccctgtaggactctagtcctctgcttctagataggtttgctgtcttttttgagaccatctgtttaaggctctgggaattattgaaacagcttatatttgttttataccacattatatttcaacaacatatcttctgggaaatttataagaatgcttatttctctcactcctttattgtattaattcaattagttgaccttcagctggcatgcaatgaaggactgtcctagcttccaatgtgcaatgtgttaaatcaaatgggtcagagctatatt

SEQ ID NO: 35038 - DNA, 1012 bp, Bovine  19866880756866
  misc_feature (1)..(1): n is a, c, g, or t
nacaagggccagcatgaatgcagggtacataatcatagaagagttgatgctatttcagacaagggtgaggcagtggagatgatgagaagctgactgattacagcgatatatgtaaaaccaataggactcagcgagggaatggatgggagctatgcaagtaagcaacacattaagaatgagtcctgtgtttctggttgctcagcaggatagataggtaactggctaatcctgggaataaaataatcctagctgttgatatcactaaatccaatgtaactttttttttccttaaattacttttaaatcctggaattaaacccaagaacaaattgactaactgttttttgtcacctttagaaatgctgtttttctcctgacacagccccagatgctgccatcagctttgcattcctggcatctaccttaaatcttcagtatttttaaatttattgattgcagatttcagcaagaaacatatttctggaggtatttaaagataatatctgttgtacatgcgtatgaagtagatcaatcgcaatcacccactcactatctactgatcaatttgaatgctactgagatattgttatgaatttcttctcatttcatctcctacctttagacacactctgaatttgttctgggtttagtttgttatcataaacctaatgaaaacattttatctacatggagctgtcaaagagatgtctctgagtgttttgtttcaatatagcagtaggtaagaagtacttaactggatatatctttcttcataaacaaaaatggctctaaattatacatctgtaatttgagattcatttagtacataccttgtcatatttaagctgtgagtgatttatatattgttctagtcagattatgttttggataactaaagagtgtttttaaaaagctatgatagaaattcttgagaaaagagttaaacatatattttattttcctctccccaactccattttgctttcaaattaattatgcatatcactgccac

SEQ ID NO: 35039 - DNA, 3870 bp, Bovine  19866880777396
  misc_feature (1)..(1): n is a, c, g, or t
ntgtgaatttatggcataaagttgtttgcagtatcttcctttattatcattttaatatttgcaggatctgttgtgatactgttcatttcatgtcatgaaattgaactttgtgttttctctttttttcatgtgttgaattactggtgacttgtcaatgttattaatatagtcaaagaaacagtgttttactttgctgattttcactgttgttcgtgccttaaaatttcatttatttatggtcttttaaaaacattttctttgttacgttcattttgaacttcagttgctcctctatttttgcttcttaaagtaggctctcagatgattaattttgaatctttcttcttctctattgagacttaaaactatgagcgacttagcagtagcagcagcagcagtctggctatatttaactgttgatgtggttagagaagagtgtcatatgttggtatacgtgaattcactcctgattcctgttgaggaaggggacaaagtcaccattttaattctcaaaatttacttatttaatttattaactttgttgaaatataattgacaaacttgagatttttaaattaaagctgctgctgctgctaagtcgcttcagttgtgtctgactctgcgaccccatagaaggcagctcaccaggctcccctgtccctgggattctccaggcaagaacactggagttggttgccatttccttctccagtgcatggaagtgaaaagtgaaagtgaagtcgctcagtcgtgtccgactcttagcgaccccatggactgcagcctaccaggctcctctgtccatgggattttccaggcaagagtactggagtggggcgccattgccttggtagcccttttaaaaccagataaagcttttgcaactagtgattaaaaccttgtgatttttctcccctcccctgtcttttccagaacacatagaaaatgtaatgagtcctgtggccctttatggaagggccctacattttaacctttgtggagcatgctactttagccaactatgaattgttaatgattcctgatttcttgatggaatactctgagggttaatgaatgcacttgtaaatgaagttgcagcacgggcttgtagagaacagatgtccgtattccactttgtagaagaacggtactttgatttaactctagatgacctgccagcctttcatagaacatgatttcattaattcactactggaagtgatgcattgcatgagaatctcttttgtgtgtgatttgtaattttttatatgaatttccaacagtggagaaacctttgactgtggtatctggtagtttgatactgaattttattttatgtaatgttttctgtagtgtttttatagtttcaactttttcttttatattttacagcctctggttatagggctgtttgatattctacctctgttgataacttgcttaacacaaatgggaattttaagtatacagtcatttaggctttctttaagaggaagttcataaatagcattaactttaccttataaggaagttgctatttttgttgtttaatttgcaaattggtatggattcatcagaagtttattgtagtggaaatatggaaaatttaaataaatatatccttttcttaaaaaactctaaaatgaaacttccatcagttaggcattcattagtaaagttaacaaatgtgtgtaaaattcctgccttgggccaagcatgtttcaagattctgcaaactgcatatatattggtaacgtaattaatattaaaatatctaatcataggtttctgtcagtaacatccatcagtggttcaggagaaaacttttgcctgaaattaatgctagcatgtgaccaggtcttcagcttttgccaatgttataatgcttattttttgaaatactcaaccttcttttattgtaaagaaaggtgatgggttacaaatgctactaatcaagaatggaaatggcttttcttttttgggtgagtgggaacatatggatggtactgggaaggagtgatcatgaataatttagaataacttgagctcttgtatggtagtaaaaatgaaatatgcattggttaaatgagagagaactatgctatttgggtttgaggtcgttgcagtaacatacacgtaactataattcttttttttcccctccactgttgaaaatgtgtaatagaataagtaatgctgtgaagccaatcgaggaatgaagccagatgcattttaatgcaatcacttgggaagtttgagcagttagaaatcacaacttccaaagaaagaaattgctgatatcccttagattaacaatctgttttagtgaaggatctcttcatttttatagtgcatggaagcatttgatactcattcgatattagtttatccattcatctaaaacatctttggcatggctccctgcatggcttttctcctgactttaggtcatgaggacttgactttgtattctgactgtagtgactacattgttttctaggaagcagtgtgctttgttttccttcctgaatgaagtagggacacaataaacttccaggaggtgttcatttacgatactctcaggtatagtaggaagtctgcttacaatttctctcctgcttctccttagaaggccaaggatggtcactgagattcttcaggaattgttggttaatctgaaaagtaacatcaccttaaacatgggagttacgatttaaggctttctttgaatttgtttcattaaaaacatgaggatgagatggttagatagcatcacagactcaatggacatgaatttgagcaaactctgggaggtaggaaagcctggtgtgctgcagtctatggggtgacagtcggacacgacttagcaactaaacaacaacattaaaaacatacgcttgttaaaggagttccctggtggtccagtggttaggactccatgctttctttcgggggacctagattcaatccctggtcaggaactggaaggatcctgcaagctgcacaccgtggccaaaaaaacccacacacgctcacacacacacaaatgcaaaaaaccatacacttgtttaaagccagtactgtgtaggattgctttttatcttttctaaataggaaaaagcatcattaagcattgcagtatgttcccccaccccccgttacttttttacttagtataagtttatatcatcaggaaaaaaatttttaaagaataagtacagtttaaggatgtcagtttaaggatgttttgatagaataatgtatgattagcttaatttttatctcagccattaaaaggccttttttgttttacaataaatgattaatgtaatttcaatttctatagatttatgaaattgtttcctccttgcttgtggctaggttaatgattattggttttgcacattcagaatatggtgttttgtctggttaggtttcggggataaatttttcttgttctattcaactagacatattgtatgtgatattgaatttttttcttttttaaatgggaaggatgaggctaggcaggttagctctccagcttctttcattttattgatggaaatattggaagcttatttgatatgcttagatcagagacctgtgtttattttcacatacctggatggcaggataatttctgaagacacagatttgtgtgtgatattcctactgttcctttgcattgcctctcagggaaaatgtcagattctggcaatgagggaaggacgaaaagaagagagaagagaggagggaggggaatgagttgataacaagcaggagaaggaagcttaacattagaaggaggtggaggtctggggtgttggaaggagcggtgcctgggccagtcctgcacaggggtagagt

SEQ ID NO: 35040 - DNA, 1512 bp, Bovine  19866880818193
  misc_feature (1)..(1): n is a, c, g, or t
ngttgtcatggggaaaatttatgctaaaaatcctgggttgagggagacattttattaataagttatctactgaaaaacctggagctatagatttttaggaaacattttcagtgtatacattaaaacaaatttaataatatgagaagttagttaccattaaaaaatgtgaacttgataaagtcacaatcaagatactatggataaaaaagatacactaaagaaatgaatattacctgttgacattaaaccattaacatattagtgtttttgagaagggatacaaattcagtgtgaaagtcacagacagcattgttaatcaaaatctgcacataaagaaagagaaactgattaatgttcacagtaggaaatttctatcaatagctttaccaaatcaaataactgaagttataaaataataaattttataaagtactatcctttgagattttgaaataaaacactcttaagcatgatctataagccaatagaattttttaaaagatataatgaactcttgaatagcatatttcttccctctatcacagaaaaattagggcagaaaattcacaaaacaaaaagaataatgtgtttcacaaatcaaatcatttaaaaactgacaaacaggagatgatttaccaaactagaataataaaaagatgtacaggggaagtattatatgcttataaaagctattttgatttttaaagtcgtaactcccaaattgaacaaaaataaaggaaaggaggaagaagagaaaaatcctccaaaacagatcattactctgaaaattacaggatttcaggtgtgattttaaagacatttttcaacatttgcaaaatagaatcacagcagtataatggatgagcattaaaccagaactcaattaaatagatgctcctgtagaagaagaaattatagaatatttttagcatgctgcagcaaggaaatacaacagtctaaaaaattatggtacacgatatactacgaaacaccatacacatataatagtgccttatcctaaattaaatgcttgagttcaattccagccttttcacaagccatttggtttcaactttaaatacaccacccaagcagctgcttccttcaccaggcaacactttctttcacagacaagccataacagttctactatagacaggaaattgctttcagagtccttaagaagaagtgattaaaaaaaaaaaaatcccaacagagtagcaataaaggaacactcctacagtgaccaaagagggaaagtaaaacaaaacaacaggcagatgatttctaagcaagaacttctctgaggttcaaggaaataaaactgatctatccagagaaatatccaatctactcctactgtatgaacagaaaaaaatccatatgaaagaatgccagttaatccaatggccaaatgggctgatgatattgccagctttgagaaatttccaagtttctgggatactgcattcgacaagacaggatttcatatgcatatgtacatatattaca

SEQ ID NO: 35041 - DNA, 1771 bp, Bovine  19866880821523
  misc_feature (1)..(1): n is a, c, g, or t
nttagcttttgggttttggtcctcggtaaagggggcagaaaaaaaaaaaaaaaagatgttgctacagagtgtgtaaatcccatgccatctggttatgctgctgacagttctcacctctgtcacaccaggatttacaaagcaatttttaggatgaagttgcttcaacctccactacttgttgtttggcatctcacactctccttttcacatctcagaggctgtgttgttgtaagtggatggcagtgtccagggctgttattggaagaagaatattcacagagcacagacatgggaaactgaatcagacaccaaagtcatctgcttatgaaacactgcgaaacactcaggtctattatttactcagaataaatctcattagccatccttggacaaaaatcaagtctttgttcacatgtgtgtatgcaataacttgattaacctatgaattcctgtctaattagtacttatcatgaaggactcataatccagtgttgtatctttatttatactaggatatttttttgtatgcatttgaatttctaatgatcttgtagcgaaatcagtaactgactggtaattatactaattcccagcttttcacactactggtaactagaataataattaagccacagataatccctggctggtaccttttttttggcttgctaattcctgatcttccaactaattttcaagagtatacaaatccttttcaccttaaagaagtactggattattctgcagagatgatgatgaataggaagtggcagaaaggtcacagaatgcgtgagagataagactcttgtcaaatgacagtagcctgcattgcttaggaattatgcggacccccaagaaacatttctaattgtcacttatcatgaaacaatttttctttcttatggcatcaaataaatgggaactgctcttcagcaaagcagccccaggtggctgctactttcctataaattatctgcatacatgaattaattaagggagtaggaggaacatatgcagtgtccatactctgggactcctgttgaggctctctccttgcatatctatctcccttgtcacttatccggttcctctccatacttttaatcaaaagaatctcctagaagttgatttatttccaccaagagcaagcatactgcttagcaactaagtagcactcagtaaatagagggtactattatttgttgttgttattattactgtcattacttctattattattttgcccctgtgtctactctgtcaggctattagagcatatgacagatgaataaaatatgagggtatcttcagtaatcagaaagtaacaatgacattaaacatttctgaccaatgaaaagagaccaagtagaatggaagaaacatggcaaagtgaataaaaataacacagtggcgaagacagaaaagggaaactcatgtcctggagggacgatgggactttgtgggaagaagacaaaataggtcacagcagggcggccagtgccccacatcacgcctgctgataaaccctgaggtcatggctttggctgctctatgctgcctcatatcctcccctgaattagaagtctcccagtccacaagaaaatgaagaagggcagataaagttgctgtggtcagagttcaccatgatctggccgtgtctgcacctgtcttcttggtgcccagggcatatcaactgttaaatgcgtctatgtctagaaacaggatttccagtacattctcaaaaagcatttatcatggccaaatctaagaa

SEQ ID NO: 35042 - DNA, 934 bp, Bovine  19866880829921
  misc_feature (1)..(1): n is a, c, g, or t
ngattctggaagccccttgctcagccggtcattagttttttaggtgatgcatctcggtttgtgggctagggtcctggtccagcctgggaggcaaggtgatagttgatgggaaaaggtccagacaatggctactcaccagcctacttaccaactgaaggccatactaagtcttttgtgtatacctggaaaatttctttctgtcttcaccttgcaacacatatacaatctgattatatcatatcatattttcttttcttccattttccgttcacttcagaggagcttcccctgaccttcctgatgaaggttattctcactgaggttttcattagaaactcctgtctcttcacattgtacctttcacattctctctcacagtggtcagtttacaaataaactttataagtaattgaatcatatgtcactcccgttagtttgtataatccaggagggcaggggtcatcagttaactgacagtcccatttccaccttcctccagaattgaaatttcaacacctaataggaggtaaatattattgaatgaatgctcaaaaagactttagaacttctttgagcatgtttatattttgcaaatgcagctgatatgcatgttacttgtgggatgcattgttgagtagattactttttttttttaagtggccatattcttaatgccttcttaaacaattttctgaaataaatttttaagtagtggtgggtgtatcccatgctgttatttttctttccagtagaaatgcttctcactcacttgatgtccagtgaaatgatttaatcttcagagctgatttattcattttccttaaacctcagcaagaaaaattacttaaaagcctacaataatgtacagggtgttgggaacattggaacagccagtggtggataatctgtggtcctaccttcagagacacttcag

SEQ ID NO: 35043 - DNA, 1875 bp, Bovine  19866880851839
  misc_feature (1)..(1): n is a, c, g, or t
nctttatcttgtgggagatatggctggagtgggtctggggattttctcaagcgagaagccagaagagagcagtgcggtttcaaacagcagcaccaccaggtccctgacaggcttgccgtttatgcctgcctcttgccttctgctgcagagtctccacaatggggtgatcaggactgatctccaggtgcttttggccatcatttagtccatggtcgagttgccccaaagtgcctgagctttcatgatgcactgcatgttggctgtccagctgtggtgctcatcacagtgcagcagggtgaagacatgagcctgtcttcaggatattgtcaccttctccaccttcttatccaagatctttttcgtgagtttgtagaggttctcaaacttggccttgctctcctccaccttcttcttctcctccttgtactcaggcagctccaggccctccttggtcatggagaccagactcttcccatcaaactccttgagctgctgcacacagtgctcatcaatggggctccatcacatacaccacctcaaagccctgcttccacatgcactccacaaaggaagagttcgcaacctgctctttgctctcaccagtgatgcaacagacggacttctgggtctccttcatgagagacatgtattctgagagagaagtcatctcatctccagactgggacgtgtgatagcacagcagctcagaaaggtatcgccggttagtggagtcctcacagattccaagcttcaggtttttagagaatgcctcatagaattccttatatttctccttgtcttctgccagctcagaaaagagttcaaggtacttcttaacaatgttcttatgaataaccttcagaattttgctctgctggagcacttctcaggagatgttcaggtgaaggtcttcagagtcaaccaccccacggaagaagttgagatattcaggaatcaactcatcacagctttccatgatggacacatggcggacatacagtttggtgttcttctttttgttctcgaagaggtcaaaaggagcccaatgagggatgaacagcagtgctctgaattctaattgaccttctacagagaagtgctttactgcaaagtgatcttcccagtaattggtaaaactcttgtagaactcaccatattcctccagggtgatgtcatcagggtctctggtccaaatgggcttggtcttgttcagttcttcctgagcaatgtacttctcctttatcttctttgtcttctttttcttatctttgccactatcatcctcctcatctgaacccacatcttcaatcttaggcttctcttcatcatctttatcttcctcttctttctcacctttctcttcttcagcctcatcatcactgatttccttctcacgttctttctccagctagaaggatcaaagatgacagtttcagagtgcaaaaaaaaaaaaacacaaaaaaaccccaaagtccatgcaattctctaaagcagcagttacctgcacttgagttaccagtccatactcacataaagtgtgatgggatagcctatgaactgagagtgcttcttcaccacttctttgacccgcctctcttccaagtactctgtctggtcttccttcaggtggagaatcactttggtaccgcggccaataggctcacctagaaaaaattaatcagaacaatataaaaaactaaataaacacagaactataactgctttacacatacaatactcaagatcttcattactgtttccccagaattctaatccagacaccttaacaggaaagccaacttaccatggtcagcacggacagtgaaggaacctccagcagaagactcccaagcatactgttcatcatcgttatgc

SEQ ID NO: 35044 - DNA, 1913 bp, Bovine  19866880861672
  misc_feature (1)..(1): n is a, c, g, or t
nttgaaaataattatttagattgtttctctcagtatgatgcactaaagaaagcacattggctgctggtgaattctaccaacttcagagtcatacatgcattccgtctaccactggtctacagtgccaaagataaaagagtagaattagaaatattggaaatatatgaaaaatgagaaaatactctcttaagccaaagagtgtgtagggaaagagttgctgagttattataaggagccacagttattcactagcattcacagcaaatagaccaaattttccttaagaagcaatgacagcgttatgctataaaaaccacctcaaattctttttttaggtaaagcacatttttttttttaattacataaacattctcagtaagtctaaaatgctggggattaaaggtgttttggttgaggtttttgcttatcctatttattctatttgaaaaaaaaaaatccagtcgtcttaataatccctttcattatatagctccctagagtttagagcacactattgtatacagtatctcatttatatttttgttactgtccacacagcatataattattgtagaattactgaaaaatacagaggagtaaaaagcagtataacagattataggtaatcctagtaacaagagaaatatttcaggaggcatattttattttaccttcttagtattccatcctcccgaaaggcccgctgttttttctgtagaaaattcaatctctctcttcattcaatctgtgtgggtatgacttatcctaattttcactcaaaaaagtatgtttgtcttagcctaactaatcaaatctcaaaatcattgattaagggaactatacatgaggcaagacaggtcaatgaattctgggacacttgaggccagcagttaaagatttgttttttccagctggtgatgctaacctagtaggcaacagatttacatgtgaccattttggccaacatacatggtgatcctaccagaagctaaagctaatacaaaggaggcagagtacaggtgaagactttgagttcatttaagcctttgaatccagttgtgctcaaatctcttttgaacttttctgtttggatgagctaagacagtctcttttttcttaagcctgtttgaatttcacttgcattacttacaactgaaagagctctaataatacataactgttcatgatttgcttattatttttcctgattatatttagatagatatattcagtttaataaacaacagaaaaacaacaaaatttggaagtattttgtctttatgcataaaaccatccagcacagcagacaaggcaaatattattaattcaattttacatatgaacaaacaaagaacaagggacaaagttaataggtctgatttggactggaatctatgactttttaatatctgatatttttaatattctttgacgttgcccttccaaatgtctcataagtctaagaatttatttcctgaatgttaataaagattacctcccatcttagagtaaaagtgaaggaagaaatcgtgagttcataaagaaccttatcagtcctcaaaatgagaaatctaaaatataatgagagctaggaccttcccttccactggagaagggaatggcaaaccacttcagtattcttgcctcgagaaccccatgaacagtatgaaaaggcaaaatgataggatactgaaagaggaactccccaggtcagtaggtgcccaaattactactggagataagtggaaaaataactccagaaagaatgaagggatggagccaaagcaaaaacaataccccagttgtggatgtgactggtgataaagcaaggtccgatgccgtaaagggaaatattgcataggaacctggaatgtcaggtccatgaatcaagggaattgggaagtagtcaaaca

SEQ ID NO: 35045 - DNA, 3582 bp, Bovine  19866880945181
  misc_feature (1)..(1): n is a, c, g, or t
ngcagcagcagcactgacttttaaacttatgaagatgtgtattgttgtcaactcctcaggatgggtatggacacatggcccatgtatttaacctacaatttcaaaatgctaaaaagagttaacagaaattgccaccaaaagaagggtggggtagattcttatattaggaatttcttatagaaaattgtatctatccataagcatcaaaagaactgatcttctttgaagaacttccaattatggcaggataatgaagatatttcactcatttttcttgtacctaatacttataccagtcacctttatctacttgcactttcattttttatgttaatatatgaatatttcaagtttgcagttgatgtagagaaatcactgaattgttttctttcttttatgagccttcatggaggcttcctgggtggctcagatgataaagaatttgcctgtagtgtgagagacccgggtttaatacctgggttgggaagatcccctggagaagagaatgtctatccactctagtattcttgcctggagaattccacagacagaggagcctggtgggctatagttgatgagggtgcaaagagttggatacggctgagtacctaaacatgcacacatgcaagatgctctgggggttaaaattcctccattgagaatacagttcagttcaatctctcagtcatgtccgactctttgtgaccccatggactgcagcatgccaggcctccctgtccatcaccaactcctggattttacccaaactcatgtccattgagtcggtgatgccatacaaccatctcatcctctgtcgtccccttctcctaatgccctcaatctttcccaacatcagggtcttttcaaatgagtcggctcttctcgtcaggtggccggagtattggagtttcagcttcagtatcagttcttccaatgaacacccagggctgatctcctttaggatggactagttggatctccttgcagtccaagggactctcaagagtcttctcccacaccacagctcaaaagcatcgattcatctgcactcagctttctttatagtctaactctcacatccacacatgactactggaaaaaccatagccttgactattcagacctttgtttgcaaagtaatgtctctgtattttaatatgctgtataggtcggtcataactttccttccaaggaataagcgtcttttaatttcaggaatgtaatcaccatctgcagtgattttggagcccagaaaaataaagtcagccactgtttccactgtttccccatctacttgccatgaagtgatgggaccagatgccattatcttagttttctgaatgttaagctttaagccaagttcttcactctcctctttcagtttcatcaagaggctctttagttcttccttttctgccagaagagtggtgttatctgcgtatctgaggttactgatctttctcccagcaatcttgattccagcttgtacttcatccagcccagcatttctcatgatgtactctgcatataagttaaataagcaggatgacaatatacagccttgatgtactcctttcctgatttggaaccagtccgttgttccatgtccagttcaaactgttgcttcctgacctgcatacagatttctcaggaggcaggtcaggtggtctggtattcccatctctttcagaattttccacaatttattgtgatccacacagtcaaaggctttggcatagtcaataaagcagaagtagatgtttttctggaactcccttgtttttttgatgatccagcatatgttggcaatttgatctctggttcctctgccttttcgaaaaccagcttgaacatcaggaagttcacggttcacatattgctgaagcctggcctggagaattttgagcattactttactagtgtgtgagatgagtgcaattgtgcggtcgtttgagcattctttggcattgcctttctttgggattggaatgaattcaagccctaggttatatgttccttcagagaatgggcagttttctttcatccctgtcttttctgctaatcaacatgaacccctttttttgtgatctttatctttgttctgtagtttgtgtatgggtcacttgcctacatttattgccctgaatgaatgagcagtttcacctccaaagcagaatacatttcacagtacatttggtcaacagtacattttcagcaaaatattagaaaacagtcctgcccagcttccctcagccactcatccctctttcctacaagtgtaagaagttggcatttttaatttaaagctatgatctaccaaaagatttgccattggagagctttaaaaattcctttttgagaagacttaattcagccctatttcctgaagaaaaaaaaatatatttctctttttgatgctgaaataccatctaaagattctccaaggaacttgaattgggttttcacagatttttgagagagttttttcccacagcctctagagaaaattgcctcccatttctttaagtaaaaggaaacagttagaggggagaagagtaattttttctattcaaatttttttgtgctgtgatgttacttggtacccctgtgagaaaacagctgctgctatcttatttctacttttgtatctgtttctaaattaatttatgatcaatgctgcctttgttttatgactaccactgaaagatgaattatgaattaatagggaactgctaatttcagtacaatcaagaacatctttaataagtgaggactgcccataaagaaccaatagatcattatggtaagcattaataacttacactaaactcaatgtgaccgatatataaaagaaatttattataagtatctagaaataaacttatgctcaccttagtatgagttatacttgttgacttgaatcaatatgataataagagatattttcaaggccttgggagcaggtttttatgtcggagactagagagtaaatttaattgacacttccctgatattcagacttgccttatctatatagccttcacatgaattttcaatttgattttgacttcaaatgggagttcccacaaatccaaacaccttgttgaagcagcagaaaaatgaattatgtggataacaatatttcatcaagcttgaaactccactgtgttatgtccaaagcagtaaaactgtgtaaataaattgctaagtcacagtgaaattgatgacttgtatctcatgttttaaaaccaagatgactagttaaaaagagagagagaaggaaaatcattcctttgacttggcacattttattgttattttcaagttcaaatgaatgttggagcaaaaagctatcctattagacctaaataccttcaaattaagttctgtgactctctctctctctctctggggtgtgtgtgtgtgtgtgtgtgtgtgtgtgtgtgcgtgtgtgcgcatgtgtgcattttcttggctgcttttttttttttaactgagattttcctactcaaagattaaaaaaaataataactaagtgattgcagtattactatgtaggaggagtaaagtttgccacgacac

SEQ ID NO: 35046 - DNA, 872 bp, Bovine  19866880979812
  misc_feature (1)..(1): n is a, c, g, or t
natcctcaaacacaaagtaaaatttaattagatcatgtaaacatgatcaaaaaagaaaatagaaacatctattttaaaatcaccttcaacaataaatcttaacgttaaaagaaacttcatgttaagcaagttaaactaaacaatctgttttcattaaatatagattgagatttattgaaggtaaatataaaagatttttgtattacaccctctcaagctttataattgctgaaatagttaagtaagagatggaaacattttgagataagaagacaaacaaatcaacatgatgcaataatgtactcactatttaaaaaaaatatatttaagcacattgatcagtaattggtgaaatggacacttatggcatttgaaccatctagaaaaactgaaaaattcctcactcttttaaagatccttgagctacaaaatccacaaagtaatgaaagctggagataagatgtgaagtcttttgggtatttttccaacaacaaatccaatattgaagtggaagatgccatatatgtcattgagtcttacaccctgaggtaaggtagctacgagcaaaaatgtacgtatgcataattctgaactcaagaagtaataaactggatcaggaaatggattttgagtagcaaattctctgggcagccaaagatgaaagacgttcctgtttacaaacagaggcaccagagcaaagaacggcttcactgaggcgagagctaattaaatcttgaggaaattgttccaaggcatggaagatggagagcgaatatcaaagggactcgtgtaagaggactgccctaaagatgaaggaaataaagcaaaatgaaaacttcttggaggaaaaaaaaaaaaaggaaaacaaagag

SEQ ID NO: 35047 - DNA, 1414 bp, Bovine  19866881027474
  misc_feature (1)..(1): n is a, c, g, or t
ngtttgatcgctgatctgggaagatccccacatgctgtggagcaagtaagtccacatgcacgactattgagcctatgctctagagactccaagccacaattgatgagtccacatgctgtgagtacttaaggcccacgcgccctagagcctttgctccacagcaagaaaagctactgcagtgagaaccctgcccactgagactagagaacagctggccctcgccgcaactagaaaaaagcctacgcacaacgaagaccacacacagccaaaaataagtagataaataaagaaaattagttttttaatgtgaataacctggactctaaaaataacctggcttttaatttttgctcctgttgtcttcaattaattttgacaaaattctgagtttcactattttcttagataactgtctatatacacaaagggcatgaggaatgttttttaaaaatggctaagtatgttttatataacaaagtacagaaaatatatttcttgcaaagagctaactgtgagagacattttcccccgtggaccaacagtcttttcttcagagtataggcaatgctgatctctgaattaaaacttaaactttcataataagtatataatttgaaatatctctaatagtttatatattaacaatgttccagagaaatttttcttacacacatctcagcaattaacctagagtagacagaatatacatagtattatatgtgactgaagtatgggtttatcactacactatgggcctggcagggttaaattttgaaaatttaaccttgcagaatttaagcttgcagaaaataatcaggattcatacttttttttttatattcctcttgtattcattgtgaacaaaatttcaaatacacacaacaaattcttcaaatatataaaaatgttgtaaatagtcatttttctaacacatcctcaaattagactcttggccataaatgggaactgttgttttcttttttcttttttaatgaaaaatgattataagggttaatctcacagacaacaggcttttgactcaagggtaatttaataaaggtattgctcgatttgccaacgatgcagtgaattttgcctgtgatgttagtcctatctttttatttaagaattgctgtcaagggacaactcataaaaatagaatctcattactactaatcttaataattcactcagcaagctcctatgtccaattctgcctgactcttgtccatgtcacaaaatgactttcttggtctgattttcataataaagctttaaccaagtcatctcccagttagattattctgcatacagaatgggatttaatgtatttagaatgagaatgatactactggaaggtgcactagtgattaaaagtcctacccacggttttatagatgatgaaacagaattt

SEQ ID NO: 35048 - DNA, 1464 bp, Bovine  19866881033801
  misc_feature (1)..(1): n is a, c, g, or t
ntgatggaaatttgggttgtttcctaaatacatttacttttaagagactgcaaataactgattcatgcattctttccaggttttacacttgcttccggtaggagacacagggttgagtgtccttactctatatcatctgcaactggaacccacttagaagtttcattttaatatgcaaccaggatactcattataagcataacagaaacttccctatagcattcgatttgaaggatagcatacatccaaatagatctctttcagctaccgctgtctagagatgctttgtttaaatgaaaatatctccccctttacacattgtatttgaagatgcaaaccaccttggaaagagtaatacaattttctttgtacagtattagccattgatattttaatgtgacagtttatggcttgtttttttctttataattagttgaaaagtgggacagtgagcaacttatgaataaataacaactcagtatgcaaaaacataatgtttccactccctctacttattgcctcccattatcctcaaataacatgtattaactgtctattttatttgagataattatatatgatcataaaaaatctttatgaaaagtatatttctatcaagagaaccccttaactcccatcaccatgctgaagacactcaaagcaacttttagattttccttaggccttatttaaattttcacaaaataaactcaaggcagaaattttccacagatgttccctgatgattatgaattggagattacactcttaggacagaagaaatgattgagcatcttagtaaatgcattctagttactagtgagcaaatagtcaattcaactgtagttcagttgctaagtcgtggccgactcttcctgaccacgtgaactgaaggacaccaggcttacttgtccttcactgtctcctggagttttctcaaacttatgtccattgagtccatgataccatccaaccatctcttcctctattgcccctttctctttctgtcctcaatctttcccagcatcagagtcttttccaatcagttggttctttgcatcaggtggccaaaatatctgagcttcagcttcagcatcaatctttccagtgaatattcagggttgatttccctttaggactgactggtttgatctcaatccaattacctaggtcctaagaagtttaaattaagcctctccaaatgtggggaaggttttaattgctaataagataattgtacctggtttcaaagtagaggctatagttttcttttttaaaaaactcatttttgggaaatagagcaattccctgagaggaaggatgataaaaaaaacaataactgagtttccctcatggactacatccctcatggatggatttacaaattagcagtaaatttctaacttacataattaataataagcagatgtgtcctttttcttttttactttcatgtgttcccat

SEQ ID NO: 35049 - DNA, 1254 bp, Bovine  19866881087301
  misc_feature (1)..(1): n is a, c, g, or t
ncccaattctggcaccaaatttaatagaatatcacaaaacagattctaataagaaatgcatatattcaagtcattgtgttagtatattagttaggggacgtgtgtaggaattttaagtagtttctcctacgactttaagtaatttcttaaaacagaggggatagttaaaaaatttaccaatgatacaattactcatggagcacagtcaatgaactagagtaagtcaagaaatatttacacatatttgagcactccctatgtgccagacattatgtagactgaagacagaatggcagatagatgactgcagtgaataactcagcgactagtggttgcttaagcatttttaattctaccgttctccaccatccaccaatcattttgggcagcaagtataagtcccagaccacaaactaagaaatgtaagaattgggaatatttttagtttttagaacttaatgtctattataagattctgtttttctaaaagctaaaaaaattaatttcggtgaattcagggatctgcttttccttctctttctctctacatttgggtctataatctagtgagtttatgtaatatcagggcatattagcttagagtgggggtgaacacaagcttatttgggtcaacaccgtctattaacattggcatttgctgataagttctcatttgtatctggatgtggtcactggtccatgtggctattgaattcagccttgattccagctgtcaacatcttcagatccttctgctctctgtcacgtgcaggcacatggtaaatcatctcccactcctgcactactgaatgggacctactgcccacttcctgtgcttcccaaactctgctgtagccatgggaactctctgaggtcatcacagtctcatctgcctacacacatcttgcagaaatttctgctatattccccaccatgctgggtggaaaaatcaatatctggtcattttcagggctttatccagtatattaggatagtaactgagctcttttattttgagacagcaaataataatgtcacttaaataaaatagaagtttatttcttcctcacagaaaaatattggaaagtggtcctgtgctgatacaatgctttaaatgtgtcattatccaggtttctttcacctcattgctctacttcaacctatggtccagttttcactatttcttttcattatagtcaagagaaagaaggaaatgagggtatacttggtcacatgatcaaatttagctgcaca

SEQ ID NO: 35050 - DNA, 1492 bp, Bovine  19866881119667
  misc_feature (1)..(1): n is a, c, g, or t
nagaagctatttaaaatcttgccaaccatctgatctctttgttgattacatctgtttgtgaatttttttttcatgtcatattttttgtttcagcttgtcatgggtgagatgagagattaaaaatgcatgtgaacattcactaaacagaagttttgatacatcatgtgatgtttagaaacataaacaggtttcaattagtggaaaatacactttgaattcaaaggagtctttatttatctgttctttcatccaatcatccatatatttattcaataaagatatatccaacatattttaaggagccagatattagtgatctcatggtaaacaagataggcatggcatctgcttttggagcgataaggttagaaagaaattaacacaatttaatacactacattatatgcctctgtgtatgtctgtgagtaccttaatacaatacactctatatacctgtgtgtgtatatgcatgtgtgtactgagggtaaaataacatcagaatacttgtttaatgtcctgcctatgagagtataaaatgacattagaactaaaatttagtgaagagaagaagccagcctgcaaaaatttgggagaaaggctgtttcagtttggagaaggaacaagttaagaagctatgtcatgagtttggcatgcttgaggaatcaaaagaaatccaaagtgaataaagtagagagagggttgcaaaatgtggtataagatgaaagtggaaacataagcagaggttagattattgtgggtttatttctattaggagctcttcatttctggtattacagatctaaggattccaaagattcacaaaactctaaatttttagcatacatttggtttttgttatgcatctgtgcatttttacagtagtcttgactcaaggcagtctaagaattaagacatgatctgttaattttatagttttaatccagcattggcctaatgtgcttttaattaaaatgttgggtagacacatcataaattgaggattagcttccttcaaagtctcatgaccccttccattagtgactgtaatattttggtacttacacattctaatcctaaatggttcaactagctgttatttgaggttttttttttttttttttttcgtgcaggaaaaaggaagtatttcattaaatcatgccaagggttatagtgttaaacctgcttgagaagaaggataaaattggattaggagttgttttattcgtcttgaaatgtgcattacaccaacatattctgaaattggtacaataggcaatttttagcccttgataataactaaaaatgtaaacttcttacattctcatttttcacaagtgtttggcaactattgtatgagaacaatggaagcagatatatgattctatattcaatatcccaaagagatgatgaatgataacacttacagtttaaaagaaaaatggccctatttcaagtgtcctttctgggaagttctatggctgttttgggaaaa

SEQ ID NO: 35051 - DNA, 1066 bp, Bovine  19866881191308
  misc_feature (1)..(1): n is a, c, g, or t
nttggttctctataagataaaataaattagctaatctctgattaaaaattatctttcccacaaatgatgcaatagttttcatggaggaattttacaaacagggtgtttgacctaggatgtagttttctctgaaataagggtgtgtctgcatattctggatcactaatttcagttgttttcaaaataaattgttttgaccttacatgctttgtaggaccctagaattgtgtttgtttcctttttaattatattatcactttaagctgttggaaaccctctaaatcttcaaaatatgtgcatctaagccaattgttagttttttggatttattggcacttccacagttaacataaaattaataggaagccagatgtacataaaatatatatttggattttaaaaaatcatctaaatatgtcttggaatttgacaagaaaatatcattttccatttaacttaatgttcagaaattttactgtctacataactaaattttatataaaagggaatatattagcaaactcaagtactcttctatttttctcatttgttttcattctctacatggacaaattaactttaaacgtctataaatttatctttaccaagccctcatgggaacagattgttgtcctgtggttaatgctgcacatttcttactcttcatcaaggacctttctttaatgtcttatggtccagtgtgattatccatcatcacatttaaacctcagaaactgaactctagcaaattccctatatcattgttcgtcttgggcctggtggggtttgtcaattttatcacatatgaaggataactaacttgccatttatctcagagtagagaagataatttaaagaaaaactatggattaaattccaaagactctaagctcatttagaaaatagccagtctttcctcacttaaaccctggctagtttttaaatacatatgtattttagtatacacattttcatatgtgtattatatattatgtatatatatggactatatcttatatatatgtgggggggggggatatatatatggatatatggatatatatat

SEQ ID NO: 35052 - DNA, 1217 bp, Bovine  19866881218820
  misc_feature (1)..(1): n is a, c, g, or t
ntattttggttccctacttaaaaaaagattcaacttaatctattcttgaagctcaatcactacccaggatgagttctttaatcacaactttttaaactgcttatactaaaaaagggattcaaactgtccttattgtaaccaaattagttttcataaaagcttgtgctcaagataataggaaaccagtatttaaagaatttttttttttttttttaaccaatttacctgtaagccacaggtcattaatccatctagctaaattcgaatgctttaatcttataccccagatatttgaaacaagctgatttaggagcctaattaaacattacagtatttgtaagaaccattctaaaatgcatgacatgcttctctctcttagtatactgagtctgaggcacacaactctcatagcaaaagcattagttaacataatgtaataaactgatgctaagagatgctccagggagccatagggacagagttgaagtctctgtaatgaatgctcccaatgctccctcagcctcttgtgtccctcatcctgtcatatccacacagcccacaactctgctactcagcgagttatttttccagacgagcccactcttctaaccatgctcatggttaagctttcgtatcatctttctacggtgagggacaggaaagcctggtgtgctgcagtccatggggtcacaaagagttggacatgaattggtgatggaacaacaagaagaaatcagcattctatatttacttttaagcaacaggctgtggttacaaagcaagctcatctcctaaggataaactctgcaaaagatataagatcttttatgtttcttagactgaagggtatgctcctcagaagcagaagcttggcttctggggatatgaggctctggggcacacactgcacatcttccaagggtatctattttaccatgtggatacaccgtggggcaggaagcaaaaactgcaagaatattcaaagtaagatctgagacttcaaaggattcttgggtttatgtttgctttcccatggctatgtcccagaacccctaaggtctgtgctttttttcctctcctcttttcagaaagagagagagagagagagagagagagagagagagagacagatgaacattacaggcagaaagaatagccctaaatgctggagggtctgaggagtaaaggacagcaggtctaggcagaaggaaacactg

SEQ ID NO: 35053 - DNA, 1838 bp, Bovine  19866881267149
  misc_feature (1)..(1): n is a, c, g, or t
ncggatggtgactgcagcctgaaattaaaagacacttgctgcttggaagaaaagctatgacaaaataccagacagtgtattaaaaaggagagacatcactttgccaacaaaggttcatctagtcaaagctatggtttttccattagtcacgtatggatgtgagagttggaccataaagaaggctgagagccagagaactgatgcttttgaactgtggtgttggagaagacgcttgagagtcccttggactgcaaggagaccaaaccagtccatcctaaaggatattggtcctgaatattcattggaaggactgatgctgaagctgaagctccaatattttggctacctgatgcaaaaggctgacacactggaaaagactctgatgctgggaaagactgaaggcaggaggagaagcagacaacagaggatgagatggttaggtggcatcaccaactcgatggacatgagtttgagcaagcttcgggagttggtgatggacagggaagcctggtgtgctgcaaacagtggggttgcaaagagccggacacaactgagagactgaacataacaataactagagaaacaacccacatgtccatatccaactgagaatggataaacaaactatggaatatttatacagggatattattcacaataaagagaaatgaagtacggatgcagcctacaatgtctaagtgatagaagccagttataaaagaatacacattaactgaacccacttatatgaaatgtcctgaacagacaaatctacaaatataaaaaatgaaataggggttaccttaggttaagaagagagggaatatacttgaaggaaaatgcagattgactgctaatgagtatggatgcttttgcgggggagggcaatgaaagtattcacaattgattatggctatcattgcacaattctgtgaatatactgaaaatcactgaattttacaatttaaataggaaaattgtataatgtgaattacatttcaataaattaatttaaaaaaatagggttagaacatcaatccgagaattttggatttaattctgtacttttttgggctatacctggcaagccatcacttactaagcctcccctcgcatcactagttagctctccttattggttcttcttcttttcctaatcagtgtaataaaccactgctgggcaagaacggcatagtaattatctttgttgcatcagatccccaaatgccaattctggtattgttattcccaaagtcagctcaatacattttttgtttgttgaacgattaaaataaaatacttccaattgaggtgattctaggcttatagaataggactgttcctgaaaagcggaataaggttttaatgtaaatgtctaaatattcttgtgtgctcaatatttggaaaaaatcattatcaccatgtcactatctcggtcttagagtgaacagccatctgtctatttttatttttggaaatctgatttttggaagtcatactcatggccccttaaagcaggtacattttaaatcttcttctctttttcaagttgatttggttcactggtataacactggagactctacatggaaaaatgcaaatgtattacaaatgtttttgacatatagtgtcataatattctaagtgggtttaacttttacatttccattagctggtggtaataacataataaaaagtaacaaatgattggaacattcaaaaggaggataaacagctgtaaagctgtgtgagagtaattctgcaacagtttccatggatttgtgctatcagagaatcacatatagtcgaatgcagtaaactactattttttaatgttc

SEQ ID NO: 35054 - DNA, 1562 bp, Bovine  19866881404945
  misc_feature (1)..(1): n is a, c, g, or t
natgttacttaaataggttcaagtgtttccctgggaaagaattatcctcaggagtcagaagctttgcatatttgattatcagatatgcatttcctgtttggtgtctttctattttctacaaaacctcagatggatggaaacaataaatgtttgttcagcagcagctggtcccagactcttattctgtcttgaacatattttctttattcatcttcatttttcaacctctttcagtagcctttccttttctctaggcattacatgtgaaataaaaatgtgtagcacttaatgtgttcactctcacatttctcctgctgaattaagtacacttgtatttatacaaaaggccttaggatatccactgtgcaaactgacaatttaaataagaacctgagaaatgaagaaaaagatccttcaacattgcataacatcagagcaaatgcttcactttttaaaatatctttgggggggaggtctttaatgttgacttgagagaatcagttgcttcaaaagaattaatctagtgttctatgtgaaagaatctagagaaagaatgaaagaagacccatatccataaaacctactattgtaccaatactgttatcttgtactaagtgaaatgaattttttaacaggagcaacgacaccttcattccctgggattgtgccgcatttatcttaaaagctagaaggagcacatggaacctttcctgtgcttaacatctctctgacttccccttctgcagactctccctgacttccttctttcagttctactagttagtgctcatgtgattatattggtgtcctctggataattcaggctaccatagctgttttaaggtcaactgagcagtagcgttcattacatctgccaacgatactgtgccatgtacacattcacggaggtaacaccaggggcagttgtgggggctacaaatctgtctaccacagtttgtaacatacttagcacaccctgcttgaaatggaatgaatgttgactattggtgtttacagcaacagtgaagacactacattaccatgtgggaatctatgcattctaaacgaacatgctaccctgaagtaacttccaagggacatgagaaactatgattgtatttaagatgccttgttataaagttggacgatatcacagtatctcagtagcagcttcatttgcctgaaaatgaggaactaaaatcagagaggaagtattaatgtttataccttttctgaggtttagaagagctggaaactgtgaggactgatgattagacagcattctgctcacagggaaggggacttgtgttcctgaagggagcccttatgttagaaatcactagataaaacatgacaggaggcaccaggatggtgacagcaattttagctgtatacagcaaagaaagataagggatttctgcaagagcatgttgtctcccttaagagaaaaggacattccaaggacagtagtctaagagcagtgaaaaggaagcttactgagtgcaactgtcttatcagagtgaaaagacataaagcaaacaacagtatatgcatgtaatctg

SEQ ID NO: 35055 - DNA, 828 bp, Bovine  19866881461721
  misc_feature (1)..(1): n is a, c, g, or t
ncccttttgaccagccacacagttctcacagaggaaagcgggctgtctgaggcactgtttactggactgttatgctcccagggaaagttaatagaccaagtttaaaggctgtctgtaaagttggtggccttttgaagtaatcaaaacaaggggaaaagaaaaaaaataataatgtaccttaacaaggtctaaaatcgactttatcaggaatttccaatgggtgaaacaaacttgctgtgttttttgaactttgtctgcctctgaaccaatgaagctgagctctagaatgaattcattgattcctggaatcttaagcactcattcttctcctgcaatattgtcagatgcaatccatgacagaaaataaactgtttacttcctaggtcacagataagagtctgaagaaggatgagacaaatattttgtactttctcttcaagtcaccccctggtcccctcagcacccatcacaggtggcctcatgttactcctttatcaatttgctctttttccctcttctgtcttccatctcctttctacaacacttctggcttcctgatctattttgattctctgtcacccaacagacttaagtctttcatatattttatagtgaagcagctacaatagtaatgacacttctacaaataattgactgtattttataacataactttgatttgtttgaatgaaaaacaaagttattctattccctgttttaccagttaatccctcggatcagggaagaatgaacggatgagaagattctgagggaagaaagatccaattcatgcaacacatgagcattgctgtggcagatgcctgcctg

SEQ ID NO: 35056 - DNA, 1218 bp, Bovine  19866881773378
  misc_feature (1)..(1): n is a, c, g, or t
ntgaaaaaactgtagagctgacattcaactgatacatctagcatggctaaattggtgttaaagaattaaaatgctttggtagtgattcctgtgtaaccactgctacaaattctccaagtgagaagagtctcaccagtgccctcccatgagacctctgtgagacttggaaacttctccagaatctcgacttgatccatcaactaaaatatttacacctggcaaaacctaggtttccatgaccattttaatttgttctgattggtcaaacccactgatcatcacatccatcacttctggaaagacacaaaagacagtcactacaaaagcccaattctaaacttggtctatcttttctcaagaattaaaacctgagatatatcagcttagccatagcatgataagagataaagtaattttccattttatctcatcaaatgcttgttataaatttcaacttaataaaaaaaagaaaaggacaggcgatagtggagggtaattgtgaactattaattgaactggcaaacctaaagtgtcctgaaaaggatttaggattctataagggaccataataatcattttcccttcaactttagcttttaattatctttttgtcccaggcctcccatttgtattgagtgcttaagggtaatctgatgaataagaaacagggtaagaactatcttctggtaacagaaatggccaacatttattggatatttaccccatgttgggaattatgctcaatatattatatatgcatcatgcatttattcaaatgtcaacctatcagacatcagcctcataacacaattttgtaaggtagacagtatcatacttcttttacagaggagagagctgagcattgcagacatttgtaacttgccctgggttttttaaccactatggattggcatccaaatgtgagccatggtctccctgatgcagagtaagatctctaaaccactttgcagaactgtctccaaagcaaaagtcaagcttgactggttctccaagtttctagtcaacagctcagccaagagaaccaaaagaaaatattcagtttgtctggaagttcctgttaaaatgaaatgattaactcctttgaatttaagcaagcagtgcagcgatgattatctgtttttgctttaaaatttttccatatgtttcttttccatggcatatggtaacacgaattgagtttcccctccaatcttccag

SEQ ID NO: 35057 - DNA, 2083 bp, Bovine  19866880420338
  misc_feature (1)..(1): n is a, c, g, or t
natgaagcacaagctagaatcggttgctgggagaaatatcaataacctcagatatgcagatgacaccacgcttatggcagaaagtgaagaagaactaaagagcctcttgatgaaagtgaaaaaagagagtgaaaaagctagcttaaaactcaacattcaaaaagcgaagatcatggcatccagtcccatcacttcatggcagatagatgaggaaacaatggaaacagtgagagacttcatttttttagactccaaaatcactgcagatggtgactgcagccatgaatttaaaagacgcttgttccttggaagaaaagctctgaccaacctagatagcatattaaaaagcacagacatttctttgccaacaaaggtccgtctagtcaaagctatgtttttttccagtggtcatgtatggatgtgagagttggaccacaaagaaggctgagcacggaagaattgatgcttttgaactgtggtgttggagaagactcctgagagtcccttggactgcaaggagatcaaaccagtcagtcctaaaggaaatcagtcctgaatgttcattggaaggactgatgctgaagctgaaactccaatatcttggccacatgatgcgaagcactgactccttggaaaagaccctgatgctgggaaagattgaaggcaggaggagaagcagatgacagaggatgagatggttggatggcaccactgacttgatggacatgagtttgagcaagctctgtgagttggtgatggacagggaagcctggcatggctgcagttcatgggggtcacaaagagttggacatgattgagcaactcaactgaactgatttctgaaccccaacagggtgagacaatgtcagtgattccttttggctgcaataaaagttggaggcaaagtggagccctgcaaggccttaaaattagtttttatttttttttaaaaatcatttattttggttgaaggcaagttgctttacaatgttgtattggtttctgctacacatccacatgaatcagccataggtatacatatgctccctccctcttgaagctctctcccaccttccttcccatcctgcaaggctgtaacattgggaaacacttttttttttcagaagggagagaatctgcagcagaatgcccatgcctgtggtcaggccttgggctggcaggtcacggtctcatgtggctttctatgcttttcctcttaggaccattactcttttcagtgctgatttgggaatgaaattaaggtccagttatttcacgaatgccatcgacaaactcatcagcagcattaaaccacctgagcacccaaggacaaagacctctccatgagtctccgtcattggttcttatctttgcatggaaatcactaattgcatctgaattgctgatgtaaaaactcagtagaaatcaactaatggcattcatttgctgggtcaagaaagtagtgactatcttatgcttctatgaaatagcataatccttttagtctgcctgttccagaattcacctaatatttgtctgtaattcttgttagtaaaacagggggttttcatgaatacagaaagagaactacggcgtcaggcaaagtaacattttcctaagtgttggactgaatttcaggacataagttttaaattctaacaaacagacaattagaacaatcaaaatttagatagatctcaactgcctaaataaaaaaaaaatgctactgaataacatattaccaataaggcagaataggataatacaagcattatcatctagtctatcacaaaattttgtttagtaggtatctttttacctaactatccagtcttcatttcaaaggaaagtatgtcttttccttgtcatccaaactgtccttctacattgtacagctatacacctgaaagtaccctcttcaagagtctctatgcatcatgttttaaaatccactgtaaataagtctgtaaaataaatccttatgtacttgaacagaggtgccaatacaagtagacgctgagataatatcaaaggattgaagtaacatgttgaattaagaagtccgtaacaaactaggagggtg

SEQ ID NO: 35058 - DNA, 3013 bp, Bovine  19866880572556
  misc_feature (1)..(1): n is a, c, g, or t
nctcttttattgaacggtggccattatttcttttattcttttaacagatggagaaaatgcaggtttgtgtcccatgagttaaatcacctctaaaataatacaagcttgcacaaaatgatgcattctaccaatattagaataacacttaatatcaataaaggcaaaggcaaactttattcctttttacaacccttttagtgcaaataacctatatgagcattttctaaataattagaaaatgtctattataacatattacacatataatgactaatatggagttcttgaacatatttttattaatgctactatagatttccatcacatgcaataatgaatgaatgagtggtaggaaacacaaaaatatcctttacacattaagtatattaattggaaaaaacatttggataattattgaaatccaaattcatttttaatttctcttaaataatggagttaattcagcttgctacatctgcagcagccacgttataagattaaaagtgaaaggaaaaaaataaaacatgaaacaaaagaattcacatgaaaatgcacaataaggtcaagttcctcttcacagcacaagagaacgatgagacattttcatacctgaaacacgtctgcttcgttctttaataaactgatctccatctgctcatgcccttggaaatctttcagcagtacaacccgctgtgctcaagtcccgtataactttgtatttctctgctcataattaactaattattctctaatcaatagtgtagatcttgattttacaacataaattaggtaaatgacagaatggctgggggtcaatctcattttatttacaaagcccagcatgagcatccaacttcattgtatcttatgtacctgaacagcaatgaatcttattagcagacctacagaaagtcttaagactgagtactgggagaaagaggcctacatgtttattaaattaaaaaaaaaaaaaaaaaaaaagtagtatttgcaaagcatgtccagatcagaaatattttaaatcacaatccttagtgttatgtaaactggcaaagtgctgactcaggcaagtaggaaaaaatttctgccttcatatatcatgcaactctaaagctgagtctcttaaacaagttttaattgttgaaatgatttcagaaaacttaaagaaaaattaatgatgtcaatatatcattctgctgcagagtccttctgaatttcttgaaaagattttggtgaaatattaataaaaatattcccatactgagaaacaagtgaaacagtggtaagttttgtcaaataaagaatattaagtatttaaaaataatgatctctttaagtgtatgggagaaggcaatggcaccccactccagtactcttgcctggaaaatcccatggagagaggagcctggtgggctacagtccatggggtcgctaagagtcggacacgactgagcgacttcactttcacttttcactttcatgcattggaggaggaaatggcaacccactccagtgttcttcctggagaatcccagggatgggggagcctggtgggctgcagtccatggggtcgctaagagtcggacacaactgagtgacttcacccttcacttttaagtgtatgatgtaaaaacagggaaataggatagtgagtgtgaatattcttattatttatcatcaatctatttttactattaaaaacgtaaaatcagataaacaaacacatgaataatgatatataaatgataaaaaaatttcatttacaaacttaaaatggattaaggttaaggctaatctctgctttcatgttaaacataatcctaatttcaaattttaacaaagttactatggacaaaggctatgcgccttgattcatttctgtgcctaaaatacggctatctctgtaacaggtataaaataaacacctatttaattgaacttatgtataataaagaagttatactgcatgtgttgtaaatagaattaccacaatcccttttacctagaaataaatatttttgcaaatttaagggccttttaatgagattaaagccacattcaatcaatcgatgtcaagcacaacaccatgattcttttaaaaaatattatatacaaatggttgtcaaaggatgtccctggccagcagcagcatcatcacttgggaacttgttagaaaagcaaaatttctggcctcatcccagagccacttattcaggaactgcagggagaaggaggagggagtaaaatgtagaggactaaaagaagactggtggtatgtgagcagtctgcttttaaacaaattcttcctgtgattctgatacactacaaagtttcagaaccactgctatatactgtcatgttattcttcttgtatctccgagttatttattttaccccttgatatttcagtgttttctttcctttccctattagtgtgacaatgaaccatcattcacttgtttggctgttttctcttatatatgtctgtaaaatatgaacagtttagtgtatatccccgtaagtatacactaatatctcctttgaataacaactggaccaatttcagaaaagggttaattctgttccctggaaatataagagtgtctaggagattattaggaaaaagtgttttatttgtgatctatgaccaagattcttagggctagcaccaaatatggaacaggatatctaccacagaagtattaaagtaagacagagaatgaagacagtatgttattacaaacagaaaaaggtggaaaggattttgattgacagtgacatcaaaagcataagacttaattattttttcaaaatgaaaagtctaaaataaaatgaccactggtaatttctcatcatgtatcaaaggaggatcaggtcccaatgaattagccatctcttttttaaggaaatggaaatctgccatttctcttaaattcagcaacagtactcattaccaactttttcttaagacttatacagcaataacaggagtccttctcctaaggaaaaaaaa

SEQ ID NO: 35059 - DNA, 1953 bp, Bovine  19866880826402
  misc_feature (1)..(1): n is a, c, g, or t
ngacttcccatcttcttgagaatgctcacaaagcatctcttctcttctggaaagccttgctctatttttccctacttgcttaaacctacccattcttttacaaatccattggctttactggctaccactgtttcttttttttacaattatcttattgggtaatcctatactaccagttcctattatctgagaattttcagaaaactgattatttctacataagaaatttctgtggctttccagtcataatgatggagagttggcaggaagaaaggaggaaggaagaggggaaagtgaaggagggtaagagggagggaaaaaaaaaaaaggaaggaagaaagtgaaaaaaaaaaaggaaagcaaaagaaaggtacttgttcagtaaggcatactttaattatatcactaacaaaatgccaaatcatttttagttgaaaatatagggatttatatccacactgcatattattctaattagttcttttgatctatataatcatctgaagacaaagaactgttgaactcaatgtaaatcctcccattctgagacatttgcaagaaagagcagcagaattaaagtccgtcaggcaactaaatacaatcgacaatagagttcataaagagtgatggtctcatattaaagccagctgggaaaacgggcagattgagaaatttcaagttaaatttccatttctttagttgaaattgcaccttttatgaatattcctattatcccggggattcaggggaaccaaagtagtgtttagtcaaatactatctgatgtatcttttttcaaaagtgagctattaagagatatgtatgtgcaaaatacacttccaaggttttcggttttgttttttaaattattgtgtgatggggcccatatccaggcactccatatcaactctaaaacagagtccaatgctgtacaagtgttacaaactatattttagtaaattactttccttttctcagcatgtttccacagggcaaaaaagttttacgtgggacaactttatgacttcattcccaacagaaatgtgccctctcaaagttaacaggcattgatctttagaccagtgagcctataaaatcagctctaataatacacatttaagtgacaataaaaagtaggatactttctggttacatgtaataggtaaggtctatgtaattactaaacaaagctgccctgatttactgacatgtcatttctgaccaagagttactaggaagaaaaaaggagaggggaggacaaatggacaaaaaaaattaacttgaaagaataaaaacactgctttaaagatataatagaactaaatgatttgtgtatcacagttaacataaaatgtaaaggggtaatagtcatgttactaaaaaaaatttaacttatttattttgaaaacagattcctataatagaattcagtgcttggtcactcttcccctacattcccatcctaaactttggtttctttttaatgaaaaaaaggagtcagcaaaacaaaatgccaccattaaatcattctgcaacattttgtgtcaaaaatgtaatgggaaatgcacacatcaagggaaaggttacctgttcttccagaacatcttttcacttggttcacggctcatccttctacataaccgtgcaggcactgctgacggttttctctctcggtttaatgtggcatttgaaggattatggcattttcagaaaccacagtgcagtgattttagtggttatctgactgaaagtgatactgcgactcagaataactgcgctgtttatgtgcagtggtaaaagtcagctaccaactcttttcacattatcaacctagttcctgattgcgtattttcttaataatacacgaggtcagtctagaaactaaagccagaattagagaaaactccatttaaatgggagcctgctgtatacaggcatactatatttaattttaa

SEQ ID NO: 35060 - DNA, 858 bp, Bovine  19866880871138
  misc_feature (1)..(1): n is a, c, g, or t
nttcagctttctgcctttgctgtggatatccagaggccacaaagctatttaaactgtgtggattaaactacagtgttacttcttaaaagatcatcattaaggaaggagtgaaaatcacagtgccattggatataccaagtcaggactacttacatcgaaaccatcagccctgagaattctaggagatttagttgatacatgatgcattctgagtcttatgtgatcttttctgaaatctaccaactgataattcactttcatctctaaaaacacgatggtgggactgaccaatttaggatgcctgatgcaagcctctgtctgcagtgttaacccctagtaacattttcgcatgaagagtttaataccaaaatctctacactactatattcaaacataacaacatgcctactcaattgaatgatacacattattatgtcagattatatacttgttaataagcaattttaatggtggctaaaactaagctctaaactgagcagaaaacccattgagtaaattcagcatcttggtggttgataatagtttcattgagttgcatttcagaggcaaagacccttttgtaagacttcttgcctctctccaaagtgcgaatgctggacatgtactagtaccttagaagagtcctcaagttcagtattttacaatggttgttgtctggaaaactaatttgcttgtgttaatacagtacatttctactttccctaattttcaaactggttgcctggatctttttttgctatatggaaggcacatttttgcactatattagtgcagcatgataggcgcttaaccagtattgccatagcaactgcctcttttcatatgggatgaagacat

SEQ ID NO: 35061 - DNA, 1614 bp, Bovine  19866881286839
  misc_feature (1)..(1): n is a, c, g, or t
natcttttttattgtgaatcttaaaaaatttgtttttgaaagcaatgtttctagtcttctaattcccagtagtttatctgtaacttctaaagacatttaacactttaaatcttataattatatttatacgcgtgttatctatcctaccagaacataactttttaagggccacatttatgtctgattattttagtatgtctcaggtacctgggagagcatgtggcataccttctgaatattacacagatttttattcaacaaaatgaggttcttattgcagacttattggtaggtccatcaagacaaagagcatatctatataaataaaagagttactgtttcttatcaaatgttacacttcttatcaaatatttatacaaaatactgaaatggacattttctttcagattgtctttaaaatctcagagaactctggtgttcttcattctggaggagacagtttctttttaactaaaaactgttatctctatttcaagtcaatttaccattatcaataggcactttaaaatgttaacagaaatgttgactgacctagacagaaacaattctaagaaaggacagtattttaaacatgctgaagagacattctcttatgtgtcttattctaggtcttttctgcatatttgggtcatcactggaagaaatttatgtttcagacatccatttattgctcaaaaaaatagccttgggcatctaaggcaaaacttagaatctgtaccacttctgttgccattcagtaaaatgaaagtttaaaaaataatttcaatgacaacaaataggaaacaagctagcagttaagcactaccaggagtgcttttaaatctatctttggaaaaatcatgtgtaacattcaggttccggtcttaaaacaattatgaaaaaaacagtctctaagagtttgcaatgtagctggtaaggagagccaagacataaaaagatgaataacaatacaaagaaacatctaccaaatgtcaaatgaacagtctagcaaaatgcaaaagaattttagtttagtcctaaagactacttggaaaatcaggatttagctgaatatatcactaaacaaacaaacaaacatgacactctgatgatctctgtaaaagggagagggaagggagtgggcagaggggagagagacagtgagacaggaacagatatatctggaatattagcatgaggccagatgatagacagccttgaaagtccaggataaaactctgacgtctgtcagttttcaccgtccaccacagagcagtgggcaatgaagagcttctttgagttttgcaacttggaaggacaggtgacaagtgatctttcaaaggaatgattggaaaaaccttgtagggggacttggtgaaaacggaaacttagattttgaagagaaagatttttggaataaagaacaaaagtaagtgacatatgtatttttcttctgaaaagaaaagaaataagagattgaggtattttgaaagtaacaaaagactttctaaggttgggatgtgataagataaggttatggcccctttttccctcagtaaagtaagagacagagttatctagaataaaatgagggtgctgtaaataaaactgaga

SEQ ID NO: 35062 - DNA, 3022 bp, Bovine  19866881400872
  misc_feature (1)..(1): n is a, c, g, or t
ntgggccattcttcctctccttgtgctgcttgaggctacttatcctttttatggttcaccctgttcttttcacaggccagtatatcttggtgtggatgggggctgaattcagccctggtggaccccacattacatgataatatttgcaacatgcctagcatgaaatacttaatcaacgttaatttctttactcgttcgctctgccattcctccctttttcattcactctgctcagagcaaccgattactgtcaacaagctttagggcaagaagatttcgcccccaaacactagtcccttatcctcactgtcataaaatttcatagtttccactctaagtactgcctttacgtttttaacagaagtctgttctttgagtatccaccattaatcatagaatgatttactttctctcgtgtggctcaccctgcaggttgttctctattgaaattgaacgtgcttgttcctgtcctatgggtggaggttgcatcagtgtgggcatgaaacaggagtggtgttttgttctaatcccttcaacccaaagaacaacttcatggctgaggtcaagctgagcatggtgtcctccccctgggcagagacgtggctaccaggacactttctgtgtgacatcattaaagcctacccctgacagcagaaacccaaggttttccctttcctatttcatgccccctatggtgtgggcaggctaaaaaatcacactttaagcactgcaggaaatctgaaacatgaggacaagtatctttattttgtaggggggaaagcagattctcaaagagactaggtcagttttcccaaggtcatatggctagtgagtggagggggcgagtcccacgctggctgacggtggagtccatgtgctttcagtatacattccagtacctgtgatgccaggcatttgcttaagatcttgctaaggaaagtacaggctgcagatcagcatcactgatgtctcctgggaacttgatggctgtgtggaatctcaggtgccactccacaatgctgaatcaggatcttcctttttactaaggtccccaaatgatttgtatatgaatcaaatcaaagtttgagaagcatagacacagggcataataggtagctattaaataaaggcatgatgagtataaaagtaatttttcaaatatgtaggagaggtcaagcagttctgaaatcagtcacttgggagttctagaagaaaccaaaataatggatggaaggcaacatgcaaagagtaaaagagaagagcgttattcactgcaactgctgctgctaagttgcttcagtcgtgtccgactctgtgcaaccccacagacggcagcccaccaggctcccccgtccctgggattctccaggcaagaacactggagtgggttgccatttccttctccaatgcatgaaagtgaaaagtgaaagtgaagtcgctcagtcgtgtcccgtgtccgactcttcgtgaccccatggactgcagcctaccaggctcctctgtccatgggagtttccaggcaagagtactggagtggggtgccattgccttctccattcactgcaaagggtgctccatgtcagagcatcaatacaatggaactctaggcactaggattataggtagtttcactttttacagtttgcttatctataacttctaatttttctttaaggacatgaattacttgtattaatttttcaagtcaaggaaagtgaactttatcagttgtattcagtgtgaaattccccttctagagctgactgagaaaagattaggcagagacactcatttaaaaattgtcggatcaaacttttcctttatgcactaatcttttattcaacagaccatctagcacacaggttttgtgacaggaaatcgtggctagaaaaaggacatagccctacactcatggagtttactgagcggtcactagatgcttgtgaagcacacaggtcatttcccgttactctggcaaagtagaatgctgactttcttctctagtctatggccataccaccctgaatgcacttgaccttgtctgactttctgctctggatgtggtggtttttccattggaaggatccaaatggcacacgtgctaggcaagcataaaggaatccttgaactttcagctgggagagcctggtggacagatgcagagacgagaggcagttccacctgggctcccatcctggttctgtcagtgactcccatgtgaccttgggctaattacttagtctttcttatctctaggtgtgtgtactcagtcctgtctgactctttgtgaccccatggactgtacacctccaggctcctctgtccatggggattctccaggcaagaaaactggagaaatctgaaaactctgtgccttcctccgggggatctttatgacccagggatctagcctgcatctctgacatctcctgctttggtaggttaccgctagtaccacctgggaagccccagggaaccataataaacacttatcttgaagagatgatgaaaactatgtggtacaatgtagttttccataaagagtgttagtacccacattgctgtctcttggatacccctgtttatataagggctggattgagcctacctccttcctcctcaaatctttctctggtaggttttggaaaagcagaacttgagctctgtgtactcctgagttggcccataccacagcttgcttctctgctgtctcctcgcaattgctttccttgctatcatctcctgaaagcttcatgcactgggtacccctttcctcacacctcagagcatccttaatgtaaaatccttatgtctgacagatgttcactgatgatgtgagtaacataagggggagcccagcaacccagcacaatctgaatacatgacattgctctttaaaaaaaattcccaggtctcatggagattaatgatttctttctgtcatttttgtctgtagggtctgctgctgccatgctaccagtctttttgactaagaccctttcctatcaccccagccgcctga

SEQ ID NO: 35063 - DNA, 806 bp, Bovine  19866881854968
  misc_feature (1)..(1): n is a, c, g, or t
naaaacatgatggatgcgaatactgtttttccagcttaaaaaatacgtgtatgatttctttgagagcttgcttccaatacaaatattttattacaatgttttaatcttcattaagtactgaagatgtgctaggttctataattcataccaaaaataaagtggagggtactaataatataagaaccaggtttcattatttttaaattttaattcataagaggaacattacagtgttgcagtgggcatgtttcccaagttggtagaaattgttcagaccccacaaaattaatgtgataaaaatagcaaagtcttatttactctatagcctacttgggcactttgcaatttaagtaattatgatttaatgaaacatctaagaacctagaagtaaaaccctctggtttattttaccctctttaactttgaagcagatttgttttgttgggttttgtttttgctttaaattctctggagcttgggttgttttcccagagtgaattatttactaatatatatcgtcctcaaagtagaatatcttccatcaaacgattggcatccactaaacactagtaacctaagaattcagctgtgcagaaaagcaatctggagtgtctgggaatggactgcttgtttcacagagtaatcccgcctctgcaccaaagaaacgggggtgaggagccacattgttcttttgagtaacacatggtagagcccctccccgtggagcccctccctggctgtctcctttccctgctctgctccggaatgaaggtgggactgtaactcaaagtgtcttgctttctgct

SEQ ID NO: 35064 - DNA, 1381 bp, Bovine  19866880194900
  misc_feature (1)..(1): n is a, c, g, or t
nggtggtgtcatctgcatatctgaggttattgatatttctcctggcaatcttgattccagcttgtgcttcctcccagcccagcatttctcatgatgtattctgcatagaagttaaataagcaaggtgacaatatacagccttgacgtactccttttcctatttggaaccagtctgttgttccatgttcagttctaactgttgcttcctgacctgcatacaggtttctcaagaggcaggttaggtgatctggtattcctatctccttcagaattttccacggtttattgtgatccacacagtcaaaggctttggcatagtcattaaagcagaaatagatgtttttctgaaactctcttgctttttcgataatcctgactttctaggtatatccgaagtttctaggtatctggctaatattagcatcaatttaattaataatgcggtttgcctggtgttggatagcaaattgggaacctgacctactgactgaaattactattttaaagtatctgaaagtcaggggacacctaaaatgttggagttgagagttgttaccctttgtctaattccccattttctgggtgaagagattcaggtccagagggatgagatatatggctcagcttcactagctggtcaggttgggagcaaggactatgaacttgaagctcttagcctatagttaggtgctctttctgtttcactccttgcctctcagaaggtatattgtgaaatagcacataacttgagatttcacttgttctatttgggccaagtcctaaaaactcctttagttatttaaaccccaatgcttaagtcctaattaccattcagtaattactttacagtgaacagatgtgtgttattttctaagaaaaaagttgaaatgatctacacctgtaccttcagcagtgtttctccactgagaagtagcagtcagtgttaatgaatacgctcaagttgccaaggtctcagattcagctgatgctgatgtgtagtgcagtgtaagggtttctgttgccaacagatcaagtgttcaccaggctcacagcagctttgccaactgccaatcacccaattccactttctccctgaaaagtagcttttgtttttctgaagttaagtagtccattggtgaaatgagatagtgttttctcattggaaataatttccctggcagcataaagtaacaaaatagcaaagtgaatcagttgaagatgtgtttttgctgtgagtgacttaggtgtacacatgtaagattacagaagctgggatgaggttagcaacaactatatcagtggacttaatttttgttggtattgttggaatggactgattgccattctgtaatccttattgtgttcagaaatgagggtagaa

SEQ ID NO: 35065 - DNA, 2238 bp, Bovine  19866880366621
  misc_feature (1)..(1): n is a, c, g, or t
ncggagtgccagcaatgcatcaaatgtactgttaatttcactcacagcagaggttctgcgctttgatgaggaccacttaaatttaatagaggagcaagctgtcccatgcctattctaaaacaggaaagtgacccaaaagccaggagatagatttatcttacatgcccagaacgtgatgtgtgccttttggcacagagtagatttttggcaagaaacctataaggtgaaatggtaattgtggggacaggacctcccagggtgatatgcaggagcagacaggcttgcttctttcatacaaggctcagataaagaatggccctcatattagagagcctttaaacgtgtaaaatattatttcatccaagaaagtagccctctgtagacaccaaggctataaggagaattggagtgagcatgcaagctgccaaggcaattgtcagcaatggctgccagagaatcagatgccgtggctgcagagatgttatctgtggcttaccctagaagttcaaagagaagcagcaatgactgaaccaactctcaggggatcacaagagctatattatctataatttatagaactttaaagacaaatcttgatttttgagggggtatacaagcagcgatgtttcctctgtaagggaaattgccttagagcatgtgtactgcagatttctctgcagaagagcatgcaaattggaatgatgaaggaagcttactatgaactgtcttgattaggtaaattctggttatatttgagtcaagccatggcagtataagcgtaactctaaaggggaaaatcctagtaagttcactggaattctaacaactgtgtaaggattcccagccaccatatttaatgacgtgaacaatagaactgctcaacaaataatgtggaagcgtaggaagtattccatcagagtctacacagaaacttttgaaatgtttgtctccaaattgcagtcagagtaagggtgaattagacaaatgacagtggctagaactttgtgtcacatcaaaatgtaggactatattcatctagctagtatcctccagcattgtataaggactgatattacttcttatgtattatgattcatcaatttgttattaggtatagtggatgaattgacccatttattccagattgactcatttattcagtaagtaattattaagtgcatgctatgtatcaagactggatctagttgttgggaatttagaagtgaaagtaacagacaagtttctgctctataaactagaaaccacaccaggaggctttgagatggaaagaaaaaaacaaaatggggaagaaagacattaatggagattctttaaaaatttattttactgaagtatagttgatttacaatgttgttgttactttctgttttatagcaaagtgattcagttatacgtatatataatactttacatttgctaatttcaaactcccaattcaacccctcccaccttggcaacaagtccattatctctgtttctgttttgtgaataagtacacccgtgttgtattttagattccacatataagtgatatcatatggcatgtctttttttgacttccttcatttagtatgaaaatctctaagaacatctgcgctgctgcaaacagcatcatttcattccttcttatggttgaatagtattccattgcctaaatataccacatcttcatccattgatatgcaattttaaatagtgtgttcatggaatacctcaataaggtggtaacatttgaggaaagaaatgaagaactgagtcatgtggatatctgaggaaagaacaaactgtagatagcaccaagtatagaagtcctgatgctgctgtgtgccaggggagttcaaggagtagtaaaaatccagtatataaggctataatgaaataggtaaggggatgagaaacataaggggacagggacccagtgatagaccatggaggagattgtgaggaccttggttgttaccccaagtggatgcggaaccagtggagggttttgagcaaaggaaggaaatgattgatctcatgattttaaaacatcactctgctgttaattaaaacccagtgggacaaggacagaacaaggggtccagtgaggaagcacttggaataatttggacagggaaggacaatggctttacagaagccatagacaccttgatgatgaattcaacctaggtgttactgagtcttctttaaaatccattgggaatgtacaaaatg

SEQ ID NO: 35066 - DNA, 3804 bp, Bovine  19866880425245
  misc_feature (1)..(1): n is a, c, g, or t
ntaaattgccaacattcattgtcattgaaaaaacaagagtcttccagaaaaatatctacttctgttttattgactatactaaagccttggactgtgtggatcacatgaactgtggaaaattcttatagatgggaatatcagaccgctggagctacctcctgagaaatctatatacaggtcaagaagcaacaatcagaacctgacatggaacaacagactggttccaaatagggaaaggagtacttcaaggtggaatattgtcaccctgcttatttaacttatttgcagaatacattatgtgaaatactgggctggatgaagcataagctggagtcaaaattgctgggagaaaaatcaatcaactcagatacacaaataatactacccttgcgaagaagaactaaaaagcctcttgatgaaagtgaaagaggagagtgaaaatgttgatttaaaactcaacattcaaaaaactaagatcctggcatctagtcccatcacatcatggtaaatagatgaggaaacaatggaaacagtgagagactttatttccttgggctccaaaatcactgcagtatggtgactgcagccatgaaattaaaagatgcttgcttcttggaaaaaaatctatgactaacctagacagcatattaaaaaacagagagataactttgccaaccaaaggtctgcctagtcaaagctatggtttttccagtagtcatgtatgaatgtgagagttggactataaagaaagctaagcacccaaagaattaatgctgttgaactctggtgttggagaagactcttgagagtctcttggactgcaaggagattcatccagtccattctaaaagaaatcagtcctgaatattcattggaaggactgatgctgaggctgaaactgcaatctttggccacctgatgtgaagaactgactcactgaaaagcccctgatgctgggaaagattgaaggcaggaggagaaggggatggcagaggatgagatggttgcatggcatcactgactcgatggacatgagtatgaataaactctgggactttgtgatggacagggaagtctggcgtgctgcagtccatgggatcgcaaagatttgttcatgactgagtgactgaactaacttgaaaatttgaatttctgtagcccaacctgactcagaaggactgtctgcaagtgaagttaatttaacctaatggagttatgttaggaagaaggataaagtgtatatatcagatagtctgtcatagtagccattagatacagatttttgtcatcgtgctcaaaattccacttcaggatactccctttttaatttttttttttttttaacatctggaaacattgatcttggtttgtcgttagttcatttaaaggttggtggtttatatcatttatcttaattcaccctgctggtctcagtaaccactcttgaacattatttatcttcatttgattcacatttgctcagcagtcgctttctgacatggctcttccttatacacttttcatttattaagcggcagatgtatgacatggtttggtttagtctttccaatccaattcagcagtagttgcctcaaatcatctttcttcattgatgcatctttgtcctatggcattctccttctctcacttgtgtactttagcaatgatcatataatgggaaccaatttctcttatctcccatgcattcagaagtcatctgacataatttgcttctatcctttttgggtttattcagagactatttatttttatttcttttctctcattaagaaattatgtagttagtgtcacatgctagccttttctgtagaacactatttctgatcaagaggttggtcatttatttatgaacactactgagacgtctcagcttcagttgagccagtgatgcattttcatcacatcagacacatcctacaaaaatactttaatgctaaaaagtggaaatgaagtgaacaaagacatccttgggatagattacttaagctgtatttttaaaaatatgtttcctgggcaattctctgtatatgaccgccctaatatttgtagaatcgcttcttaatcctttacctcaaaaaagaaaacaaagtagaatattttgtgagattctacaaattgtttaaaccttcataatggcttttgccttcagtttaaaacatccgtaagtacaaaatgtagatttgccctcccacaagtattgaaattttctgctcatgagatatcttaccacattttctctccaatttcataaagtttaatgccggaaggcttgtaggcagagtgagtgatagctttatggttacaagatggaaacaatatattcatttaatagtgaatgtacatagtcctttgtcaatttttaccaaaaccagttcatgtaattcatcacagaattcagaaattaatatttcaaagcctatttgacacagtttcaaaaagtgttaatgtatttttgactaaagcaaccatttgctcaaatctttttctctcctggagtttaacttaaaattcagttgcatacttaaataatctgtataactacatgttatccaatagtaattttcaactaaaacttagaatgttgcaggagaatctaccaagcaacctagattttctgaaatatatacattcacatatatcagctctaagattaggctttcaaattaagtaaacttagatatgaaaattatatataagattcttagatataagaattttgacacttctatttctgactgcttttggtgtcatcaagacctctctcccttagtaatataatggcatgttatgatgcttacctggctagatatgaaaataatggtcatatggatatcagattttttcttctagccctcatcaaagtctttagacaactgacaaagcactgaaataataaaaccttttctggttcactgaccttaggtaaatccttgatgttataatgcatgagagcatatcatgagcacagaatatattactttgctttcatagactgatacagccaatataaaaatgaaatatttgaatattgcaaatgcaaaatatcttcaacagtctcctcccggttgtatttctcttgtttctccataacaagatttgttccattacatcctttaacaaaaaaagaaattgaggcaataggaatatttctggtacttttagggcaatgtatcattgttcaacaattcagtctaccacactgaaaattaagtgatattatctagattctagagtgccctaacttttaagggaacaaaccaaggtgtctagattcaaaattaacgttcacactgtattctccatgttccccaggggagggggatatattcccatagcatataatatgaacatggctcctagagttgtggtttttttgttgttgttgctgttgttgttcagtggtgctgatcttaaggtctaggtgcattcttacactgtctgacattcataaatacctggttagttgtgtgtcataaatgagggagcagcaagccttgtcctcaacaagatggaaaataaaatgtgaaatatgggagaaaaaactcttcagcagtagaatccctaaatccagacccagtagagtcagagattgatggcaaaaagaaaaataagcacacttcagtgaaagtttacccatacagctaaatctgttgaatttaaagaagtgcttttaattttcagattatgtctctacctgactatatatttttttttcttttatagacaatagaccttgtctagttggtttgggctgttttattcagcctgtcataacagtatcat

SEQ ID NO: 35067 - DNA, 1301 bp, Bovine  19866880437688
  misc_feature (1)..(1): n is a, c, g, or t
ntcagaaaggaataaactttctaaagaattttcagagaataaccacataccccctataaatgtgtatccaatcatggtgtcttttctggatagcagaaacattaagtgcccttggatacatatagattttgaaatacttaggaaaaaatcactagcatctttctattaaagtgtggggcaaggatcagcagacactgcaacattgttagaatgtagactctcagaccccatctgatgactagtgaatcagaatttcgacttcgaaaaatatctccaaatacttcaggcacactttcaatttgataagtactactcaaaccatacgagattctaaattctaggatgtgaatatcatttttaaaatattaaccatgtatttgcccaattttgaagtcaactcaaaataatctgaaatgaaaaaattatgcaccaagatactccttcatagaatgtttatcatgcaaattgagaaaaacaattccagcattaggagaagtgatgtacagtcatcaaaattttacttatgaaaattatgatgtatggttgaacattggttttgtcataccgaatggtaaagcacaaaacagaagagtgtaggcaataacatatcaagcccagaaacaaataataatcacagacaaaatattgggtgaaaaatttgttgaaatgagtagtgatatttccccctcatttattcatatattttgtacttaccaaatattcatgcatcttgaaataagagactatattttgcataattgaagtgatatcggtggagatttaccaaagacagatagtgtgaagatattttattaagccatttacttcatgcagattgtatcattctgccttagatgctattttctccctttctagcccaaggacagtacataagtgactcagttttacacaaaataatcagtgaaagctagtaactaagaacattctatgcattttgtaattgctttgtgataaaagagtaaattctacaagcactctgtgtggcatttctaatgtttaggtaataataaagtttgatatgtacagcacaggcacattataaaaattaattagccagggacccatgaaactcttggagctcaaaaatgaaaaagagctgtgtgaactagtgccaaaaccgtgacagaagtgccagtgttgtagagatttttcctgtttaaaatcatttctaaattctctccaaaacgaataaatttgtgctgtcccagagagacattactttgccaacaaagtccatctagtcaaagatatggtttttccggtagtcatgtgtggatgtg

SEQ ID NO: 35068 - DNA, 1089 bp, Bovine  19866880490923
  misc_feature (1)..(1): n is a, c, g, or t
ngtggttccctgggaacctgtggacgtagtataagagcaaaacagatcacagacaatcattggagtctctactgaaagcacatttggcaaaatacttcattggccatttctgtatgagcaatcctgtactacttataaacttaagatctgaggaagtgaaagtgtatttagttgttgctgaatcctcatcccaaataaaaatcatggaacttcttctgttttaaaaaagttattttgcacacaaactcagtcaaggacactacaccagaaactgcctctaaagtcatttgagcaaaataggccagtgtcactcaagtggttcagacggaatggaattttaaaaagagaaaaacggccatatccatttctccatagacaacagaaattattattttgtaaaagagcagaatgtaaattttataaattaaccaatataacatcacattgcttcaaattggcattattcattattcataaagtatagctggagataaactataaaaaataattctcatgttccttggtgattttcattcaattacaaaaacttgctaaaagtttgtaagctagaatcccacaccacggtctaaatagcatttcctcctggtaaaatttatgcatggctttccacatctcccgtgctacaactctagcagaagccaacataatctctcaccagggaaactgaaatggcctcttaactgttctccccacttttcactccagacccttctctacacaccagccagaacaatacttataaaggcaaacggatcactatttcaaccctccactatctccaacctcactcagaataaaatccaacacctttaccataggttacctctttgtgaaaaggccacatttaatctcatttttatctcctttctaaaatagtcctcaaaaacttattttatttgttatatcaaatttctctcctcccatattcacatttaaacacacttgtctgcacctccaccaggcctgtgaaacttctttcatcaaggtcaacagtgaaccctttcccactaaataaataagatacaaggacataatgtacagcacaaggaatataatattttatagtaa

SEQ ID NO: 35069 - DNA, 752 bp, Bovine  19866880518136
  misc_feature (1)..(1): n is a, c, g, or t
nattgaaaccctggactatttaagttatggtaaaaaccttaccgtgttcatgccaaatagattactatatgcagttctttcctgtcacaggcatccttgttaccaagaaaacagagcacagttctaagctgtatgggtgaagaacacatgaggctgaaactcgttatttttggtctctttctctttttctttaaacaaaactccacacaaatatatttccctcttgatctctctcccaattccctttagttaaagagccatcactttttaccttctaatgaattgtaggccttgtcttcagaaaaatccaaggagcttttaaactggtaggttttgtacttgagtcatgatagccacaagctaaagatgtgtatagattgcagaaacaaactctagatgaactttctgaagttaatagtgaggatgagttaatagtgaggtttcaaactcaaaacctgttgccaagccctttttctaaaatacattctgatgataaggagtctgttttgaaagccttaggaaggatataggaagtgaattttggcattaattccaagatattatttcttaaacaccagaatcacctgtagtacgtgctaaaagttaaaatgtgcaggtttctccagacaaatgaatcatgatttgtggggaagttttgcatttcagtgcatactccgatttgagctccattgcactgaaagttgatgcacattattaacacagctttttgtcaacagtggataccatatttg

SEQ ID NO: 35070 - DNA, 1041 bp, Bovine  19866880562341
  misc_feature (1)..(1): n is a, c, g, or t
ngtgtctgactctgtgcgaccccatagacagcagcccaccaggctcccccgtccctggggttctccaggcaggaacactggagtgggttgccatttccttctccaatgcatgaaagtgaaaagtgaaagtgaagtcactcagccgtgtctgactcctagcaaccccatggactgcagcccaccaggctcctccgtccatgagatttgccaggcaagagtactggagtgagttagattatagtaactggtgaaagagaccttgaaatatgctaaagaaaataaaaggaacttctttacagagcgaagatcatgttctcagagtacagacttttgaatgaattttatagtactacaggtaagcaagccaaccttccacaactgtaacacagaaatcttcacaaacaggctgctgctgcaaagtgtatcacaaatacatgtgacaatattgtcaaggcaggttattttctatttctactgtacctctcactacctcggtcaggaagtaggggaagctgagaagagtgaaaatgaataggagacatccatgctcctgctgctactggctgctgctaagttgcttcagtcgtgtccaactttgtgcgaccccatagatggcagcccatcaggctccctcgtccctgggattctccaagcaagaacactggcgtgggttgccatttccttttccaatgcatgaaagtgaaaagtgaaagtgaagttgcccagtagtgcccgactcttcacgaccccatggactgcagcccaccaggcccctccatccatgggattttccagacaggagtactggagtggggtgccattgccttctccgagctcctggtctctcacaaaacgaggggtgtgaaaggcccctcacagcctcattcagaactatttaaattactaaatatagtctgaatggctcgtaaatttgtttttgttttttccaggagacaagcgggaagaaacagcacatagaaatgggtagttcaccaaagcaaggaaacatataatatatgagcatctgaaaagcagcagaaa

SEQ ID NO: 35071 - DNA, 1791 bp, Bovine  19866880594928
  misc_feature (1)..(1): n is a, c, g, or t
ntgtccccatgtgcccgatgctagttttggcagctaattaatagaactgtagaaatattggaaataatcccagaaactaatgattgaagtatttattagaaagacaagggtaaagaagcttaaaaatgctgatcagaccaataatttaatatgaaaaacagacaatccaagacacaaggcagagaatggtatgaatcttattagcagaatagaaaagaatgtatcagaaagatttagctgagaacatttcacactaagttagaaatgcaatgcactcctcactacctgtagcaacataatatataaatataagttgaaatataaatgttaagtgccatctattcacatatatcaaacttacctcattccttatttattttctgcctaataattgagacagtgtcaggaattccatcaatatttgatgtattttaataataagaagactacagtcaagatggagaattgatctgacataaaaagcctccactcccactacaaacttttttaattgataaagtataccttttttctgagtatgtaaatgtatatttaaattcaaacctataatatggaatatctagattttagaaaaaaaaggagggtcccttccatagtaagggaaattgaatccgatgaatgccacttagctatgttttgagagtctccctatgtaaggctgagagacaaggttgtgtatttacagtcagaggaaggcagagaactgtattttctgcataaataatcctcaggatgtgaatggaaagaagtatccatgaaaaggcagaccccttggacttcacctttctacatgtggaaaatcttgtactatgagattgatacctaatgaaaaaacctgctggagacttctagctttaaataaaaaaggacttaagactatttgcttatttatttttctattccctccacgaaaattcactgaagtgactggatgtatgtatatgtacatccacgtgcgtcactgtcataaggcatggaatcacaaaaacaaaaagagaaactaaatggtaatgaaggagcgaattcataatttgaaggagcgattgatggttctatcttatggaaggaacggagggacggaggaaagaaggagagaaggagggaaagaagagaggaagatgactcacgttagttgtaaggcaggatgacaacctggtttgtaacacagatactcagacacactcaggaatttgcagcaccagtttcctactccttctgttccaaaacagtatataagagctctctaaaagtgtgtttgcatcatgaatgtctggtatcatcagttcagttcagttcagtctctcagtcgtttccaactctttgcaaccctatggaccgcagtacaccaggcttccctgtccaccaccaattcctggagcttgctcaccctcattttctagaatgctgtgagtcaggcaggagactgaaagatttttctcttgtgactctgatgaatcaaatgaatacacctaaggcaatatacattttgagggctccagcaaaatgtctcagccagatcatcatcctatctagatgctccaaatgggcaacagtaaattccctgcagagtcgccaaagaactagtaagtgcttcatctcaaatatgagtaggcaaacaagaattgtcacatcccagaggaaaactgctaacactcaaagacaaaatagacaagcagaaaactgagactagggagaaaaagtatataataaatagcagacagaggaaaattgtaaatactataattaatatactaataaagtaaaacaata

SEQ ID NO: 35072 - DNA, 1238 bp, Bovine  19866880618072
  misc_feature (1)..(1): n is a, c, g, or t
nactgttatttgtgaaaagtgaaagtgttagtggctcggtcgtgtcagactctttgagaccccatggactgcagcctgccaggttcctctgtccatgggattctccaggcaagaatattggagtggggagccattcccttctccaggggatcttcctgacccagtgatcaagctcaggtttcttgcattgcatgcagatcctttaccatttgagtcaccagggaacctcatttatttaattccaagaattccacttaaccacatttttgctgtaatttttacaaggaattagaaacatgacttaagtaaatattctctctttaagaatgtcattcacctaattaaatatagtaaaagtactgtctacactcccaattaatttgctaatctacaagaaatctagaatcaatagctagctaatagctactcaaatgagtcactaaagacaaaaatattcatatttgtatttggtagttgaagagcaatcataatacagatgacaatatacatttgtgcaactcaaaatgatggcaatgtgtctagaatcaagccctataaaacttactcggggatttgaatcatgccatttgtttttttattgtttgactttcttctccttcaaattggacccatgtcagcataagcacactggctgacaccggtcctcactggacatttccatgacaaacctaaaagtcacaggcaacataaattgtcaaggttttatgagtacagctctgctaagtgcaaagtattttctagacaaaagtttagcgcaaaggtagaagggtcattttagtgtagtaaaaacagaggagtcctggatgcatttttttagaacctcaaattaattatgaaatcaggagtgctgccctcctaacccttactttctcatgaaccaaagtgtttttcccagaaatgctcaacctttatttaattaatggaaaaaaaaataagggttttaagtattatgagctgaaattgaccctgcctaaacatggaaaatattttcactttccaaaccatgaaaactattgatcctggctttaaatatgaaagaaaaataaacctctgacaagaaaaagaaaacaaatgaaccttgcagccaactcttgctttttcaagtttcaaacaccagaagttctttctcaaatatttcctaatcactctcactgacttatttctccctttatcccaaacacctgtaagatcattaatgctccatgaacacatattat

SEQ ID NO: 35073 - DNA, 1453 bp, Bovine  19866880620555
  misc_feature (1)..(1): n is a, c, g, or t
ngcagacctgtttacagcttttgatattagcaatcagcttttcccgactcctgtgacaatgtgacaggttgattcagggatgatagattgagtgcattcgttcggatttcacacataaatcctctaaatgtaaagtttaccaattcattttttgaatagaggatggtttgagcatttttaatgtgtttgtgcatttttgagagtttctagtacttttgattccatcaggggatgttctgaactggacatcagtgtttattaggtgaactctgacttttcattgttgttgtttttattctttttaaacataacttaaaagaagtgagatgtgaggtagatcatgttagcagttgcaagtcacaattgctttctacttcctttacttataaggccaaatatatatttttaagtaaatatatatatatatatatatatacacatatatatatatatacatatatttaaaaatactggtatacaggaggagtaaatactggaaatagtgttctttaaagaagaatatgattatcattattgatctgagctaggtaaatttatccatagaatcttactctctccaaactctgaaaggccatttattcttaagaaaaatcagttgtcagagacttttatccctccaagagaagctagcttcacagcctgaagggagaattgtgcaagatctggaaaaatgagacccatggtgtctttgtgtctctctgttccagcttctaacattgctggcaacttacagggaagaatagaaaagcagacttgatcaggctctaggaacagagaaaatattcatagctgtaagatgagaaagatagaattgaaaacacatctctttgacatttaaaaaaattatcttactctggcgttggtctttacagtgtttcctctttgttatctcatcttgtacttgatctcagtctgtgtttatcaggttctaagctttatacactgagaaaggcagaaaaatggctccacataggcatctgtgtcttaatgccagaggctgtgaatgtcctttgctacatggcaaaagggtttcacatgtgattaaattaagaaccttgttttggggagactagctgggattatcaacctgggcccagtataatcacatgagtcctcaaaatcacagaacctttcctggctgtgatcagagggagatgtgaccatgggaaaatggtcagagacatgcagcttttgctagctttaaatatggaaattaggaatcatgagtcaaagaaagtgcaaaaggtagattctcttctaaaggctccagaaaggaaccagctttgtgaaatcttgattctaacccagagatctgtatcagatatctaacctacagaactatcatataataagatttttctatttcagccatacttacttcatactttgttacattagcagtagcaaactaatgcaataccacaaagtgggc

SEQ ID NO: 35074 - DNA, 2948 bp, Bovine  19866880694325
  misc_feature (1)..(1): n is a, c, g, or t
ntagctttgaggtaattcagcactggagtcatcaggcaggtattattagagctattaataccaataatagcaataagtttaatgctattgtcatcttggcaaatggcctgaaccctgaggagctgaaaatgacaactgccgatctataggtttgaaaaaaatggtttagatcacattcacactagagtgtcttaggatgctgggaaattttgctgcaggacattcagcttttacatgcaaaacactgttgtcagattccccagatggctcacttaaaacacatgccacagtctaaaaagaaaaacaacaacactacacaggaatctcattataacaaggtcattgtcatatgtagatacacaacagatctatgttggatagtacctaatgcaagcttttccattacaaggaaaaatattacagatattcacaagcaaatacataaatgattatagttagaatatatttaaaattttaactgtggcttctatgtgtcagcaagactcattcctcacttattagtttatacattgattatattattcaacctttctcagtgtttaactctgagacttgtgcatgttttcaggtttctgaaaatgcttttccctttctccagattgcttctccatcagattgttttgtgaatggctccttcttatcatgcaaaattcaactcaagggtcatcttctcaaaaaagccttcactgatcatgaaatctagagtcagcctttgctacaaccacataattatttcctttcttttccacagtatttattaccatctgaaattatcttatttttgatgtatcttccaccctggctgctagactactagactgtaagagcaggaaattcatctgttttgctcaacatatgagagagcttctatcaaaaattaggtacttgataattataatagctaattctgtctagacccaaaagccagatacacaatgtcctcactgtttcatgtgtattattattatatttattcctcacaacaacactgtgagttaggtactgctataggctgaatatttgtgtccccatacaattcatatgttgaattcctaaccctcaacgggattgttttaggaggtggaaactttggatggtgattagctctgatgggaggaccctcttgcttgggattagtgctttatgaaagagaccccagagagctatcttgtcccttctgccactcctgcttacagtgaggatagctgtctatgattaagcaggccctcaccatacacggaaactgctggtgccttgatgttgaacttctcaggctctgaaactgttagcaacaaacttttgttttccataagccatctagtaggtgctattatgttgtagtggctcaaatggaccaaaaaaggtactaatattgtcactaatttgcagatgagaaaactgaggactggagaggctaggcatttacttaatgttatacaactggtaacaggactaagacttgaaacccagactcataaagtctgggttttacaacagcacaatgaatgtaggctgaagaaatcaatgaaataattaacacagacaaatactgtatataatgtgttcatacatttataggaacacttacacagccatgtatttacagaagtgcattgcttttttcagaaattaaaacagacttgtgctgatgcatctacatggtacataccttatcaggtcatctagttggaattatccgtattaactgggtgtgtgggaggaaccaaagaaagaaatatctctcaagatgtcaatatcaaccacatggtcataaagttctaatataattggcaagatacctaggtgcttcaaagatggcataaggtggagacatttataaagcaaacactaatatgcaaattattttaaagttacagaaaataatctatttaaaagtaaagttctaagaataacaagcatagtaacaataatatacattttatagaagaaactaaattttaaaggaccttaagaagaatctcattcaatatcccaaagagtttcacaatttgttgtgatactattaagagcattttcatatgtatgcgcgcacacacacacacacacacacgactttatatgttcctgtgttctcttttcttatttgaacccctatatcagatagaatgaaatagggcaaaggctaacagagttttgtcaagagaacactttcgtcatagcaaacacactttccaacaacacaactctacgtacggacaactctacatacgaaaatcactaaatgttcaatattgaaagcagattgattatattctttgcagctgaagatggagaagttctatacagtcaacaaacacaagacatgcagctgactgtggctcagatcatcagctacttattaaaaattcaggtttaaattgaagaaagtacagaaaaccactaggccattgagacatgacctaattcaaataccttatgattatacagtagaggtggcaaatagattctagagattagatctgatagagtgcttgaaaaatgatggacagaagttcataatactgtacaggaggcattgaccaaaaccattcccaagaaaaagaaatgcaagaaggcaaagtggctgtctgaggaggcttatttacaaataactgagggaaaaagagaagcaaaaagcaagagagaaagggaatgataaatccaactgaatgtggagctccagagaataacaaggagagataagaaggccttattcaatgaacaatgcaaagaaatagaggcaaacatagaatgggaaagactagagatctcttcaagaagattatagataccaagggaaaatgtcatacaaagatgagcacaagaaaagacagaaatggcaaggacctaaatgaggaagaagcaattaagaggtggaaagaatatacagaagaactatacaaaaaagatcttaattacccatataa

SEQ ID NO: 35075 - DNA, 1724 bp, Bovine  19866880701221
  misc_feature (1)..(1): n is a, c, g, or t
ncaagggaggccagttggaaccttggtctgggaactaagataccacaagatggtgctgcgaggcgaaaaaaaaaaaaaatcaaataatcaaattccctacagttgtcattttgatcagagtactggtttgttgtggtttgaaaccacaggagcttctcctgtgaaacctgaaactggcaactggtacacggagggcagcaagagacaaaagaaagtggcagaacatcccagattgatagagggcagttttaataagcaaggaacttaatggcttgtcttggaccacagcagaatgagtacttctctgcaccgacctgacagaaccttgggagtttatgcagaggacttcactacgtttggtcgtgtgtaccagccagatagttttagcaacacatcactgtctccatgctgagttcttctagtgcagggaaggcaagtgggatgcacattttggaggacaaggtagggcgggggctgtggggcacctcaagttgtctgggttcatcacatgtcaatagagagtcacattctctccatgacctcttccaacatggttgcacaaaattacaagtattttcttgtgcatttatttttctctctcaggttgtaaggagctctgcaaacgggtgccttattcaaatttgcatagttcaatacctgtaactgcagatcttgcttttcaaacatttttgtatattttagaactgtattagaacctgtaggctgttggtaaatagtaactactcattaacacttactaaataaataaaattagaacacaagccaacagttactgagtgctaacttgttccctcaatgaatgaaagttacggaatttaaataacttattctaaacattaaaggatacattagcattccagtagccctctaacctgataattgcactataagaatttccatttttatcaagaggaacacaggaaaaaaaaatgtagcacaaaggactcaagacataagagaatttctgaagagagaaaaacaattaaaagttactgagctaagaactttcttttatagggatattcagtcagtcatttgaaataattgtatgtcagcatagaaacaagaccattgttgctcactattatctttatcctttggttgtattattatcatctaatactttctacttacagttttcactccaacaagttaatgaagagaagcactgatgtttcccgtgacttgcagtgtggattgcctcattggaatataatcatttgcaattatgcaaaaaaaattgaaaagcaagatctacactctaatgtactgtacaaattccatttaatatgtaattgcttatattggcagtctctgtattgactttccccaagcagggctcaaattaaatgaatctgtctttcttataaaatgatcattcaactcatttaaaacagttttatagtcaacattcatttgtatgatattcataacaaatatcttattacagtacaactgtgggtttttatccgatagcaattatttctctatctggcactgctttgcaaaaagtcaacatattgcaacaactgtatccattttgcaaagggaaaggggggataaattagtcaaaattctcagctaactaaaattcaattcaagttaccccaggggatattcctgataaatttttctcaatctctcgtataaggtttctaacaagataaagaacagcacttagctcataaagttctgcaaaagct

SEQ ID NO: 35076 - DNA, 2229 bp, Bovine  19866880710756
  misc_feature (1)..(1): n is a, c, g, or t
natagaaaaattacttatatctaaagatcaagcttgcaaatataactgtaaatatgctttattccttgggaacagatttttagagaaaacataagcaaagctactacttgaaaatgtacatattgaattattcaactaaataacccacatacttttcaataaacacagcagaactttccagagtacttcacagagtcttgcttgtaatcacctttgcatctgcctttgaacaactttcaagagcacatgaacacgaatcttttttttttttttttaagttttaattgttgaaactttagatacacaagagcatatttatatagagtagtcattttctttggactatggttcatgaaaatcactttgcccagtgatttatttttaaaatggaagtagcaccatagttttagtttattataaaagacaatatacttataaaaatcagaccaactcccagaaatataaaggaaaatggtaaaaccatttgtatcacataattcagaaatcaccactaatattaacatcttggggcatatccttctaaagttacttccatgcataactgtgttagttgctcagttgtatctgactctttgtgactccatggactgtagcccaccaggctcctctgtccatggaattttcctggcaagaatactggagcgggttcccattcctcctccaggggattttcccaacccagggatccaacctgtgtctctgaaagactgtaaaatgtacctggaacagttctttgctcaaaaagattcaaaatttggggaagatgggattatgaagttgcccaagaaatggcagaatgtagtggaacaaaatggtgaatattttgttgaataaaattcttagtgaaaatgaaaaatgtgtcttttgtttttacttagaaactgaaggaaatttttggccaacccattatttgcttaattgcttttaagcaattaggtagcttctgagggggcagagaccacggtaccagtctgtcttatcccctcccattgtacctccagcatattgaacagggcctggcacacagtaggtgctcaagatcagcattgttattgatgggtggaaactactttcttaggatagattcctgaggtggaatttctgggtcaaatgatgtgcttgtttctacagcctccaatggtgtattttagtcctggtgagaggctgccatacctctgctgggtgcagtaaggcaatgaaggagagagacgttttcaagagctgaggcacccaagagggctccagacccaggaggaggctctgctaagcagaggagatgggatggaggggacatttccacatgtttccagaaacaccatcaagggtgttcgctgagcccctattccgggcaggccctatacaacggttcactcagttaatcctccctattcataaacaagacaaaactagtaagcaagacaaaacacagtcccactttacagatgaggaagctgaggttcaaaaaagtgaaaggactggcctaagaccgggcaatgaaaaaggggagatgcttggattttagcccagctctgctgctccttcagcaggccagagaaaatggcaattcttttttttttaatatatatgtttacttattttattatttatttttctatttgacagcactgggtcttaattgcagcatatgggatctagttccctaaccagggattgaacctgggtcccctgcatttggagcacagagtctcagctactaaacccccagagaagtcccgaaaacagcagttcatctctccgctgttggttcaggggaccacataacgtaagtctgacagatttctgcacagcccagtcttgcctaggattgcaggagaggtcagtgaataaaaaaataggctttggagatacagctggacttgaatcctagctccatcgcttagctgtgtgatcttgggcaagttcctaacctctcggagtcagtcccttctgtacagtggggactggcaatgggagcattggtgaaaatgaaggtggaacacaggcaaatgggcgcctgccaagtgcttgccgttatcactctcgtttcccaagggcctcttgtatctgagacatttctcagagacctcagctctcatttccttctcccaacctcctgctttctatttttgaaaatgagattctgactggaaaactgttctttgctgttacacaatatgcaaatggaggatctggaatttgaagccaggc

SEQ ID NO: 35077 - DNA, 1091 bp, Bovine  19866880732388
  misc_feature (1)..(1): n is a, c, g, or t
ngcatctgtaacataggatggatataagaagtaggaatgactctctaactgtacaggagcactcacatttattcaataagacattttaactgccctttcccctcattccttcatatctttccttttttcccctcttcctgcaacaaattattacttaaaaatttattgtgtacaaatccctatgctagatacaatggaatttgacaaaaatggtttagataagttccttgatatgaaggaatttatgtaaaaatatttttttcccgccaggacactgttttctttctattccaaagccctgtcatgatgttacagttaagtccttggaattacacagaggtttccatttaaagctggattttgaaaatagtaaaacaaacaaaaaacaagtaagtttttctctggctgtttttgttttggcagttcaaagtgtagggtttgagaaaatgtttgctttatggacctatgtttctgcaaagaatctatggtgtctatattccgtgaacattttgaaacatgtgttttgctttgcaattaaagaccactgctaggcatttattttctttttttccctccctgaatactcttaaacaatcttgacttttaattcatacatcatagaagaagttactcacttggaataaaaagtgattaatgacataaatggtcaataaacattctatagtcatccctagggaaagaacacattcaggacactttccttctattttcctcacttgaaaagattgacatactgtgaaagtctagttaatagttgttagcatttctgaaagtcaacgaagtgaattagagatatgtggaattatttggcagaatttcagactctctgatccactaaataacacagagtttattgtagcaagaccttgtttaagaatcatgtcattttcttcctcctggaaggcttgctttctttagccattcttttctttttttaaagaacttaagaacttattaaaactgaagtcagtgttgtgacacatgttggattagtcacgccaagtttagggaagctgtatgatggaatatgacaacttcagaaacttgacaagaaatgcaaaatgaaagat

SEQ ID NO: 35078 - DNA, 762 bp, Bovine  19866880753710
  misc_feature (1)..(1): n is a, c, g, or t
natatacacacacacatacatgactgtgctaagttgcttcagtcgtgtccgattctttgtgaccccatggactgtagcctgccaggctcctctgctcatggaattctccaggcaagaatactagagtgggttgccattcccttctccaatatacatacatatgtgtgtgtgtatatatatagatatatatagaaatatatataagcctgaagtcaagcaaatttccatacagaggcaatatttagattctataggatataaattaatggatggaagtctatcaaagaattaagattctgatgtgagttagtttagtagatagtagagggggatgtaaaacacaaagagaaacaatacttaatttctcactgtatatgttagaaataaaccaaataaaaaagtaattatagcatttaagtaatgaggttaagtgacaaagaagtgttatttgaattctgcaaacccacatggtaaatcccaaacaaggaggaagtggagaaacgttcaaaataaacttactaaaactgtttcattctttaaaggctatacaaacacatggaaaagaaaataacattatcttgttcctcttcaattatgtaaaaatccttcacagcaagcatattaataatatattagtcattacagttatactcgctaagttttgacactcaaagcacctataaggagactatgtgtagaatatgtaaactgatattctcccaagtaaacagaaattcattcccaaatacgattagtatcaaa

SEQ ID NO: 35079 - DNA, 1416 bp, Bovine  19866880970408
  misc_feature (1)..(1): n is a, c, g, or t
ngacgggggagcctggtgggctgccgtctatggggtcacacagagtcggacacgactgaagcgacttagcagcagcagcagcagtttcctttttagagacacacaaagattattcaatattttatttacatgcttaaaatggattagcattgtcaaaaaagcaggtttgctgtacagtgacttttcaggagcacttttaatatcattttttcaattacacaagtgtatattataagcacttactgtatgtaacaaacatgcaataataatatgagaagaaggaaagaaaagtcataaagatgaacaagacctagcaccaatcccaacataaagaatgttttaaaactaggatagttttaagaagaactaccatggttgcaaactcaattcttctcatgaattagaatttcacagtgtaaattcattttcctttaagctgtatgtgtgcttaaaaatttgtgaagaactctgttagctctgtagcttgttagctaactttcttgaaatgaagactttgttgaagcatatttgggctttctctttattctctgcggcgcttcccatgatatatggagtgaaagtattcatccagaagtgggggtgcttgcaacacatatttattgagtaccaactgtgttccagaaatgcggtgttcagttttcaattaggtcatttgcaattagttttggcattaattgcaatttgcaattaattagtggaatctaccactaattaatctgaaattaaaaataagtcagcacacacaggatatcctgttgtcgcttgtttcattgtctctaaattaatgaatatttgaatatagctagatatcctgaaataataaattccagttcttatgctattgcaaattacatcatttgatcactaatctttggaggaaatatgaattaaagtaagctggggaatgcatctgtttgcagtaggtggctcaggattatttgaatacattactgatgttgtttccgatcaaatagttgtgatgattacacagggcagttggaacagttccatagatgttatcttataaacttcactgtgtccaaattgagttactctccaatattttccttaatagactatatgtatcttttcctcattttcagcatctatgttttgtcccagtgtgaatatgatctaaggatcaatttcattaatctagcccttttcccattttaaccacttaattaaatcatcatgaagtgtactcctttcctctgagaataagatccctttcctagcctttctcctcaacatactaaatctctgaaatagtcaccttcatggtatttgctaaatggtatattttccaaatctattttcttttccttaaggaattccataatgactaatccaatacttcctctaggtcaggtcaaattataacaatgccctaaa

SEQ ID NO: 35080 - DNA, 1364 bp, Bovine  19866880972383
  misc_feature (1)..(1): n is a, c, g, or t
ncttggtaggatcactcagaatcagctgaggaaaggatgcattggagaaggcatgcctgcagccagtaggttttaagttgcccaaggactggtgcataaacatcatcagaggagcttgtaaaactgcagactctcatgggtacaacaaataggaaaggaatcttgatatattttgcacatataaattgggcattacctctacaaagtgaaaattaaaaatgaacaacctctggtgtaatttctagtttcaaacccatctttattgcttactacctgggtaacttgggcttcccttgtagctcagttggttaagaatctgcctgcagtgcaggagactcgggttcggttcctgggtcggggaagatcccctggagaaagaagtggcaacccactccagtattcttgcttggaaaatctcatggacagaggagcctggtgggaggcagtccatggggtcacaaagagtcaggcatgactgagcgactaacacttacttacttccttgggtgacttgagataagtttttaaagatttaagcctatttcctcatttataaaaattgatttttgagatgataaagtgaaatatccagtgagatgtcttaggataatgctggcttataagaggtgtccaataaatgttaattttatatattaaaatatattcatgccacattgtggtaactgacttagctatagttttagatgaatgttttcagttaatcttgaaatactgttgctggcataatcttttcccttcaaattttctcagaaattaattgtctttcatgagtaggtgcagaataaatcattgttttcattcaagagacatggctgaataagcacacatttgcataaaatcactcccaggagtctatcaaaatgaatgaaaagaaccccaaattagagaggatgatttcatttatactgaaattagagtggagcctcatactcataccctaaattacaaggactagtgtttggattcaatttagtataagttgccaggacttaattcacaggttctttaatcttggacatactgcttgccctacatgggaaatggaaacgttcgaagggttttttaacaaccctggtaaataggacagagcggcaaagttacacatcaaattttatgttccagaaaatacagcttataacacaaagacagacaaagggggagatgtcattttctaaaagtaataatatgaaaagtttaggtatgcttccaaaagtctgctgtccttcattatttgtgcattaatatttcagtacatacatactcaatgttttttaaaatgcatttcataaataatagagaataaaagcttttatttaacagtttcttaccctacaaatgtgatt

SEQ ID NO: 35081 - DNA, 1396 bp, Bovine  19866880978960
  misc_feature (1)..(1): n is a, c, g, or t
natttacttaaaataatatgttgtaaagtccaatggaggctttaaattctatatgaagttttattggtgccacaattttacagtatctattggagcaaagacaacaaattcttacagtcaagtgatcacaacaatctcttctcttctgaatgaatgaatatggttcattttgaatatggtactttgtgcagtagtccccagcagccttcagtagagtagcaggaaagaaatggaaaaaaaaaaaattgcttccagatttattctgactccacaatagccaccattttaaattgttttgcagaatgactgattataaaattcactgaaaatgagttggaaagtatacttttatctttaaaagaaaatggtaggtgggagaacatgagacttgaggggcattgtgagacctttccccctgagaaatgtcaagggaattaaagaagctggatagtgagaccagaggcagcagcatgttctccatgccttccttctccagcagtgagcatccaccccacgctttgctgtgtaccaagctcttgttagtaacctcccacaggacagggcagctccctcccagacattatgcctcaaaatgagggaaacaagcagctattcttgtgattaagaacacttcctacaatgaaagaaaggttaaaaaaaaacctgcctcaatgagttcttaattgggtataagataatgttggtaaaagcttaaaatatttaactagccataaatattcagggcagtcatttgaagtaatcaatggctaggtgaatgcatacattagctggcagagcatcacttaatcaacaattcaaataaacaagaggagaattaaaaatgcaaaacttcaaatatagagaattaattagcaaagttgctaattacctccaggttctttcttcctctacccattgactacttaaacttttgtcagagcattgctaaaaataaccagttgtcaagagattcatttcttttcagaaggcctgcttactcagaatgatggccaggtcaagcagatagcttagaaatacccaagatttaagtgttaggaagtgatctcagaatgtaaagcttgagaatccttcagctgacatatactgctggcaagaaaagaacatccccccctccccatttttagtctttatcgcttaaaagctctagacttttatatctgcatccaaatattgtatgagagaatctatcaggtagagagaaacattcatgatagtttactgatactgaaaaattacatgattttcttcatttgacaaatccttagtatcttcctgtttcaatcctctcaagttattatacactctgctatatataaattatattaaagtggtttaaatagatagaggaggctactttcaggtcttcaactagaag

SEQ ID NO: 35082 - DNA, 733 bp, Bovine  19866881025804
  misc_feature (1)..(1): n is a, c, g, or t
ncattggagaaggaaatggcaacccactccagtacccttgcctggagaatcccagggacggaggagcctgcatgggctgcggtctatggggtcacacagagttggacacgactgaagcgacttagcagcagcagtatgctttagaaaagtaaattgaaaaacaaatattaaaaaaaaaaaaaaaaactggttagatttccaggtgtcccagttgaatttaagtcacataagacctatattagatttaacagaggagatttttgtaagtaatttctacaatggtgaactctcaaatgtattgcatttgcctaaaagaattcatgttatgtgattgctggagaggatagagatgcttaaaaaaaaagatgttttgatgttttaccatacactggagatttttgtaattcatcacaattgtatgttcttactgacacttttaaataaatgggatctatgttatattttcctgaccgttgctccgtcatggtttatagacccatatgagtatttaatgctgaacactaatatttaaaaacaaacatgattttctatttacatggcaagtattcttgctagttatgatctgctatttattttaggtactgcattgtgaaaaccacatgtagccaatggagctttcttattatgggtatatcaattcagcaatgcagcttatatagaaagtggcaaaatatgtatcattgggactttgcctatgcatagcaataaattg

SEQ ID NO: 35083 - DNA, 1324 bp, Bovine  19866881057742
  misc_feature (1)..(1): n is a, c, g, or t
ncatcaaattaaggggaaataaagagttgtaagtttctctggatctgaggaattgtataaatgcactgtcattgtataaaagaatcacactgtcttctctcgaaatttcctatttatagaatataggttattcccaggttattaaagagtttctgagtcctcattatcaacacttttatctgaccccaagcctgtagctaccatgtaagaaagaagtgatcactgcacggtattcactaatgaattgaccatttgtaaaattaacctccactcaaacattcttctcagcttattactgtgtatctgcggccaccatcagtgcctttgtaggtcatgcagtattaacatgcagtaagcaattgcaaatcttgtacaagatgcaagatatcaagaagtcattgaagataattatggagaactaatcaattccaggcaaatccactgatggtatgacagagatagacctgttaaaattgaaggaaaaatcaatgtggacagagagacaatagacaattcaagtggaatgctctgtgacccaaaggattaagaggagcccttgaagaaatttctgaaaatttgagatgtctccaaactattcttcagaaacagaccttcattatgatttccctggaatagttagctgagaagtaaggaataacatactgtattatcagtattgttgttagaaattttgtaggagaaaagattattatgtaatatttgatgtatttttgtccttggtaaaaagttagttatataattgaaaatagaacctatactttattaaatgaggcaaactaattttttcataaattttagttttatttttcattataacatttcagtcacactttattttttatccctaaatccaatgaaatatcaacctgtcttttaaatagacttctttcaatatgctttctgtagtatctgttatgaactttttgtcaggcaattgatagatctctatgttttggtggtcagttattagaaaattattgctttcctttgaatatatcactttcttaatttttcatgtttcgtctatctttgtatcaatatctgtgcatttgaagagcagtcacctttttcagactttatggatgggctttggtaaggaaaatcttcatctttagaggggtgtgatagcctgctggttggggtgcaatgtttccgctctgtggttggagtggtgcagctgtgtagactctgggtagctccatcacccggggctagcctttgaggggagtaggacttagggatccttggtgtggggctacagatgtgcatggcaacagcaaaggctgctgggatcctgctctgt

SEQ ID NO: 35084 - DNA, 1033 bp, Bovine  19866881107752
  misc_feature (1)..(1): n is a, c, g, or t
ncttcttaaggttcctcctcttcattgttttaggtgactgatggatgcttgagtttcaaactaagggcttcagaacaataatggccacatagcgggataatgataattaacagacaaaagtacagttaattgccatgaaggttttgatacagattgacagtcagagtaagctggaagcctgaaaccccagccaagactactttataaacatggcagtgagactcccattgtatttaagcattaggaatcagtcagctgtgctcccctccacacttttccagatttcattagattctttatacagaatgcaaaaataaaagtttcagaggactttgaagaagtatttacagttggtttttgttgtctgcagtaattatggtttgtgaaagtgaagctgctcagtcgtatctgactctgcgatcccatggattgtagcctgccaggttccttcgtccatgggatttttcaggcaagagtactggagtgggttgccatttccttctccagggaatcttcccaacccagggattgaacctgggtctcctgcattgaaggcagacactttaccttctgagccaccagggaagtctttatgatctgcaaaggctctgggaaagattgaaggcaaaaggagaacagggcggcagaggatgcgatggttggatgccatcaccaagtcaatggccatgaacttaggcagactccaggagatagtgaaggacagggaagcctggcatgctgcagtctatggggtcactaagagtcagacacgactgagcaactaaacagcaacaacaacaaagtctcggggaagcctgagttagtgaacactaaaaccactgctcctatgagaaatgaagagttaggttcctgtgagcctctggtgacattttcattaagcaatcagtagaaaaaaccttatgtgcacttctgcctaaaggcattgtacttaatgcatattgttgattcgttaacattgtactcacagtcagcatccctataactcattcttgaacaaagcttgttgaacaca

SEQ ID NO: 35085 - DNA, 1280 bp, Bovine  19866881119767
  misc_feature (1)..(1): n is a, c, g, or t
nttggaattctgaaaaagcttcacaactgtggtatacctggaccttacctagggaggaaagtctaggaagttcaggactagaagtttgtatgggatctctttttgatacttacctgattaggagtgttgactatttatggatccctagttgactgttgcagttatatgattcacctactctttctttctcatgattgtggtctgtggacttctttttccccctcattcccaatgaattgcttgcacttttttcatgcggctgctgctgctaaattggttcggttgtgtccgactctgtgcgaccccatagacggcagcccaccaggctcccccgtccttgggattctccaggcaagaacactggagcgggttgccatttccttctccaatgcacgaaagtgaaaagtgaaagtgaagtcgctcagttgtgtcccactcttagcaacctcatggactgcagcccaccaggctcctctgtccataggattttccaggcaagagtactggagtggggtgccattgccttctctgacttttttcatgagaagagactaaattggttaagtcaccatctcctcagtttgagggcagagccctagctaggggctgcctagtggactgctggcttccctgtgatgagctgcctgtgatcagctgtcctttccaggtgtccaacacagtcccactccgtgttgctaatgggatggcttcctgatctgagataagaagtacatcagagaactctgagatgtacctttctgtgagtcatctttcagaacctagtgggttcctttccttttcctcttagtctttcttttttaatttaggaaagaactcaatatttgatcaaattaagtggagaacagtatcatgatcctaaaatagtgggatctgatgctccatagtcatttgagaacaagcaccatgattgaaactagtctgttttctctattcactttttaaattgattgctaggaatcaagaacattcctaaaatatctaagaaattgcttaaaagataatttgagtctcttcagtccttatactactgccaagagctctcctcaactccaccaatcatagaaggatcagaatccatactagaaatatatgccaagttcagttcagctgctccataggtgcttgcacctataagatgctagagggtttgggcctcagtggagccccattcatcattactgtacaactctgccagtgtttacaaaggtgctacaggggacctataagtcatgcgccaatttaaacgattgcaagctcaa

SEQ ID NO: 35086 - DNA, 697 bp, Bovine  19866881144935
  misc_feature (1)..(1): n is a, c, g, or t
natatcctgcaacaagtacccagtagtagtctgaggttttcatactaaaatattaaaaaaaaattataaagaatatggttttgcatgggcttctcaggtggctcagtggtaaataatttgtctgcaatgcaggagacagaagtgagttcgatccctgggttgggaagatcccctggaggaggaaatggcaacctactccagtattcttgcctggagaattccatggataaaggagcttggcgaactacagtccacagggtcacaaagaattggacacaactgaagagactgagcatgcacgcatggttttgcatatcacccgaggtttcttggaagctattttctcctggtgaactcttcaaaaaaagaaagaaaagatacatggaattcatcgagtttatttctgcactttgggcagagcaatcagccattagtttactttagcagtatgactcaaatgaatctgtttatgtatacttatacccagcatttgaatggaagagtattaagagcttaagctctagggacaattgcttagcttcaaaacctgttcctactccctgctagctgcagcatgtgtaagctatagaacccctctgaggccaagctgccacacctgtgatacaaaagtaatgatgataataagagaacaattcctgggctaagaaggggaagtaaacagaagagagctgcatag

SEQ ID NO: 35087 - DNA, 2304 bp, Bovine  19866881268035
  misc_feature (1)..(1): n is a, c, g, or t
ngaaaagatttggacctgtctaaaggaaaataacccttttattagaaacatattaaggcggaggaaatcaatcttgtgagatcatgaaaatctggaagagtctaaagttgatttatttatttaagatttatacccagtccacttccataaaggattcaaagtggcagcagactgggctaaactcattttcttgtaatatgtctcagactggaattagaagttcgttttctagcagatgaagttaagctgattatagcaaatgagctattgaaaatcaataccataaaactgttccattagtacctgtacaatcatcccaggattataagtaatatttatactctcagacactgacattttcaggaaatgatatgcagaacatttacacgggccacagccacctgtggttacttggctttgatgattaaagcatgttgctaatgaggccaaggtcatgggctcgctctctccatagcccaattatctcctttctgttctgcaactatgaatggaatcatattccttcagcagctgctttactataatgtgcaagggggtcattgaagttagagaacactcttgggtgacgacatatgcatccccactgttagaaggacaccaccaaaaatgtggcacgttgtctgtgccttttctttggacaagattgactgggagaaatgttctctcttaaatatacacacacagtgcacttacaacacacacccacattcacatacatacacacacctctttgggtaagggagggtaattcagagcaacagtaacaaggaggaaacttttcaactttgcagtcaaaaggagttagatcaagtcccagtttccacatatagtagcagcaaggtcttagataaagtccctcacttttcaaaataatttttaaaaagtacaatatttttaccttacagagatgggggagtactgatgatataatatgtgtatagcacttgcaagagacacatcagtgatcttaaaaaatcatcattatttaggcattagtatgtaccaggtattttagtaagttctttacacatattatctcatttaatcttcatagttccttatggcatgggtgtcattgttatcctttttattcatgatgaattaaagtgagatttagagagtctaagtaattttcccagttccacacaatgagaagacaactaatatacaagcttaagctgatctcactccagggtccacatgttcttgtactgtgctgtattcttgctgcttttcctaaaacacaagctgctgtggttattctagccctctgttaactggcctttaataatgtggtccattctctaacacagaaatacgatttcatctcctgtgcgctgcctgctcctttagcacaaatcccttcagttggcatcattgccgtcatacttcaggagcctgctagagtcattttagattgtgtattccctcagggacctatgtgaacataaattctctatctccggagacccttacaagaaatctaatgttaagtatataaagcaaagcaaacaaggaccacaaattacttacctctctatttgtatgcatctatttttacccctgagggtcctacaagatggatttctaaagcagatattctgggaagccacataaactctaggccctggttcattatacagcaataccagtgactcgaaatttccactcttgaaggctaaataagttacatccatttgataatgttgaaatatgcttccactattataaccttcatcttttattctctggaagaagaaattatatcttcagaaaaccttttatagagtggaaatccagagattaccaagttaacagtgtctgtgcttgaggtctattattggctggcttttaaactaaaatttcaatctctgagacagtttgatgaagtggaaagagcatgaatgttggaggaagtgaagacctaagtttaattctgctatttactagcaatatactgaagcaattattctacctttttttattttctcctttcttgcctgtaaaatgaggctaaaaatacctaattctagttttgcaatgacagttattacaagtaatacaagcaatataattgctaccaagtatctattgcatgtaactattaattattttaattaggaattcctagagaaatatttctattgattcaggagcatggggagaaagaacctaggttagttttctcccaaagcagtctttcattgaactgtaatggtaggagcatcagccagggtctgtactcaaaatgggaagaatatgtccatggcatactcaaaatca

SEQ ID NO: 35088 - DNA, 3556 bp, Bovine  19866881354217
  misc_feature (1)..(1): n is a, c, g, or t
naaaagaccctgatgctgggaaagattgagggcaggaggagaaggggacgacagaggatgagatggctggttggtatcaccgactcaatggacttgagtttgagtaaactccgggagttggtgatggacagggaggcctggcatgctgcagtccatggggttgcaaagagtcagacatgactgagcgactgaactggactgaaccaacctatctaataaagagaaataagtgcagagaattagggaaaatgaagagatagaggaatatgtttcaaatggaggagcaagacaaaacctcagagaaagaaccaagtgaagataagcaatctacctgatgcagagcttggcattcttatttcccaaaataagctgagtagtgtctatctgtgtttcaagcatcttgcaatgaatgtagtagatttcaaacttattttgttatgaccctaaataaatactgttcctttaaatatacacagacaaatgcatatatatgaaccaatattcttaaaatatttgttacccttattatagtaagtgctaatattttgcattttatcccatttcaaattatatgctgatcctgacccacaataaggttgtaatctgcagtttaatcccatggacagaggagcctggcaggttacagtccatagggtcacaaacagttgaacatgactgaagcggcatagcacaccatatgttgtgtaaaaaatgagatgtttttgtagtcagaagactctggttttgtccctacctagtatgtgagttatcacctaaccagtgaaatagcaaatacttccccagaaggtgtgaggctgagtacttggtaggtattcagtaaatgtccatttctttgtctttaaaattcacacttaagccattcattgttattccacagtatggtagaaaatatctagttttttgggtatacctgcattctattggattcttagactacttagactattatgattttaactatgtctgtttttcttatcttgggctaaaaaaaacactcaataaaaacaaataacagcaaaaaaaaaaatcttatagtaatttttacagggctttattgagtgttccaagaatcagaacagaatctagaaacttgttaacttttatgtgtcactcatggaaatgactacttgtatttgttaattattttctatgaccaccttttgtattaataacatcttctaagacatcttttctccagcctccactcttcaactttcctggcccatttttgtagcagtgccaacaagatctttctcagtcaaggcatatgtttcaaggcacgtccagtctttctcaagacgaaatgttttatggcttctatatagctgattggtggtgggattttattcctgaaaaagtaatagtaacaaaagaatacaggtttacaatttgagctttaaacataaactgtttcctgggctgtggcaatagggtaaaatgatccagtggttgaaatcttatgaggcttcataaatgcacttaataattatcaactgatgacaaattaattgagtcaatgaatattaatgtctctcctttcatataactcgatgcctgggacagtttcaatatgtgacaaatacattgtactatgatgtattaataacatgtggatcagagagaagcaaaaatcaaggacaaatgtaactttctgtgagatatatatttaacactttttaacatttagtttattacctttggatgccagttaaactttacatccttcagtggtttttgtgtgttgtctattgactgagtctattatttgtcattgcagtctcaaatactaaaatattgcagattttctttaattatattgagctggtttgtcttattgattctgctctaatctgagaaatcggttttgtagtttagagcaagccaggcaggcttcacattatgttaagccttcaggttgactattagattcttgtatctttctgaaatgttccatctgctttatggtggtcctcaagttgggtcaagtgatagtgaaagtgaaagtcactcagtcgtatctgactctttgcaaccccatggactgtatagtccatagaattctccaggccagaatactggagtgggtagcctttcccttctccaggggatcctcccaacccagggattgaaccaggtctcctgaattgcaggtggattctttaccagctcagccacaaggaaagcccaagaatattggagtgggtagcctatgccttctccagaggatctccccaacccagaaatcgaaccaaggtctcctgcattgcaactgagctatcagagaagattcttgtattgatggagcaatacaaagtgtactgatgttgtagaaacctcaggacagtggacagtggttttattttgttctgagaggcatacaacttctatttggttgtttttaggcagatcatagaacacctgtgggggtgagtgaaatggccaccttcagtctgtggaggtatacagtgagacatgtgtcatgggaccactaattaccaatttgagattaatgcctacttcagaggcctcactggctcgtagctatggctctaccctaaaagcaccttcaggtctatgtgcttaaaggtggtgactttcacagttagaaaacgcattgccctagaaactccaactgaaattctgtatttgatgtcattgaaacaccctgctacttagatgctaacctaagttatgtgtattttcatctatccgtatgaaggtagttaacctcatggttttttaaaataatatagctaatatttatgcaagttgatgcaatgagttttccctagagtataaaattatttcaatgcttagtaaagtgataagggccagctgccttgtgtgttttcattgtactgttactgataacagaagcagggagttgatggcccatgctaaaatgatatccacaaggttgtcaagcatacctttgggtctcagtgcaaactgaatagggaacagagtggttatagctttcattcatttattttttcatgttgtaaggtaggtggacatgcaggattggaattaagaaaataatgattaggttggttcacatacatttataagccagtatgtatgaagggcttattagcaccatactcagcttcttgtaagcattctttaaattgagaataccttttaagaaatttttactacaggagttaatagcatatactctgcagcaaaattctctgggtttaagctaagtaacttcaggcaagttgcttattaaactacctgtgtttttctttcctcatgtctaaactttatgatagaagtatttacttcatgaggtgactgtgggaagtaaaagatgttacgtgcatggaaagcattggtaacattgattttagtaagaaagagaatcataagtaaaaatgccagttaaagtattagttatattagttatcattatttgtaatgcattctaaaattaactccagcatcgctgcatagtattaacattctggaaaaggaatatctcttcatttccttgccttttcggaaatggaaagtgcaagtagttcca

SEQ ID NO: 35089 - DNA, 866 bp, Bovine  19866881385850
  misc_feature (1)..(1): n is a, c, g, or t
nattagattactcaagaagaaaagcttaataactctgaaatgtgaagtttaagtttctcgattttccacatgaaataatttcctgagttatttaaatataagctaagatagtccagggagttatttgaaataaatattgagaaagagaattcatttaaatggagttaatcctcccagaaatggatagcaacaagatatttaatcactgtatatccagttaaatcacattcagaaactgctggaaatagagactagacaactttcttaatttagaagatagtgtaatacttaaggctttaatccccttatgatagatattggacataggactttggcatagttttcatgataaaactcttgctcttattaagatgttttatacatgagtcagtacaagtcatttgtgaatcaactaaattcactacaatagtcctctagtctctttttgaggaaacatgagtgctgacattttatactggatatgactttttttttttattatctgtttcttggagagttgttttctaagactgatttaaaaaaaattaaaagagcagtggcccctttaacacaaggtcagaaatgtccttactataaaatttatttatatttgttttttgtgctgaagaagagagaaaaaaaagagagagcacatcatatagcagtcagactagcacatagaaaccatatggcttggtcttttactaaatgaaatgggaatagtaaatttttatctgacatatgtcatgtaaaagttaaaaaaccttccccatcaaaagctcagaaaattaaattaaaatcatatattttatccacgttccagtagataacataagcatcaatagtaaagcacagtccatgaacag

SEQ ID NO: 35090 - DNA, 1700 bp, Bovine  19866881409624
  misc_feature (1)..(1): n is a, c, g, or t
ntggatggaatggaggaggcagagattatcaattgaaaaataaaagggggctgtttagaaattcttcttagagagagaaagagaaccacaaatgaagtcagtggcagatgcaatgaattttaagaactgaatagattattacaaatcactattcaaggaatacttaattaactaggtcacactatgttaacctgttagattcctcatggaaaaaatccctttattttcttaagcctctaaaatagagtctaactttttctgactttcacctttttaggtagaacaaaaatcctaaggcaaacatggatgagagaatgggctacatggaccacagtcccacaagtttcaactttctgttgggaataaaaagtgagttagatgaagaatagagagggttgaaatacaaatttggatgaaaatagcatagcaattaaaagcaaatgatgactaaagattaatgcatgaataattacaatttgaaactagaataaatccaacaataatcatgaagcatgttatcaaaaatcttgaaaactgcttatgagagcataagtttgcaatactactaaaagaagaaagaaaaaagtcccccataaactctagtgagttatgaattttagttaatcaatatatttcaataattctcatcattcactcaaagactactagacagtgacccttagccataagtaattatgtaatgataacaaccacaaccagtatttaatgagtaactgttatggttcagacattgaactataagtaccctatatttatgatctcacataatcttcataaaatctctaagaggtgggtactatacttttttcccattttgcaaaagaggaaacaaagatggggaaattaaatacatttttcagagtcatgtgtatagtaagtgttggtggtactagttttcagatctggtaatctcatggcagccttatccttaatcagtgctctattttacgtattttgtctatgtgaattaaggtattgggtggtttttgtttttggaggggggcggttctgggtttttgttttgttttgttttcaactggcatagatagcagtttcagttcagttcagttcagtcgctcagtcatgtccaactctttgcgaccccatgaaccggatccaccaagaggagtctagtacctgttgtccttgttttggaaagaacttaaagtctctgctttcccgtcacatatgttaatcagtccctttcagagaccttgaattcttgtcagaattccaatctttgccactaagggaatcctcattgaaatttacctgacaaataatgactcctgcttaatttttatctaaaatacttatgaattcttgataaagtatattaaattttctaacaggcttcattttaagattattttataatgtgtgtagctagactgaaaaaaaataatcaccaatattactgtcatttcttcaacttcctgcagctgatctactagaagtcatccagaggaataaatgcagccatttttatatctgtatgattattgcttttatactttccagcaggaaacagataagctatttattgctctctggaacttaaacatttaaaaggaacctatgctatatttatcatgctttacaggaagtgcaaagctgttcaagacagacaagaacagataggtttataaaagacattgcaaatttaataagctacacta

SEQ ID NO: 35091 - DNA, 1298 bp, Bovine  19866881638417
  misc_feature (1)..(1): n is a, c, g, or t
natagatacagatgaatgaatggaagcctgtgaacttctcaaaaattctagcaagcgcaggaaatctagcaagcacaggatactgagccactgggacacctctcttaggaacaattatatgactattcaatagagatctcattgtttggtcattgttgccaggaagacaaaagattgttgaatctgggacctcaggtaagaactataatgtgtacaaaattcatctataatcgtactgacagatactgatagtgaggcttgctgaccattggacagattaaccaataatgggaactgatactaaatatatttattatattgttaatcaattttctaataattccacaaaacattagccctccgagcttaataataatattgctgttgaacctagtaagtagtgtgtcttgttttcaacattcttcagactagtagatttttatacttatttttgtattggtaatagactctagtcaaaacaaccatcactaagaaataaataagccattgatttgatcatagataccaacacagtcacaattacattcaaatataaaatataaatattatccccagatacttatagagatccattcaggcccctcggatgtcaaaagaaacccagaacgttatcattttctaacacccttggcatgttaaattaggaaatgttaaaaaggatgaccaaaatcataagatgtttcaaatgtttacatttaactaatgaatgcctgatagaagtctttttccctttctgtcactctttctgtaatattatattatatattatctttttttgaagattacatcaaaaatctaaatttgaaccactgcctgattgtgattgccaggctttcgttgtgatatgagatttgatttgcaaatataagtataagggaaagaataatagacaaatactttatgcaaataccattatagaggaatgaataatagacaaatagaaaatactgtttgaaagtcagaaaaagccaaaggtggagaagaggaataaatatttaaagtattgaaagtataaatatttgaaagtgacttctaattttcagtgattcactaaaagagtaccctttttttttttggttgcactgtgtgtcatgtggggtcttagttccctagtcaggaaatgaacttgtgccccctacaagggaagtgcagagtcttaacccctggaccatcaggaaagttcccctaacggaatattttacattgtagtcattggaatacaagtccagcgcctagaggcaaagatagtgttgttaagcacataaaaccagtcagta

SEQ ID NO: 35092 - DNA, 1605 bp, Bovine  19866880369389
  misc_feature (1)..(1): n is a, c, g, or t
naactcccacttcagtgcaaatccccatcttccaggagccatgactcaaaagaaaagggtgcttggacttttgttatacacatttgctttgtgtaaataaatgtttacaattttatattaaagatggaataagcattagagcttctgactgtatattttttacttttatagatttaaaaactatgatcctttatatatgtgttttggggggctataagttttatgacaaacagttggtattgttaactttttactgtcatcaaagtacataaaaattctattaattcccttattcttttacttccttaactctggtatacaccaaaaagaagtctttactttcctgttttatcactataaaataataaaagtattttgctagtatggaaaaaataaataaataaaataaaataaaaagatgataaaattctgcaggaaaagctacttatgaaaagctttagttttcatctactaattttacagaagagcagacatgctatactgcctatgatgtcttatgattgttaagagcctcattccacctttgtgagaaaaaagcaaaaaaccaaaagtaagagtatttaatcccaatggaaatacatacccaagagatacatacacccaaaaaattaaaacataggtacacaaaaaaacttgcgtataaatgattatacattatttaaaaatagaaaaagcagagcagaaataatcaaatattcatcaaatggtagataaatgtgtacatgtatactcacatacgcacaaaatgaagtattcattgtcaacaaaaggaatgaaatactgatgcatgccacaacataaatgaatcttgaaaatatttgctgagtcaagccaatctttaatgtcacattatactgattccatttatatgacacgttcagaatatcttaatctacaggaaaacaaagtagactggggtttggggaaaactagaccctgtaattggaatctgaaaacgtgtagggcatgttttatgtccaatgtggagtttacagcatagtatgtgtatgtatatatatgtatacatacgtggaagtgaatgtattagtcacatcaagggagagactgctaatggctatggggtttcttcttgggatagtgaaactattctaaaatttactatgctgaagatcatacaattctgaaatactaaaaaaactttcaattatgtgaattaaatgggtgaattatatgttttatgaattgctgctgctactgctgctaagtcgcttcagtcatgtccaactctgtgcaaccccatagatggcagcccaccaggctccccagtccctgggattctcaaggcaagaacactggagtgggttgccatttccttctccaatgcatgagagtgaaaaatgaaagtgaaatcgctcagtcgtgtcagactcttagcgaccccatggactgtagcccaccaggctcctccatccatgggattttccaggcaaaagtcctggagtggggtgccattgccttctccggttttatgaattatgtgccaataaagtttttaacaacacactttttccaaattgggaaaggagtatgtcaagggttgtatattgtcaccctgcttattta

SEQ ID NO: 35093 - DNA, 899 bp, Bovine  19866880587874
  misc_feature (1)..(1): n is a, c, g, or t
ntcttgaaattcttctagagttttttgtggtgtaacacatttaacaaactaattatctgaaaagagaaaattaaacctcagtatgtcaaacaagtctacttgactataaaaattaagtttaacattaaaatgtattaaaaactaggaaaaaaatcacagcagagctttgaaattttattattgttactgcttttaccagaatattctatcatacagcatttcaaaagttaaatgattaggattctcgccttggaaataagatgcacttttaatcaaatcacttttatgtgtccctggtaacttattattacagaattttgacacataatgctttccagctttgaacataaaaaagtatcaattataagtagaaaaacactaaataaagcaatatgttaactctgaaaacttaaatacaatgtgcaaatttcaagaaagttttgaaatatgagggctaagcttatattttggtacaataaagatgaaatgcctcacagtattatgtatttacctaaagagggttcaaaaactgaccccatcgcaggctttggtcctggtactccaatgttaaacaatgaattctgctacttgagcattaaaaacacatcctcaatcatttcaaatgactgagggaaagttgaattattcagtataaaagactgaagattggagtggctggatagccaaggggcaaaaagaaaactgaattcatactttaacctttataccaagatagacttaaaatggaacagaaacttaaatctaaggcatgaaaccatgaaacatgaaaatatggataaacattcagacaactctggtgtagaaaagtctgttctaagaatgacaagaaacctacaagacttgagacattcaacgacaaaaatctagggcaaaaacaa

SEQ ID NO: 35094 - DNA, 1298 bp, Bovine  19866880714386
  misc_feature (1)..(1): n is a, c, g, or t
ncccagtgtcaacaagaggctcccctcgacctggaggcccctacctccagcccagccatgtgagcctccaccaagccgccaagtaacttgaaatcaaaaccccgtggctagccaaggctcggtgctggactatggcaacaccaaggcccctttctcactacaaagcagactgtggacaaggcggccctggggctggccagagcaagccggccctgatggcttatcttccccagcagctgcctcatcttagcagtgagcagagctccttatttctgataaaaccaaagccaggaaatatgcccttccgatcactggttgcacctaaccaggtgagcacgggtctttgctctgatactctgcattcacatccacccaccgagtggtttttcaggtcccagatagttggggaacaaagggagtaagtgagcagctactttttgacttccagctcccttgggaatgaaaatcaatcaagcaaaccaggattgactctcagtagaataggatagaaccccttgcacttggcctgatgtctctctcatgccacacaacttaaatcattcgtggccgtgttttaaaggtaaagatcacgtttaatgtccttacaggctctgttttttttcttttttaaacaaactttcagatatgtatgtccaaaatgccctaagttttagtaagcttatagcatttaggtgaatgctgctttctaacaggtctcaattacatggttatttacttaaggctctcaagcctggcagaatcactgggtctgaagggtggaggatggtcgagaaccgttttatcacgatcattgtctgcatttctactcacattcacgttctaaagtgtcccccagccccggaagagtaaacaaacagcattcccagccttcctcagagctagcgctggcttctgtccaccgcggtgtgtcctgcactgccctccacactgtccacatagagggacccactgacactgagctgacagtcatgtgactttataacagttgtatgacagttgttttgtcacggtgcagtgaggtatctccttcctttcgctgctgtaagtaaaaggctgcagtgaatgaacctttgtgtatttgtaacactaacattttaaactcatcagatttcctgtacagatattgctagataaattaaaattatttccaaaaataaataaactcatcagtggccacaggactggaaaacgtcagttttcattccagtcccaaagaaatgcaatgccaaagaatgttcaaactactgcacaattgcactcatctcacacacagcaaa

SEQ ID NO: 35095 - DNA, 960 bp, Bovine  19866880732432
  misc_feature (1)..(1): n is a, c, g, or t
ncatgagcagtttggaagtggtgaagtctggcttgtaaccaggagggctggctggcttttccacggggtaaggggcgtttaagggactgtgggcgggacctgtctgctgccacgtggacatctgggcctggagcgggtgctggggcagcctgctgcgggttctggagcatctgctcacgcttctgcttggcagcgatctgctggagttggtgggcagaggacagctctgagcctccgcctgggccctggctaggcagcaccacactggagagggctctctgtgcattctgagcctgggctgatgccggcatcaggctgggactggggctatccactccaggctgaccagcggtgaggaagaggggctgggagcccccgaaggctgggtgaatctgtggtcacagggccagatgaaggccccataaaggtctgtcctgcagacccagccctcacttgtggagagcctaactgttcctgttcaaaggccgctggagagaattccgtcttaatattaatgtcctgtgccaagggggtctgtgtggcagaaccagaagactctgggtccttcttctcttcaaagtcctcattgaacagatccttcatgtcttcatcaggaactgacctgttcagctcctcgatgagctccttccactcctgctcattgagattgaggtcaggcatgaggttgccttgagagatggagcctccggcccctgcgatcatgcaaggcaggtcatccatgggctcctgtttcagttctttattcaggctcaggggaaatgactcactagtgttgctgcctccgttcaggtggaggctcgagtctgccagacacttcttgctgatggagtccagccccagtgcatgcttcccagtggcctgcagggcttcagggccaggcttgtcgggctggccgagcggggaagccgggggcaggccgttggaagagacgacggctcc

SEQ ID NO: 35096 - DNA, 2985 bp, Bovine  19866880740100
  misc_feature (1)..(1): n is a, c, g, or t
nacatattttcttccttagggcacatgtcagcctccgtgtgcttaggaacatgagacagcatggcagcgctgtgctggagggttccatctctgtgcttggggccactctgaccagtgaagtcaccaacaaacatcacgaaaacgcaaaaaataacactaagtagattaggaaaaggacacttgtttacagtacagaagccgaaaccagaagtcagggcatcagctcaacctcagctgggaactcacaggcgtgctgggtgacaaacatcttgccgctctgtgcatgtccacagatgaccaagaattgatgtgagtgtgaatttggaggttacaaatgaaatgaaattttaggaagcaaacacgaaatttatgagtaatgagcattaactgtgtgtaggggtatatgatatatacatacattaagttacatctttaggtgtatagaaaatataactagaaggatatgtcaaatcactgatatttgtggatggttttgaggttttgacgtttctgagatcgtctataatgatgatggctgacttttaaaaagttattcatgttcaaaaagttacagacaaaaagtctgagtgtgattcttgtgtctttcctagccttgtttcagtgacaagactaacaacctggaagcttacgtgaaatggttcaacagactgtgctacctcgtggctacggagatctgcatggtgcgtagaccctgagctggcatggccaaagttggccggggctggagaggagtccccctgggagggaaccagaaggccatgatgagcccatctgtctcctagcccagagccaggctgggcaccctctgggacaccaggtgttacctggcttttgcctgtagagacatttccccctgagtagagcctggcatgaatccacctgccggtcccagagggagtcagagagatgcttactgagggagaggggagtaggctatccacttctcccacctgtgcctggggcggcctggcctgcagctgaattctgtgtggctcactcaggacttggtagaaataatccaactttaagaagtgggagatcgccctttgaagtccaggtccctggcatctcccagaaagcagggagattcggcaacaccgagctggacgtgctggccactggatctcagccctgccgagccagaccctgccgagcctcctccacggcagcggggccctctccccagtccattcctccactgtgaggtgaagcccagggccccctgtctcagggacagtttggagggagcatatgtgctggggtgggctctctggaagcagacagagcttggggggtaaggggtttgtttatggggtcaacgcctgcaatcgagaaagtgggagaggctcaagtggctcccgtcaggacgcccacaccctgccgtggtcgagcctgctcgtccgccttgcttgctcactgtcgccatcgctgtgggggctgccctccaaagcacagcaggacctcaggtggcagctccctgaagggttcaggtgccacagctccaccagtagcacaacacacttctcagcggcagtaaagaccacgccacacgtctgggaagcaggcgatctccttagagaggacactgtggggttccgtgagccctgcctcttctgacttcgcatccctggcctgggagccaagagagatggggctttacctgagcaaaacctggaccgagctcaccccagagccgggcatcactcagccagagaaggacatggtctggtcctgagtcctcaaagaagtcaaagtctcacacagtcagctggcattgggggtgaggtcgcacagtcatttgacagaaagcagtggtggggctgctaggggacagggcctcggggtcaccgtgtggccaccacaccccatgcagagtgaaggctgtttggtgctgggaagagaggtgaggtggctctgcttcctgcacccaagggaagagatgctggcactgagcctgagaggagggggacatgagaggcccccagtgccccccatgttgcaggtggctcatgtgtccccacagaagtcccaccaccctccacttgaccctctgtgcaatggactctgtgctgcctccccccggggcgtggtgagaccctgagtcctcaggctgcagatcaccctggtccaaagcatctcagctggaaagtttaatgaggggcaagatgcctaagcaggtcagcgcagggtggggacccctcgtcactgaggctcgggtaccctgtccccagccagccaagaagaaacagagggcccaggtgattgagttcttcatcgacgtggctcgggagtgcttcaacatcggcaacttcaattccctaatggccatcatctgtgagtgggccggccaggcctggggcccccagggcaagtgctcccagagagggtgggggcgggcgcggccaggcagtggggcgccagccaggatgtgcctctgagcaggaggtgggtgctggctgggccccaattcccccaccctaccctgaagtcctggggaggtgcccctttagaggcaagcccagccctttcaatgtgcttggtgagagcttggcagcgtgtacccagattcagagcgagtggggacccaaagcaggctcctggtcacagtataggcccatgttgtgggcatggggacaggggtctgcacatacagaagccaggccagcctggacacagcgtccattggcgcccacccacccctcatctggcaggctgaggctcccccaaatgtcagccctcatcagggtgcagcctgaaaggattaggggatcacccagctgggggcttcccagaggagctgtgtagcaataaaactatgcagcccagactacccctgccagcctggccctgtgcccagcttagccatccctcttccagctggcatgaacatgagcccggtctccaggctgaagaagacttgggccaaagtgaagacagctaagtttttcatcctcgaggtaagca

SEQ ID NO: 35097 - DNA, 1730 bp, Bovine  19866880841885
  misc_feature (1)..(1): n is a, c, g, or t
ngctttgttttgttttattttgattcctcttaccatgttaaaaataaccaggatatattggcagaggtttttctttgtagcagctcagtaatgactgggccacatttggtgctgacttctgaaaccctgttattttcagtggccatttattgtgcccagatggaagtaggattgttagcccctcagttgctagtctagtgtattgctctccttcgtatttggcagcagctttctgaaagaaaagaagggggaaaaaaaaacttagatatgaaactgacccatctgggcacaaactagattttcctgctggcatacctgtttctgttcatatacttcataattcaatctttgatttctcattatccatttctcttttcaatattccccctttcccccgaacaccacatacaggagtaatacagcctttattgtagtttttcttgtttagtctttgttatatggaattaaaaaaagaagaagaaaattttgtttaggccctctacttctgcttaagaagacttgtgcttcatactgcattcaagacgttttgtaacctgatccccaatcttcttttccagctttatcctctgccactattctgcatatttgttagctcagtcacctttgactagctagacttacacattcctgcctgacccctttgcttctactgttccttctacttgaaccacacatgctcactggagaggaagctctcaggcaggaattccttcttacacatttctttgtacctgctccagcataccacttgtacagaactttgctcataggcattcaataattacatggtaatataatacataaaatatgaacaaacctgttgtgctttgggggaatatttcagaaacaggccagccctgtggaatacaaaaagactgatgctcctcagccagatgtgaaggaagatgaagaagaaaaggaagaggagaaggaaaagggagatgaagaggaggacggtgaagagaaacttggtaagaagtagaccccaaaatatctgctctgagccagcaccctaagatgttgcttcaaactcttatacgcacgttactgtcaggattgttttagactctagaagcgtgttctaatgctaattttctagttaccaaaaaataagtgtaagattttgctcagttgttttactttgacttcttagaagagaagcagaaaagtgatgttgaagaagatggtgacactgtcagtcaagaggaggacgacaggaagcctaaagcagaggtaatggaaagtggcagctcaggggaaggcacacgtacggagagtgttttcataagatagttttcagtggctacgacagtaaagattctgttatagccaattttgtaaaagtgggattcttagcattaaaaaattcaattttttaattttaaattatatctgaatctcaaaaatactttctgtgctgaaaatggttttctgtaataaggagaaggcaaggaagactagtaaagtgctttctagtaatggtagcttcagttgtttacagttctgtttcatcaactatctctcctcactgtgcccttaaaactgttccttggacagatcactgcattctaaaatttttgtccctcttgctgatgaattcatttgttcattcattcagtaaatatgtctggagtaattgttagtgaacaagacaaaaatactctacctttgaggagcttaattctagggaaggaaacagtaagcaaggg

SEQ ID NO: 35098 - DNA, 1758 bp, Bovine  19866881009141
  misc_feature (1)..(1): n is a, c, g, or t
nttgatccctgagtcaggaagatctcttggaagaaatggcaaccctctccagtatctttgtcctgggaaatcccacggacagagtagcttggcaggccacagtccatggggtctccaagtgtcaagacaggactgagcgaccaacatgttcatggatggaaggaagggagggtgggggagagggagaaaagatgggtgtaagcgaatgaagcttgtagcccagtacactccaattccaggtgaggaccctgaagttctctctctcctagcccttgctggtaacaacccacagagagagtttcaaaagcaggcagctcaaggttctggctgcatggctgcaggactctggaaaagtgccccaacctctccgtgctttagtgttgccctcaataagatggggcagtagcaatgctcccttcagaggtcgtcaggccagtgggagaatccatgaggagacttcaccacggctcccagccaaaggcagcccctgaaaaacgctggctttgctcctcgtgtctcttccacgccctgcgcccctctgttcccctgaagaccacaggaaagcattcacttctgctccggccctcagtctgttcccaggcaggtgggagggatggccgtggcagaagagaagctggaatacccactccccaggcagcaccttgcctggcctaagaggctggggcctcaggctcccgggagcctgcccaccctccgcagcccaggactgaaatcagctctgtgttcagggccagtggccctcaaaccaggccctgtgctcctcctgaggaagaggctgcccttgagcaagagctgcagtgaggggcaggacaggacggtgtctgaccccacaagctagggcgcgaacgccaagctaacaagcttgaccttgccccaaacagggcaggagcaccagaagggtctggtccaggagagtgcagtgactaagaggtttctcccacacattccagggctgtggagggtgtggcctgggccgcgtctgggggttcaggagcatggccaggtgctgagcacaggagccctgcggggagacaggatgcagggctggggacaggattctcaggggccagggacaaaggaggacggaggtccctggagccctgggctgcccaggcaggatctccaggtcctgcatgctcaaggtgggacttgcttttaaggaaagacgtctcaaggcagcctttgcccggcgaacactgtgggagtcctaggcctgcctggcacggagccacccactcaggcaccctccttctgctgtgcattattaaattattcctggggagattagggtagaggcatgaataattcaaagtcagagataaagtcaaatctaatcaactctgtctgccggcttgaactttggcatgatgaccagctcaagtcaatagagcctgctgggagcccgaaatgagaatccaggtctgggattcgccctcagatatttcagaggaagctctgctgtgaagtcctaaatcgtggctgcagcagcagcttctccatctcagcctccccgttcatgctggcccttgttatccgttacagggcagcttggtggctgaggttgggccccagcactctttagccaagtgacctcagagaggtgcctaaccctgccaggcctcaatttctttgtctacagaatgggaatggaaatggcatctgcctcacaaagctgctttaggcatttggtgaatagcatagagacagcatcgtgtgctacaccaaatgcaggtatag

SEQ ID NO: 35099 - DNA, 1320 bp, Bovine  19866881054252
  misc_feature (1)..(1): n is a, c, g, or t
ncttctgagtggcaatgactctagctaaggaaactggacccggtgattataaaaacaggaaaagactccaagctaggaaatgctatttggaatatggggaaccccatcacctaatagaacaatcctgttcctaaacaagaggagatgttggtccaagtcctaggccacataggtcacaattgtttttttaccttcagtagcttttatactcacgttaaagttagcgctttcatatttcggccattcaaagagctcagtgcctcttcctctgagtttctgcaaactatgcacagcatctcagagggtggcatacaaaactatttttctaactatagcacaggaagtttggggtgggggaggcttgggatatacctacatgtagccaacgacttattttcccaccttgagggatgaaagggagactgtatacctgagtttaattcgccattggatctcttgtaccagaaaaaacacatatcaaatatccaagaagtaaaattgatcactagcttaatctggggactcactataaggaagggtcactttgactagaacacagatacctacaaatacaatgtgagctgatttcttggcaacctttaaaatgttctgggcagcacaacttctaggtctgtacagttgatgtaagtataattaagtagtgaaattgtatggtatatacctatatgccaatagtgtatacctgtatgtgcaggatttgctaatataaccatttcaataaaaacttattgaaaaagatgcattggccacatggagtgctgttggtggaaacctgtatcagtgaggactctcttggttgcaaacgactgaaaccccaacccaaactggcataagtaaaaaaatagtgtggtgttgcccaaatgctaagtccaaaaaaagtgtagtgtctcccaaaagctaaaatgccatgagtgtgcgtatatcacttacggaatgttttggccctcaaatactgaaaccaagacacatctgctagttatagcctcgttcgcacaagagctggtctgcctccccaggagaccagagtggtatctccttgaccctgattggcttggttggaagcacatggccatcaccgaacgagccactgtggttacagaggtaaaatgtgccattagccaaggccagaattggctcttctttggcagccacgagcgcattcagcttcacctgaaagacaggagctgagagttgaaagacatggttgctacagcaaaatcatgatggaaggaagaaatggatgttggggcaaaaacagcaaatgtccaatacatgtagaaaagagtggaaccaggaagg

SEQ ID NO: 35100 - DNA, 2498 bp, Bovine  19866881358776
  misc_feature (1)..(1): n is a, c, g, or t
ncccttagcagtaatgaaacatagttttgactgatgtaaatttaaatgttgttctacttatcccagtaacctttggcagctgtcactcaaggcacacctatgcccattggtgacgcatcaattggaaagtttcagccaggtgctggtcctaaaacatcatttactgtgtgatgtgacttggcaatttgacattgtagctacacgttggaaggcacttgtcaaaataatagattgtttagaagtcatagtttctaggatgagttttcaggccaaagttccaggcaagaatcaaattcctgtagcctgaggaagggtctaggatgtaggggatcaccataaagaaaggccctagagtaacaacgaaaaaagctgcagaagttgtgatgagttgtgttgagagtgtggtggagtgtgatgtgtacattcacctgcaaacattttctgagaatctgctgtgccagactccagatgctgggagcacagagagaccttgaggcctcctctcacagagcgctcactgggaagggtgaagaagggacttgaagagtagtgtgtgtgccggggaatggcaggtcccaggggatgggaagttcgtgttggtaatcgtgggattcttcttccaaagaaagaagaagcctttgggagattctagggcctgagaattctagccctgtgctgtccagtatcatagccactggccacatgaagctattaagtactcagaatgtggctataattataaataaatactggatttcaaagacagtaccaaaaaatgtaaaatacctctataatgtttatatgttggttacattttagaaatgaatactatggaaatacactattggattaaagaaaatattattaaaattaaatcttcccttttctagtcactttttttaatgtggctgctagaaaatgtaagttacacatagggcttgaattgtgcttctgatgggtagcagggaagaaccggaatgttgggaactgaaggatgaccgggcgtggcaggagggagggcaggagggagggcaggagggaggacaggatattgtagagactctcaaggatttaagcagagcagtgtcacaaaggcttccacacggaggatgagggcacccgtctggcctctctagactgctctttgtggtttccatttgagagttaggttttccaacatgattctaaaatcccagggttcaattctgactttcttccttctcccagcgctctcacatacttcagtggtcactgacctcacaaatctttaaccaacgtgagattgtttacttagcatgctttggttcactgtattaattttaaccttctctgtcctaggatctgaagcctagtaacattgtagtaaagtcagactgcaccctgaagatcctcgactttggcctggctcgtacagcgtgcaccaactttatgatgactccctatgtggtcacacggtattaccgggcacctgaagtcatcctgggcatgggctacaaagagaacggtgagtacagacaggactggaagaggccgcaatgtttaaaattagtgctattagtcatcacgagctttcttctctttcctgtgaactgtatgaaatataatatggagactgtgttatgcatagattatcatggttcacagatgagaaataattttatatttccattggttaaaattattcacttttgaaatgaatattttgaacatttatcaaagtataatatgcttacaaaaaaaaaaatatgtgaatcccaggtgtgcagctcagttggagcacacccatgtaaccagcagcataactgaggcctccccaggacccctctgggtctcaactcccaagggaagccattatcctgatttccagtaccatagattgatttttcttatttttgaactagatataaatggaataatacagcatgtgctttttgtgtgtaaaattggtgtgttttttttttttaacagcaaaacttattctagcaatatcagagctctttgaaacttagcttttgaaaaatttgtcaaaaagaactaaatcacacttacttattaaaaaaaaaaaaaaaaggagtctgaaagtttgcctaagtcatctgaaatgagctgagcttcaagtttatccagatgttttagaacttgtgctcccattcagagagacacgagtctgtggccttccagtcctctatggccatgggaggaaattcggtcccgttagcgtctctaaccccacctacaccagcactgaagagctctctgtctgggcttcagaggccttgattcagctgggccccgcagaggagggggaacagccagaagctgaggcgcccctggccctcgcctggaacccaaacaagcctggccctgtggggccccgctgccttgacagtttagaaatggatcattctggagacatggtgttcatatttcacacgagtcctactaacaagctgggtctgtctgtgtttgggaggggatttgagagaagacatgcatgg

SEQ ID NO: 35101 - DNA, 768 bp, Bovine  19866881815184
  misc_feature (1)..(1): n is a, c, g, or t
ncagtctttgagaaagtaacatgatgcccaaagtttatttggattttcaacattgacaaattttttaaaaatgtttttttgtatctgaagattacaataacaaaatgattttgattaaaaggaaaaaaaccaacacagtatcactacttactctatgaattataccagctgaatgtagatgtttaataccacagagcatctggtaaagaaggtaggacattctttcatggtccagctccatgtgaataacctgacataagttagcatccattaattccataaccaaatacctgaggaaataaatgatcagccatgtacacatgaaaattatccaaattccttcatggtatcaaatcagaatctttataaaaaagaaataacttcatacctagtcactgtactggctaaagtaaaaagataacttgctttcattaggtatcttgatttataagctatcttgaaaagaagcaatttttatatcatagtaaatagaatctccaacatgcaaagtctcctatatttaaaattttttgctactgggtcattcttaccaatacagaaaccatgccgttactgcttgcatcttaagaaaacttttgaccttacctcccctaccagctacgatcctgtatttttggtcttcctgcaagcaaaactccccaaagaggtatctacactcatcatcttcaatttttttctcccatttttccttattctcactttaattaggcttttgcccctaccactttcgctggaaactgtctttaa

SEQ ID NO: 35102 - DNA, 859 bp, Bovine  19866880429634
  misc_feature (1)..(1): n is a, c, g, or t
nttttccagcagtcaggtatgggtgtggccataaagaaggatgagcacgaagaactgatgcttttgaactgtggtgttggagaagactcttgagaagtcccttggactgcaaggagaaccaactagtcccatcctaaaagaaatcaaccctgaatgttagtggaaggacttatgctggagctgaaactccaatactttggccatctgatgcgaagagccaacttactgtaaagaccctgatgctgggaaagactgaggacgggaagagaaggggcaacagcggatgagatcgttggatggcatcatcaactcaacggacatgagtctgagcaaactcaggaagatagtgaaggacggggggcctggtgtgctgcagtccatggagtcacaaagagtcggacgttacttagcaactgaacaacaacatttacaggtataaacagacacgtgtggacgatcatgggctaaatggttaacatcagttaccacaagggaggcagtatcacttttttgcatgcatctcttttctatgccataattctggttttctccctcccaccatgaaacaaacagagccctacaaacccctgtgttttctggtgccagtcctcgcggatgaggttggacgtgtgtatgacgacccggaggccttcctcatacagcagaagcatcattttcctttaaaaacagaaaaaggaacaagcagcgttaagagtactctcgaaacacctttccggcacaaacgcaacaggtaagagaactctcacatcacccagactgcaaagtttatagtctccgtttcttccagacattctcaacgtctgctcgagtgacaggcagaaagccaccttccaagacg

SEQ ID NO: 35103 - DNA, 1555 bp, Bovine  19866880468139
  misc_feature (1)..(1): n is a, c, g, or t
ngaaccgaggctttggcctttcttggctgtttccaatgagtccaccttcccattgttcatgtaggtcagtaagttacgtagtgtgacctacgtaaagttagggttgatctcttccagaatacaacttgggctttcttcttatgatgaagttaagggaggctgatgcatgccttgcaagcgagcagaaggaccttttcagcaaagcacttgctcaattagggagctgctaattgaacgtcggtttggggctgtgatcaaatccgcagctttcccaagtgcctcctggcctgctgggggctctaggaaagctgtcttcagctgttactgccgtgttccgttggtggggtcactcgatagctgcgtctcaccttaccgacttgcagttccagatgagcccagtgcttgctgggatcgggtattttcagatctttgctcttgtcctgtgagacgggcttctgggctcacttgaccgactgcttaatcagctgctgtccacgctgtgtaaagcagatgagttcagggacagtgttttattagctgtgtaattctaggcaactgacagagtacagcaggtgagcaaacaccacgggcttccctggcggctcagacggtaaagaatccgcctgtaatgcaggagacccgagttcgatccctgggtcgggaagatcccctggaggagggaatctaacccactccagtattcttacctggagaatcccacaggcagaggagcctggtgggctacaatccatggggttgcaaaaagttggaagcgactgagcaactaacatgcacacacagacatcacgttcacagccagcaccaagactcccttgggcacgccacacctctgatcacgttcaggctgcagggaaaagatgcgaccgtcacaacttaaccaggcagaggccgtgcaggggaccgagtcatagaccaggcatcccttccagcccttggtcacacccccctttatgtggtttctttgtgggggacggagatcattcgagacctctaggattcctggaggcctgtcaaggagcagagtgcttcgtgacaaggtcttgtcaggtttggaagctgctgggatacatgtgggttagatctaggagctctagaaggattgggggattgggaagtggtaacactgggattgggaagtgggtcttgagggccatggttgccttgacagggaggttagcctggtcatatcctaagctgtcatcctgtttgtttatcactttggccgtgctgggtctgctttgctgcacctgggctttctccagttacagcaagcgggggccgctctcccgttgctgagtacgggttccagagctcagctgccccacagcatgtggggtcatcctggactagggatcgaaccgctgtccctgctttgcaaggcaggtccttgaccactggaccgtcagggcatcccaaggtgtcatctgaagaagagtttacaccgagaagagggtcttgccaaggaacatgaagcccctccttggagatttcccccagacttggggctctgattgggagaacggtggcaggggag

SEQ ID NO: 35104 - DNA, 1292 bp, Bovine  19866880492497
  misc_feature (1)..(1): n is a, c, g, or t
nagtgaaggagttcaatatatggacattccttcaaagaagatacagagaaggtcaacaaacatgtgaaaagaagctcaagtcactgctgctgctgctgctgctaagttgcttcagtcgtgtccgactctgtgcgaccccatagacggcagcccaccaggctcccccatccctgggattctccaggcaagaacactggagtgggttgccatttctaaggaaatgcaaatcaaagctactttacacccattaatatggccattattttaaaatttaaaaaaaccccgaaagtaaacactggtgaaggtgtgagggaattgaaccattgtgggaacgcaaaacaggataaccgctaagggacacggtggggcactcccccaaacaattatacacaggtttaccccgtggcccagcagccccacttctggggcgcacagccagatggactggaatcagggactcaggcattgtacacccatgttcggaggagtgcttgctcccaacagccaaaaggtgggggcagcccaagtgagcatcgacagataagtgggtagcagaacatggcccatacaacaaaacagcaccaatctttaaaaaggaggagattcagacacaggccgcaacacaaacattgaaacgctgtgccagtgcaataatcccatcgcaggctgaagacactgtgtgactccattcctgtgagagacccggagcagccaaactcagacagacggacggccgggcggcgtgagcagaggctggggaggcggaagggaagtcggcgttcagcggggacggcttcagaagccgagaaacccctggaggcggacggtgccgatggctgcacagtgtgaatactctcagtgccactgaactccacactttagaagtgtcagtatggtacaatttatatctatatgtaaccatgtaaccacaatatttttttttaaagatgaggagaggaaggaggaagaagagactgaggagaaagatacaggatttgggaagaaaagctcaaagcatttttgactgagatgactggcggtccttttcttttttccacagcagagggaatttctgatattgcagtctggcccacctccccagttctcctctcagagaacccctgtgctctagaaatccgtggacaagtgggcctgtgggtctgtacgctggcatgggaactagttttttcttacttcccagtttaatttaggggaaggcacttcaccaaagcactcaaacaggaaggagaaattaccaacgctgtcattttctcttcaacagcctcagattc

SEQ ID NO: 35105 - DNA, 944 bp, Bovine  19866880557549
  misc_feature (1)..(1): n is a, c, g, or t
nacacatcacagcttgatggaaagcgagcctgagtggggaattgggcagagagtcagaaagaagcggaagcaagcgggagtgggagccggcttaagaccatgacccagttttcaggcccagggcgaccaacagtccgcctcttgcgccgtgatctttcatttgcgttaagctggtcttcagcttgcgccataaaagctcattgcttctgtgcctctgcccaatttgctttcctctgtcaggatgcccttccatccctctgaattccactgattttttaaggccaggatgaagccccacctcctccaagaagccttccacgattcctccagtcccagttaagctccattttcgtgatacacttacagtatttgtatcacagaatctagtccttgatgatgttttctggaagggaactgtctcagactctccagccctcagtctgaagagaaagaaaaaaaagggttccttttgacacaggttgaataagaaagagacttgttaggtgcctggggtcagaggcgccccagagtggccctgcgcccaccctcacaagggcagccggaggggagcttggcaggcacacgagattatacagcagctgcgaaggggaatcaccagccattgtgtaaaaacatgcccaagtatacacacatctccgctgctgccagctgcaaagacccacccgcccatctgagaagcggctcaattgaaaaccagcgtctgcagttgcaagtgtctgccgttagaattgtggacttgtcttaaattcctatttcttgtcttgtacgtggctttcaacacatgtgatgaacacaattggaggggctctctctgatgccctcaaaattctttttccatttctggatgctctacccctggcttctgtgtttgcatccaacggccagcactatgaccgtcttcagaagattggaatttagattcg

SEQ ID NO: 35106 - DNA, 2748 bp, Bovine  19866880593653
  misc_feature (1)..(1): n is a, c, g, or t
ntggcaggacagggaagtgagtgggctgtcgttgggcagctgataccctgaagcagggacccagaacttctcagtctcatcactctgctctcttgctgtgtgtttcctacaactgcatgggctaattagcttactaccacgttcttctccccgccttaatcagaagccagaaggaaagagaactcaaaaggttcgctcctcctccctaacggcaaagttcagagggtgttttcatcgttcccacgttcattcaccagccagaactcggtcatgtggccatcctagccgacggtgttcagctaacactctggggttctgctgttgaaagcaaaaaagcgggaatggatactggtgaacaagtacccaccaggacttttgggtttaaagacactaaacagatgaatggacacaaatatatattagtaaaagtttacaaacacgcacggaaatgatcagcaccaaatccaagacggtggttacacggggaacaagggcgggctgggtcctgggtctataagcgtgtctgtcgtgtcctgtttttacatatttgaagcaacaatggcacaatgctgagccctgccaaagatgggtaacagttacatgggtgtctcagctttttatgttagaaataaattataatgaaatctacaaaatttaagaaagcttccctggtgggttcagttggtaaagaatccacctgtaatgcaggagatctgggtttgatccccaggtgaggaatatcccctgaagaagaaaatggcaacccactccagtgttcttgcctagaaaatcccatggacagaggagcctggtgggcaacactccatggggtcaaagagagtcggacccaactgagcaactaaaccagcatcactacaaaatttagccttgtctcaacaacccgactgcaactcagctcataactgaatcatatttcatcatattcatttcatagtatcatagtatcatcatattcatttcacagtatcacaatatgaaatgaatcatattcatttcatagttctaaaaaagcacatttttctacatgtgaactctgaaatgactacatctcattatattaggcagcattttctcttagtagggtataaagtcctacctgacaatgaatagtaacggagatttgaagatgtctaacatataaattctacggcatgtggactgcggtgcattttaacaggtttgacagcgggggtgggggtcgtttccacaagcagacgtagccaagctcacgagcctcgtcggccccgcgccggagctctctccgttgggtggttttctgatccacgagccagtgctctttcccgcgatagtgcctctgacgctgatgaaagttatgcaaaactcatacactggactcattttccctgcgactagcctgcgataaaatccttcctttattaaaccgctcgagaatctcctacctggtaaacaacagaagtataaacggcacctacaactgaaactcttcgaaatgggagaaaccagaatcaggtaactgctggaccaaaattttggacaggccgagaggacacagccatctgagggtagcaaaggcttctccttcgacccagagtgagctccatgcaccagacctacagaggtgatgggcaagcccacccgtggtcccgctgcctttgatatgtgctacagtagatgtgtcttgtagaaaatcagtgaaggatacacaggcaacattgttcctgccaacattatcaagatacaaatataaaaacaaaaactaaaaaaaagttttttaaagatgcaaataaaccaaaatggagggaaaataaattcgtacagctcgtttatttgaacacagaaaaataaatcaccaatttctttcctaatttatgaaagttttcttcatttctcacattcagttagtacacagttggcattttcaaaattcaaacctgatgtgaagcacactggaagacatgtgagtgaaaaaatagaagtcctagccatatgccactggtgcatgaatttgaatatctgaaaggtaatctagaaacgagcgtgtttccaactctccttaccaacaacagtaattcatagcaaccacacgttttgtagatggagccacttccccacgtgagagacaacaggagcacagacggagtccggggcgggagtctgctcagcctggtgagttacgagcctgtgaccttccccgggtctcagcctctccgaagctcagcttgggcatggataaggacgcaataatgattcattcctccctggacctattaacccataaatgtttcaagtttggttaacaattggatgaaaaaatcagaagaccatgcacaacggctccttccgaaagacatatgtcacaccatgaaacaagctctaattctaagcccattggattttcacttctttctatttacccacatagccggaaaggaaatgacccagggccaagccagcagcaggggctccctcccttcttgtgtgtgcccatggccggacggcaggagcctccagccccagcagggacggtttcctgacagtgcccagcgagcgttgctcattctgtccctgggccaggcctctaagtgggtcactcagccaggaaacacacaagctaagaatcacgtgatcactaatccactcacatgcattcaggggatgccaatccccgcaagactgaaatccaaggtgctatgttagcccacttccacaactatgtgtcaagaatccaactcatatgtttgcaag

SEQ ID NO: 35107 - DNA, 847 bp, Bovine  19866880600516
  misc_feature (1)..(1): n is a, c, g, or t
naagaaaagtgaagctgctcagcgtgtccgactctttgcagccccgtggactgcagcccaccaggctccatcatccatggaattttccaggcaagaatactggagtgggctgccattgccttctctgtgggatcttccccacccagggatcgaacccggggttctctgcattgcgggcagatgctttacggtctgagccaccagggaagccccaaagaaaggcaagtcgtatctccccactaggtgtcagacaccctagggttccatccctgatttatactccacagtctctcccagccccctgcatgccccggtgggcaggaagctccggaacgccatcacccccatgggtgctcccttttcactgaaccaaacattcacggtgaagaagaatgtgcggcagatgccggggccagttccctgtgcccacatgagacagtcccacagatccaagagctctgtttctcataccactttttgtaaaagtccacctatggtcagaaaataaatcctcctcaaatggatagattagcttaaatttccatgccattttacattttctctcctgatacatgaatcataaaactgtaaggtaaatgcaggcttacactgaataatgggcataaataaaaatattttgacttgaaaaacagtataaattgaactaccacgtacttgaaagctcccgcaatcataatgtgcacatcaaaacccattaacctaatacctaggctgctattcaaaagcagaggtctagcctgtaaataaatacccatttgaacacttctcctaaattactgtacaatttgattgcaaagtcacacacttacaaagtctatcatcttta

SEQ ID NO: 35108 - DNA, 3981 bp, Bovine  19866880618070
  misc_feature (1)..(1): n is a, c, g, or t
ngggtcgcaaagagtatgacacaactgagtgactaacacttcactttcactttttcacataaactactctacacttgggaagtgcctaccaaaaaactaaattacctaagaatatttgagggacatccctggtggtccagtggttaagaaaccgcctgccaatgcgggggagagaggttcgatccctggtccaggaagatgccctggggcagctaagcaccacggttactgaatccacgctctagagcgtgcgagacagaaatacagaaataataccctagagcacgtgctctgccacgggaacagccgccgcaatgagcagcctgcgcctgacaatgatgagagcggcccctgcttcccgcggtcagggcgcatctgttcacggcctgggaagacccagcaccaccatgaacaaacacacacaaagatgtttaaggaatatgtgaactgcagccactttttccccatcaataactaaataccagagctgactgcctactacagacacttccagatcacgagattaaaaccatatctgtctttgtacaagacgatgtgttcttatcacctgtagaagagaggctctcttccctccagatcactgtgaaaccagatttactgaagcatttcaagtttacctttagatatgggccattcaaaacacaaactcttgccagaacctttattaatttctataaaatcaaattactcatgaaagtcaaaggagtctcattaaaaaaaatctcaaggacggcaaagaaactgaccatgcttaaacaattttccagttcctaaggaggaagagggagaagggctctacagaccaccgggcatggtctcagcgctccttgtattcaagaaccctgtggccatgcggcctatttcactccacacggcaggaggaggagggagagaaggccgccgagctgaggtctacaggagaagagttgcacagcgccaggtagcatcagtgagagatgctgtgaacacaagcccaggactgggagttagccaccctgaaatcacctagcaacagcagtcaagatgcagcgtctcaaaagctgccgtgagaatggagtggggtgtgcatattcccagagactttttacttcaacaataagcccatcctgagaagggctgtgtagctgaattcgtatcgcaaagctccaagggctatttggagagcattccgtttctacccagaaggagaagagagactcggccccttcagaggcctcagagctgtcttctttcccttccctactcatcctttccagacaatctggaagcagggcagcttggaaagaggcagacgtgctgggctcttgtgatgggctaatgcctagaagggtccaggtctgctggcacccaagtgacagaaagaaagagctggatggagcacccgagtagatgttagcctttgcatctgcccacctgcaaaggagaagcaagagaggacatgagaggaagcgtcgagaaagcaaggaggcagagcactgccgtgactggggaggcgggcgtcgtcacccagtcagtgtgccgaagtaaactaaagatgtaaactcatgagttctggcctcaaagaggtaaccgaacccacaaggacaaaagggatgagagaggtgagagcggtcaagcaaagtctagaagacagaggcgtgacggctgaatttaggcacgatgaagaaagctgagacagactcccccagagggaagactgaccagatgccaaaggattagcctcacagaagcccgctgaggctctgggactgggggcaccaaacacagtggatggtgggagtgaggtgtggaggttagttacagactctacagtggaacattagatcttcatgttctcgaagtttcctgggcataaccaggcaattcctcctccctccatcccacacaagtcaggattaatgctggataaatcgaaaggaagagcacagagatgagacgccagactacaagcagaaggctaaacggacatcaagagcctgcttccctctacccagctggctatcagaataccagcacccaggcttacccctcatacagacccttctctaaagaaaagcaacggccccagaaggaaacctccggagagatgccaaattgaaaagcaactgggtccccagccagccacccacaggaagccccctcaagcacacaacttcaataaactctcctgaacttcacatttcaatatgaaagggcatccgaggaaaacctgtgctataagacacccggggcttagccactcagtcatgtctgactctgtgcaaccccatggactatagcctgccaggctcctctgttcatggggatgctccaggcaagaatattggagtgggtcatcatgccctcctccagggaatcttcccaacccaggtctcctgcattgcaggcagattctttaccatctgagcccccagggaagccctaagcaaccaggaaaagcaagaaagtctgaggaaacagagagaatgcaggaaacagaagaaaatatcgaaaccctaatgaatatactgtgtaagatacgagacagcattgctttctttcttttttcaaaagaaaagaacaggatgttgcaagaagaagcaagggaaaatgtaaagttcttggcaattaaaaatatgcgggacaaaacttaagaattcaacagatgatttggaaatgaggtaggtgaaatcatccagaaagtaaggcaataagacaaagagatgatcaagacaaaaggggaaaaaataagaaaatttaaaaatcagtccaaagttcaactattagagtttctaaatgttcaaagaaaatggtgagaagaaaatgattaaaaacaacacataaacaaacagatacaaacccataccttccctaaaacaggagcataagtctttcggttgaaaggttttataaagacacaacaaaattctaaaagcttccagaaaggaaaacaagtgtgtttacatagaaaagatgaacaatcaaaatggcacatgacttctcaacaacagaagctggaagtcaatccggtgttaccttcataatatggagggaagataactttcaatctagaatcatatatgtacccaaaccactgaccaagaaagaggataaagacatttctcaagattaagttctctgaaaacgtatctcccatgtttgttttttagtaaactattagcagatacgctccaacagaagcagcaaaccaaaaaggaagaaacacgggacccaggaagtaggaacgatacagaacacagatgagaaagaaatccctgcacaaaacctgttccagaacagactccagagcagtcagagcagataacaccagggaagacaaagcagaggggcacgtgatctgatacgtttgaccacgagcaaaacgggactgagagatgctattaggaagcataagaagaacaagagacaaaggaaaaaagaagggagggagagaagaaagtgtatatctccaaatgcgtccacaatcaaaaagaagcaatgtttattaacagggaaaagactaaaaggggcacaagaaagaagtctgtagtcacggtatgtcgctggtctcactgatgcacgcagcgttcatgtaatagtacagacagtgtgaattcaaaagcagggaagggggacaggtctcaatcatcacaataccaagtcaaagggtaatattttaaattgattaaaaatcaagaagatgaggggaagggtacactgaatgtgcatgcttagtcaagtccaactctttgccactctatgaactatagccccccaggctcttctgtccatgggattctccgagcaagaatactggagtgggttgccatttccttctccaggggatcttcccgacccagagattgaacctccgtctcttgcatctcctgcatgggcaagtgggctctttaccactgggaagcccaaagacacattactatttttaaaacatttccatcataattataacagcaatacaca

SEQ ID NO: 35109 - DNA, 1735 bp, Bovine  19866880635225
  misc_feature (1)..(1): n is a, c, g, or t
ntggttaagagtccgcctgccaatgtgggggacacaggatcaatccctggtccaggaagattccacgtgcagcacatcaactcagcctgggcaccgtagctgctgagcttgcgtggcacagcttctgaagcctgtgagtctggagcctatgctctgcagcaagaggagccccggcaatgagcaaccccagcatcgcaactagagaggagcccccgctcagcgatgaagagcccgtgctctgcaacagaggctcagcacagccacatgtcagttaaattttagaaacccccccttagccacgaaggccgtgctatgcacagattccgcctcctctcgtggtcttcaggcctggccaggagagccgtgtctgaggggcccctatgtcctgtcccccagagcttgtctgcaaggcatctggctcattgcttggctgggaatgagagctccactgacgtccgtgctgtttgcagcagggcccacaggcaagctttcctccccatgcaatttacaaattgctagtggaccaactccgtggatggagggtccattcccttctttgacagaatatttggaaaagcaagcagtgcccctggtcttctctaaacgccgccttattggcatttggcttcttgtaatatatttttaatatactatatatgctgtatcggagtaaatcagtaggtatgttttgaaattaaatatttgctaagggctaggttctcccgatgttaaattattgataacaaacttcacggacgctgtatgagacttgatgatatatgagttttgagtgacctgccatttattagactttatctgcccatgaaatccatttccaattcagaccgtatctactgcaggattgcttgccagaaatctattcccaggtttctccttatttcagtgaaatatctctggctcagcacctttcccaaggtggctgatctaatcggggcccaatcgcttatcacttctcatttcctttggcaggtctgtccaactgggaagtgcatctcggggacgcttgggagcagtagtcgacctccctgctttgccctttccccctgcttagaggaaggtgagctccctgacccgcagccccgctctgggggtccgtaaacagcaagaggaccgcttgcgtggtcaggaaagcgggggtggcctcgctgtcttccctggtgttggggactgtcgggggcctccctgtacccggcagtgttcagtgaccccacgcaatcggaacccgcttgctggcacagcggccacggggccccatccttctgctcccctccccgccgacttccgtgtggacaggtgtgtgcttctggccgctgcaaggcccagctggcaggagggctccaacttgtcatcacagaaataaaatttgtcacctccgtgttccccacctctgtcctttcatgtttaaccagcattcagaatgtttacaaacatgtcaggggtcctgtttttctttcctaattaattcagaaaaggagcagaagacgtcgctaatgacataaaagagaaagggacagatagcgctgggagcggcttctttgtttttcagttggaaacggcagttgaacgaatatgggcatctggtaattggagaaattacttggggcctctcagtgcctcggtgattcctgggctagtcctggactgatcagaatttatgaacaggtctaaactgaccaaatccgatggcaaactttcctgctcataaacgaacgga

SEQ ID NO: 35110 - DNA, 1226 bp, Bovine  19866880646147
  misc_feature (1)..(1): n is a, c, g, or t
nagagcaaaggcgtggccagaggagtcgcctcttcagccccacagctgggttttgtctggatgtttccctcatcccccttgtgcccctgatggaagtgaaggaagcagtagatctctgccctacagggcttccaccaaaattgatgcttgctgttcacagattatttcctttctacttaggtacaaatctgacagagaaaagaaaggaaagaggggagaaatggtctaagatgcatgtgtgggcggagggatccacgtgaagaagccagatttgtgggcctggcaaaggccactccatctttcccagaatcaagtaaggaggcttttagtctgctaatggagccacacatttttttatggaggctgaatatttcaaaaatacatttgtctagagtggtagctatttttttagttttctgtttgcacatggagtcgttctgttccagcagacagagtttgccaccattatgcaacaagtctttcacttcttcagaaacacagcctctgtttttacagttcccactctcggggtggatgtgaaaagtcccagaaggcacgtgcacagacagtcaggccttgtgtggccgccccgctgccgctcagggcctcctgcggcgcttccttcttcctggttttgaggtagaaggctatttagcttctgcttgaccacagtttcccaattagagcgacttttgtctcattaaggtgggcgttctttagggctgaaggcatgatagcttgcatttctatgtagtagaaaaagaaaaaccccgtctcccatcctttcttttctatacatgttgaaatgaagcttttttcctactggctgcagcctttgccctccatgagatgctgtcaatgacagattcaggagcccagcctccttctggaaaacagaccgtgaaatgcgtgtttgacatcaagtgcattgggatgaccatgtcgtgtttcttaaaccctcttgagaaaggagagaactgagactcacgtgatgcaatctgagtcccatgtggcctcggccatcctgcagatttcctgagggtgctccgccttcatctgcgccgtatgctttcaaatctgagagagaggtgctgcatttcaaggtgggtgatgatctggcataaattccgaagcacagcagtgttctttctcatgttgggggctggaagtaggacacgttattgggaagcagggctgaaaacttgaacctggcttctcacagcatt

SEQ ID NO: 35111 - DNA, 4789 bp, Bovine  19866880708350
  misc_feature (1)..(1): n is a, c, g, or t
nccctcactcggcggggcgcgcggggccgcccctggacgcgccccgacgacgacccaccccgtctctgggttttgtcagactttctccctcagcccagtggggaccaaggaaagcgaaagccttctagctaagcagagtattttcttaaaaaaaaaaaaaacaaaagacagcacacaggctacaactcgctccttgggagcatcacagctccattttctgatcccgatcagagggccagacgctgttcccaccgtaaaactgttcatcaggcgaggtgagccaagccgagcccttctacaaaagcaagagaattaaaagaatgtatcttcggatggctaacaaaaatgggataaaggacggcgagggcagtgcggcctatggaaaaccattttgcgaggcctctaaaccagaggaaacaggattggtgggttaattatgtaattaaactgcagtcagcagtgggcagggtcttctatctttcaaaattgaaactagttattcaagctttcactgaatacactttatagagattctctttggggactgcgcccaatttttcctgtttggattagacttttttttttttaaagggctgctttgccaatttggcttttagtctccaggataaaataatcaaaccccccttccccttcctcagatacattttttttgctttatttcttcagagttagaagaacagattattttggggggtgggggcagacagccaaagaaatatcgcagcaaggtatctgacttctttacagacacacacacgtttcctgtttgattttggttttcaaaagcagaacaatttttacatcattatataaaggccttccactatttaaaatgtcggtgctaaattaattttatacccgcaaggcacactgcatctgaccacactggattctatccacttaataacatgagagaagatcttggacaagaatttagtgaaaggaacagtaaaaacaaaaaaaccaaaaactctcagtctagaacaagaattttaaagtccattgtttgtggaagcttggctttgttttttcatagggcaagcccccagctgttcaccgtcagcccaagtgcagaaggaaagtggcctctgctacacggcagtcaagagcatctgctggactgaggcctacagtgacgtgtgatacacgggctggctggtggcggcgagacggctgaaaaacccagcgaccgctgtcttaaaatttcagcagctgggcagacgtggatgtcgtaatgcagtgggtccctgtatctaaaactgttcattcaccctgaagacaggcttcttaagaagtaagaagcagaagaaagaaagaagtaggatcttcttaagaaaaagctatctcagttcctcttgaaaacgtttgtaatttgctgagagttgctgcagaagcaacatgagcagtgggacatgtttgacaacgagcaggaagctcaggggggcggccagcgccttctgtcatcaggcacaccggggcggactcgcctccgctgatacgcaagttggttaacaggcatttacacaggatttggtgtgaacagatgctcgagtagtttacaagtggtgtgcgtgcgtagcgggcaccagagaaaacataacaaaaggcattatgtcttgatggggtataagctttctgtcatcccaaatggataaaaaacaaaaccaaaattctttaaaacgccaacattttacccaggggagataggccaacgggaaaaccatcttggcacataaggtatttcttacatacattgcaaatacatttcgaatgtattcaggacaccacttctcacccataaccctgtgttcaccagcttctgcgagaacctcaggaatgaccttcaaccaggtcatcgccttgagctcacccctggctaaggccactgtccacgtggcaccagtctcaagaaccccttttccttccgcacctctgccaacctctgccagcgcttctccaccctgtaagaagcggcccaaccttccctccaggcacttacagccaaatgcactgtccctgtcaccgaggctgccagcctgggaacccccccatccttccttcctaggaaaactacccaccccttaatgctgttccctgtcgtgtagagtcgtcagtaggatctgctagcaccgtggggctttcaatcttcatgaactgcaatcaagccagacacttcctgagggccaggggggctcaagaggcgtcttactatcttttctatttatccttctccaggcttgatcttttctgtgctagttttaagagaacaccttcagttagctgagaaaataagatgtgcaagtcctggaaactgctcaaagggagagagtgtttcaggaaaaggacaagaaagagtgtgagacctcccacatggactattgtcttctccttacccccaagggccggtgagaagggcgctagaaagtctgagtcctggcgccgacacacgtgggttctccttcaccactgctgtgtgactctgggcaagtcaccccacctctctgagcctcactttcccttccaaagggaaccctataccctagttcatggagtggctgctaagaattaaatgaaaactacggaacaaaaacacattaaactttttgtgtagttgctttaggaatccgagctttccatttccaccagtccatcccaacaaactatccatggaaacaaagcccagccctgtaagctctgaagtgacctgtatcccctcccctgggtgaatctctcccctgagctgagctggtagccacaccgcgggtctggctcactaagctggtggctccccaaggtgccaatgcactcaggcaaaatgaagcaaacacctgtattctatttgctaatgagcaatcatcatttgtacctttctccagcctgggattcagctgcctggaatactaatgccattaagcattgcagtcttttttttttttggcaacatacatactcattcagcaaaacctggtttaacccactgacacgggtttggttcctgggattccctaactgtgtctggttggtcccacggctcttgttccctctctgccccgcctccccgtgcctgaatgtttgggtgtttgagtgtggcttgggagccaggaaacctgagcggtcccagacttgccttttcaactgcctcagtggaaacaatgagacacgaccatggacctttctctttgaacttaatttttaatcacacgattaatacaagaatggagctgcttatttttgaaatcaggccattctgaaaaagataacccgatcttacagcctcgccccttcactgaatgtgacatttccttggtgtgttatctgtctagaacttttcctctgcagacaagcagacaagaatctgtgtctctcaaaatgatagtggttgctgtcttagataaatgcagacaggcttacaaatcgctctgcaacgtgcttcttccattcactcactagtgagtcctggcccctttccacctaggatacagagggatgcagtgcgtgcctttcgctgctgcagagcttatttcaacacgtccctggaaatggacatttatttagattgtttccaatttggggcttttataaggaaagccgcagtaaacacaggagggacaggtcctccggggaatgcgtcctaaagaaactttctgggcctcactttcctgtctgtaaaacaagaaggcaggactgaacagtctgttgtgactgtacttgcagccgacgtcatgtgtcattaggggcaatcataacaaggctgtgtttctaacatgaaggtgattctcaatccagcccccggctaagactccgccaaggtcttccatagtctgagctcactcctccgccaaggtcttccatagtctgagctcactctttcttattttctgcttttatctaacacatccagttgctcctaatcctacacctttgctgactccttctcatgactaagaaattcctgcccctccttaatacttgacacgtatcattggaggagctcagagcttattatttgcacggacctgcacctctgggtgaacgccagcccccagggaaaggttgtgtctgtctgtccatcaccacagcccaggagccgggagccattcccctcacccagtgggctctcatcaaacagctggtggacggatgactgtttttaatactttgggcttcagctaggactttgaagtcccaagctaggggcttcccttgtggctcagacagtaaagaatctgcctgcaatgtgggagacccaggttcaatccctgcgttgggaagatccccaggagaaggaaatggcaacccactctagtgttctagactgggaggcctggcgagctgcagtccagggggttgcaaagagttggacaggctgagcgatttcttttccacatgagctaggagtgtagtctggggcggggtgacttagcctctcttcacctttgtctcctcagctggaaaacgtgaaatagcacctcccttccctacagggctgcggtaacttgggtaactgatgttccttctgatcaatgggctatttgggccgcccctgagagtgcaggcggggcagtgctgggatgtcagagctggatatgccggggctgagtgaggcagaggctgggctggggcccgtgtcacttaccgtgctgaagctctgtggacagcctactctcccgtgtgttacgacgacggataatcccatactggtaacaacttaggagtaaacgtttggcctgcttatttcgctttttgcaaacaaagcttcctcatctag

SEQ ID NO: 35112 - DNA, 1227 bp, Bovine  19866880732719
  misc_feature (1)..(1): n is a, c, g, or t
nccccaccccccgcctcaccctcattgggatgacttttccatcctttccatcatgtgtccataacagttgggcttcaaattgtagcacttatttcactatattaggatgagttgtatcttttcttaattgtgatgtaaatatatcaaagacacaggacctgatttaggtacttctgtagctttggccagatctagaacagtatttcaaacttgtatttcactgaatccttaaacactcgcaaagatacgcatcaccgaacaatgaaggctcgagacgctgaccactgtcttctgctcagacagtctgttggacattgagattcctacatctgtgtctgtcacagcaccaagcatcaggactaattcagccacttgcagatgcttccaagcttttggctgttcggcatcatccaaacacagaaaccaggtggatggctgataattttttttttaccttcatggaatcaaagattttagagccagaaggaacctcagggagttaaactcatgttacagaggagaaaactgtgacttctcccaaggcgcacggctgatcagccacccaggcgagtagacccagctgacccctccctccgcggccctgcctcccgagcggtggcattggattgcactgaagaccaacccagtcaattcctttctgccccaagccggaccggctggccttatgatatcaccaggatagaattaaaaacaaaagtagactgagagttgagctcagggggatggagagcaatgctaacagttcattcgccatcgcttgctgcagctacagcaacttctggattccgtcaagttcagacccttaaaaagagtggaaaaaagaaagcacatactttccagggcccgggtgctgcactgcaggccagctgggcgtagcaccatggcaaaaaggtctcttcagtttcagaaattcgagacccagagcttgcatacagggctgtggctgcacccgggcctgatctggcatcgcttctgcctgcggttctctcagacgcagctcctgtgggaagcccattagtgtctaaagaaagaaccagccctccaagttgacacaaggagcaggctgatgtgtgcgtgtgtgtgtgtttaaaggcctgtgtccgaggtcaacagcctttttaagagaactcttggttttctatgtaaacgtgtacttcctctggcccagagttagcctgttaagggaataaagcacaattcagattt

SEQ ID NO: 35113 - DNA, 959 bp, Bovine  19866880776398
  misc_feature (1)..(1): n is a, c, g, or t
nttttaagaaaatgtcagttttcccagggggttcttggctgattttgcttcatgaacaaaaatcatacccttgcatttgaagatgctctctttttaccagtaactttgagaattggtgatgctggtgatgcaggaactgatgcccagaaacaggaccaggaaaccagtggagaagagcgatgacttcattgcatagattttcaagtagaaggtgttggtttggtttcttcaattaagctgattagttcatgttacaaggatgtactatttgattggaaggaacatttaatctctttcacattctggatatccagattctgtagccctctctcatgttaaacccatccagatgcaaatcctgctcttccttccaggcccagatgttaagctacttcttatcttgaaacctgaccccaccaacagcctacccaccacctcttaacccaggaaagaatttgtctccttttctcattggagtataatagctttataacgttgagttactttctgctgtacagtgaagtagctcagttatatgtgtacatgtatcccttccctcttggacctgcccccatcaccgcacctcccaccctgccggtacctctgggtcatcgcagagcacgaagctgagctccctgtgctaaactgcaggttctccttggctacctgatttacacgtggtcatgcatttgcttccctggtggctcagatggtgaaggatctgcctgcaacacaggaaacctgggttcgatccctgggttgggaatatcccctggagaagaaactggcaacctgatccagtgctcctgcctggagactcccgtggacagaggggcctggagggctgctgcagttcatggggtcacagagagttggacacgaccaagcgactggcacgcacacagtgtatttttgtcaaacctaatctcccaattcatcccaccctcctcttacctctg

SEQ ID NO: 35114 - DNA, 1248 bp, Bovine  19866880778310
  misc_feature (1)..(1): n is a, c, g, or t
nctctagcagcctctgccacattttttaggggtagcttccctttacgccgagtggagcttctttaagtggtccattcaaatctacaaagaaacccctggcatcttttattgatatgataccggccacacaactgaagcctcttgaatctttctcgaatagctctactggagtcagaggcaaaggtgcagacggggagcgagtctccgcacgttagaaggaggacctttacaatgttgtattggttttgccacacatcaacatgaaaccaacacaatattgtaaagtaattaacctccaattaaaataaatatatttatattaaacaaaaaaagaaggagggcctttaagtcgtccccagttgctgttgctgtttggccgctacgtcatgccggaccctgcaaccccacagaccgcagcgcaccaggctcctctgtccttcaccatctaccagagtttgctcagattcatgtccattgagtcggtgatgctatctaagcatctcatcctctgccacccccagtaaaaaaaaaaataattatggaagtgacatcattttgatagttcatcttcttcctccttcctcctgtcttcctccaagtgcgagagagaagggtcattattcttcctcctctgctctctcaggcttggaagccctgatgcagaccttcaggagacactctcagctcaagaaaaaagcaacaagcctttgtgaagtcatagcaacttagtgggaggagaacgaaatgttctcagctatctcttgctactgaagatgtgaagggaatgtaaataaatgtagacagtacagtttgctttactgaaacacaaaaattacagggtttcaatctacagaaaaagactgaagttttctgacagtaggcaagtacattttgtgcatttagctcccgattctctcagatatgaacctccctgggggacagacttgaaatccagaggaggagggtggtcctccctcctggggtgcccaggacacccgcagggtacggctgctctcccagtgtggtcactcactacaccttcacgcgcggcagcagctcggtgagatgaagtgttacagggccacgtgtgaggatacagagggagtttctttgcgtctgacatcactgtggcaaaatgacacttttacatgacgagaagaaggttaagcaaatcatggcttatcagtaaggagaaagccaccaaatcacgactatgtacaagatctaagactctgcagacccacggtg

SEQ ID NO: 35115 - DNA, 1562 bp, Bovine  19866880846117
  misc_feature (1)..(1): n is a, c, g, or t
nttagatttataagaattgcttaagtgctctgggaggcctgtttgttgagtcaggcagttgagtacttacaaatttaatatgttcgatttcctttacaaatgcagtttaaaatgtttaaaggagtttaattagctaagtttgcaaatcaaaccaaacattaataataaaaggtccccttaaaagtgattgttaaaaattgttagcttataagtaaaataatgagatgtctgaatagttcttaaaagcctgaggaaaggtaaggttacagattttctaactaataaaaattaattttaaaaagagataccagaataatcttcttttgctcaaaatactttgaaactccaccctgcctgaaattactaggcacctgaattatcttacctaattactgtccacctaaaaaattaccttttttagttacccaggcttccacaagaatttaagtaggtgtgcctactgtgtgtcggctataatgttaggcataactgggtatgtctgggctcttccaagcatctggtaggagagactgagataagtacacaaggtggaaggaggcttcccagctgacgtgagtggtaaacaatctgcctggccatgtaggagaccccagagattcgggttcgatccctgcgtcggggagatcccccgaagcaggaaacggtagccccctccagtcttcttgcctggagaatcccatggacagaggagcctggtgggcttttgtccacggggtcacaaagagtcagacacagttgagtgactaaaccaccaacatggtggacgaggtagaacgcgtacacggatggttagaagacagatgacaactgaccggtgaaggtatgaagcaacagtggaattcagcggaaggtatcgatgaaggggggagacccagattccagccctgcgtcaggaagatcccttggaggccggcatggcagcccactccaggattcttgcctggagagtcccatggacagaggagcctggcgggctacaatccatggggttgcaaagagtcggacacgactgagcgactaacgcatccatggagggatcgtgacaggagtgatgtttgcgctgactttagtttggacttcccctgttaaggtctgcgcgccccccgccgccctgcgtccgtcacgcacacactgacgcttaggtctgtgcagcccccgccggcccgccgcgccctgcgtccatcacgcacgcactgacgcttctgctgccctgtgaaccggaaactcaggttccgaaagccccgcagaattctgtgtaaagtgaaggtcagcaggacgcgagtgcaagtgcacaggagactcccaggaggatctgtgacatgactatggcgggccgtctttgctcagctcctgttttctctgtgagcctggttccctatcccccactcaccctacaggtgaagctggcagataactgacttctggacaggatcctacccccagaaacagggtgaccatggaccaattttagatgtgaaatgagggctgctttattttttaaattaagtccaaaaggcaaggatgcgattctagtgagaaaa

SEQ ID NO: 35116 - DNA, 1180 bp, Bovine  19866880909374
  misc_feature (1)..(1): n is a, c, g, or t
ntgtttccccatctatttcccatgaagtgataggaccggatgccatgatcttagttttctgaatgctgagctttaagccaactttttcactctcctctttcactttcatcaagaggctttttctttttagttcctcttcactttctgccataagggtggatcatggaaaaaggaagagagttccagaaaaacatctattgctgctttaaggactatgccaaagcctttgactgtgtggatcacaagaaactgtggaaaattctgaaagagatgagaataccagaccacgtgacctgcctcttgagaaacctgtatacaggtcaggacgaaacagttagaactggacatggaacaacagactggttccaaataggaaaaggagtacgtcaaggctgtatattgtcaccctgcttatttaacttatatgcagagtacatcatgagaaacgctggactggaagaaacacaagctggaatcaagattgccgggagaaatatcaataacctcagatatgctgatgataccacccttatggcagaaagtgaagacgaactaaactactcacctaaagtctaaataccatgtattgttggcagactaaacagtagtaaataagacatgcacatgagacaatgaagagaagattctctttttctggctgtccttggcatttcaattgcttgaaacttcaaacttcagagctcttctgaaaggcaatatttaatttggtctgaaagtcagttcccgaagagaagaagctgatgtgtttcaatagtgagttccctttacctgaacgagactctgctgtgacatgctaccgccgatggcaatttaaatgcccgtgagaacttcatctctcaaactttgctccatgtcagcctgagatcttcctgaaggcagagctttagatgagggcttcgcgcaggttgcttgtttggggtacaacctcggggagcaagcgtggaccggtgagtgagggcaagcctgaggtgaaggagggcttccctgagtccagagagccaccccggaaggaccaaaggacagtgactatccactgacacctgtcccctcacgggtcaagaatcagctgggggcgttaacgcctctcttcatactcgcgactgtgcgggcgagggccgccccgggttggagccacggtgggcgcctggaagcacgtggg

SEQ ID NO: 35117 - DNA, 1525 bp, Bovine  19866880950811
  misc_feature (1)..(1): n is a, c, g, or t
natgaaagaaggaagataattcagagtcagtcacagcacactcttgctcttaactggaggggcaggatatcgatgaggtaaattaactccagtgcatttagagtttatttacaactaaaccgcaaagcctccatctcatccatattcaatcagacaaaattgtggctcatccaagacaagacatgagccaaatttggggcgaggcaaagggtgacgacatctgaaagggctggaaatgaagtgcagatttgaatatcatctgcatataagtgataattaaagctgtgagactcagtgtgcgccaagagagaaagtcaataaaaatgaggaaaacagagtcccaagctacgtggtgcttctgaaatggaggttttacaaaataagctggtaggggcaagattgtctttcctcttgaatgatctgaagacaaatacaggtcacttgtgaggaagactccttttcttgcagagagtcactgaatcacttgattgttaaagcagaggagctttcttgtaagacttaacatttcaaggaaatgttacttcatttagtttaacgtaaaccattctttctccccagagagatcattttggtaagtaataacaaagagaatgacccattcgagctcacatatgcttgtccttttcaagattggcattacatttgggctgggaacatgttgctttatctggtttttcagtgatttcattcatgcagtgaagaaatagcttctcttttcctaactgggtctgatcattataacagcagcataactaaagtaaatgttaacaggaataagtccataagaggactagctcagaaagaattattcatgatgaagagggcagcttttgccctaatcatccctctaaagatctatgacttagggctctcttctctctctttttaacttttttttttttagaccaccagctctccagaccatagacacttccaaaccacttgttcctcagtagcatgggcacggagggacactcaccctgagccacaggcgttacgggttgaatagtgtgtgtgttagtcactcagtcatgcctgactctctgcgaccccatggactatagcccaccaggctcctctgcccatggaactttccaggaaatactggagtggatagccattccttctccaggggaatcttcctgacccagggattgaacatgggtctcctgaattgcaggcagattcttttccatatgaggtaccaggtaaggctaaatagggtctccttaaattcctatgtggaagttctaacccctaggtcaggaagcaacagttagaactggacatggaacaacagactggttccaaataggaaaagcaatacgtcaaggctgtatattgcctccctgcttatttaacttatatgcagagtacatcatgagaaacgctgggctggaggaagcacaagctgaaatcaagattgccgggagaaatatcaataacctcagatatgcagatgacaccacccttatggcagaaagtaagaagaactaaagagcct

SEQ ID NO: 35118 - DNA, 3115 bp, Bovine  19866881092281
  misc_feature (1)..(1): n is a, c, g, or t
nagactcgtggggtccggttcgtattttggcttctgtaatggttttcctctaaagaagagtgtagtcctaaaaccaagcaagaaaaaaaaaaatgtgcgttttgaagaatgagttattttggcaattcgcagcgagtggagcccactgccgttagcgcacgatgtcttcttagtcctccccctggggactcaggccgtcagcaggggaggggcgtggaagaaagcttcgggagcacctggggcccgtactgtatcctagagtaatacccagagtaatccggtaatccagtgaggcagtctcagattaccctcacatgtaaaatcaactgtagactactgcttttctcctggttaaatattaaagtctcaggcagatattatggctgaaatagcagttcacaggacttttagtggtgcatgaatgttatgtcttctgctttcaaatagatcgtggatatttaactctggaagatttcaagaaagcatttaagcaggtggctcccaagttatcagaaaggattatcctcgaggtattcaggtaaggcatcagtctttatgcatacacgcccttgttttaccgttggcttgtgcaagttttcggtttcacggagaacactcatttatggttatttttcactagtggatggtttcatgtcgcaggatagtgtcatggtccagcggagaattttatagttagctgtcagtccatccacagccttggcagtgagccctgaagtgggtgcagtgcttgcataccaggaaggtgcaaaaatcatttgttcgtaggggtggagagaagcagagagaaagtagagcttctttgtgtagtgacgtgttggccagacctgccccctcaaagctccgttaatattaccgtggatgctggcgttctcctgtggtctgcatttcatcagacgcgggttgcaccctgtgcgccgtgtggagagtagagctgggttaatcggtggcagcccctccttcgtttgtgttcaaagtggtagacccaggctgcagttcacgcacacccgagagagacgacgtaaagactgtattcacactgtctctataaactaatcctgacaaaacgggcagatgcttaaaagcagtttctgtcaggagactgcagatggaaaggagtgtaagccgtgtcagcacacgctgctgtgagaactgacacagctgcctctgttcagactgctaacacgagctcctcatcaacctgttgccaagggtgttagttagggttcagtccagcaccaaaagccagaaaactcaaaataacaaagctcgcaaaagacagccagtccagggctgatctgagggcagcacagtggtgaagaacccagattcctgcccttttattctggctgcctcagcacctggcctctccctcctgcttccagatggctgccgaagttccagccatcacacctgagttccaaataggtaggcagaaagataggcccctctttttaaggctatccattatttcttcatacatccctgtgaccgaagctaagttccaaggccatgagtagctataaggcagaggtgggtctggaaaatgtagtctctgctttgggcagtcgtgtgagctcaaatggaatttctgctatgaggaagaaagagagaagagacattggtggacatctggcaggtgttcccatttggattaaagtaatttcatgaaatctgaccagaagccagtcctcagtagaaattatcaagcaggttatttgaagtaagaatctacactcactgccatcaatagtgacatatatgaaattcctttgctgcgtcatttgcaagcagattactgagcaaggtattgaagagcaaaggagttcaagccaggtgcagacaaggtgccccaagccagtatgacacagtttactccagaatttcatggcctttcagatgctgtggtatctgtgtgtgcgttctgggatgagtaatgagactcagggtatttctgccacacggtggtgctttttcacaaaaagaatgaagaattacttcattttacttttacaaaaagacaggtgtccacatttgctgacctttgggtgttgaacggttttaggagctgtctcctcgtgctacaaatgtaattttgaaaaatccacttaagtacagcctttcaaggtagaagccgtgttttaacagtgaatgggaaagtaactgcttctccaaagaaacctatgctatagggagaacatttttgagaatgggtgtttggaaatgtgattctatttttaaaaatatgtgtcacccactaaaacctttatatttgcatgctcaataagtcggaaacagagtattctaatctgtggaaaaaaggaagcattgtgattggacagcacaattttttaaaagtatcagtgtaaaaatttaatagttttgataagttaggagcaactaactgaaatcaggagagatgaatatttatgagctgaatctcaattaccaataccaagaaaatggttaacaaaataaaacaaaccccttaagtttttttataatcagcggatagaattaaaaactgagagattcagtgtcacgatgcccatttcctgtttagatctgtctaactaagacctagtattaaaacaagttgaacttgggatttccctggtggttccgtggttaagaatccgccttgcggtgcaggggccataggtttgattcctcgttggggagctgacgtcccgtgtgcactggagcaactaagcctgtgcccctcaaccactgagcctctgagccgcaaccagagacagtgtgtgtgcgcctcaaaagacccgcgtgccgaagcgaagacccaacacagccaaataaataataaataaagtattaaaaaaaactggaatcactcagtcacaaagaattcaaccgagatgttcagaaatcataaattatgtgaaaatcacattgttcttgttaaatgttcttaattttgagtgatggcaaaaactcatttgccatgaataagtgaaatatttttatcttttttttacaaatttctgtattttataacgaacataaagtatgaatattgtagcacatgtccacatcatctatgcataaacatgtactcatgcccacaaatcctgtactt

SEQ ID NO: 35119 - DNA, 473 bp, Bovine  19866881143732
  misc_feature (1)..(1): n is a, c, g, or t
ntcctccgttgcccagcaggcggcttcctgtcagaattcatttcccacttggaaagtatctctctgacccgctgacttctggacacaattcacccttcacgtatttgagtctgccccgcgtcacccgtccttagcacctcagacgccaaaagaccctcttgtaatcagagtgataaaaatcaccataaacgtcaggaggcggaaagctaagaagaaggtttgaagactttcgttcccttgatctttctaatttaaaaaatgcttttagcatgtatctatttctattacgatagtttaagaaattaatgacttatggttgaagccagatgttttctcagttccttcagtctttggatgattcagttaagctttggcagagttgcagtaaattcagttcagtttagcaaacagggtgaccctttggctggccctcctgttactgtggtctctacacgaaccgtgctttagttgca

SEQ ID NO: 35120 - DNA, 689 bp, Bovine  19866881144456
  misc_feature (1)..(1): n is a, c, g, or t
ncctccgaggcgcaggcgcccgttcacagcgctccctcacctggtaggtcgtggaaaatggcagaactagggttgtcgggggtaattctttgaagcactgttactgtggttgacgttgatcacttgctacttcagttgcattccatgatgtcaggttgaccacattcacctgcggaagaaggaaaacaagccctctcagagaagagaagggcagcgttgtgtgtgcgtgaagtcataacacagcctcattgtctaccgctgcggccatcaaggatatactcttaaaataacccaacaaggctgatgcttcgacgttatgaaagaacctacaggggctgtcaaaactctatctgggttaaaaacggttgctctgctcccagccctcctgaacagaggctatttataatacagcgcgggtatttgtgctgctggcattgtatgcatcctgaatgaagagtcagctctttaaaaagaacattaaaaatgaaactcgtgttgtagaaatctgacttcgcccaatgagatggcaggtgtcataaacggctgcttatttcccaaggtggtcagagctgtcctcttggtcctgaggtatgttgacctggccttcagaccttgccctctttttttttttttttttttaagcaatgttctcatatgaaaatacatacatacttcctaaccgtcacttg

SEQ ID NO: 35121 - DNA, 871 bp, Bovine  19866881152012
  misc_feature (1)..(1): n is a, c, g, or t
nactgtatagcacagggagctctagtcagtgctctagtgacctctgtggggaaaagaatctaaaaaagagtggatgtgtgtgtaactgacccccctctgcagtgcacctgacgctaacacagcatggcatagcagctgtacgccagcaaaagtttaaaaacaaaacttttcccaaagaagaaaagctgtacgtgggcatgaaactgagcattaaccattttcagcatttccttgtgaagtcggcgatccgaggacagaaaaccatgttctgagctgtcacggcttttctctccatgtggtcggactgagtagctttcgtttttgttctctcacagcttctaaaagagcacgcctcacccatgccgaaagcagagtcttggccggtcataggtcagttctccagcattggctccatgggggcagacgaatcaaaatggttgtgttctgagtttaaagagagcctggtgaccctgggcaaggagagcaggaccctaggaagtgctgctcctctccatctggtgagtgccctcctccctgaggtcactgttctcagcctctggtccaggagaagagtcaggtctgtcctccttccacagaaaggggtttcgttctgtgggtgggggatggaagacgctgaatgcagcgcggtggcactgccgtttgtgagcaagtttcctaatagcgtctgctgccggggccactggttttgtccaagctctggctcagccacagactagcctgcagattccccattctttcctttaggtggtcaagccaaggcaaaaatttttgataaagcattgccagcagaattacaggcattattaattatttagagacatttgaagtaagaattattttacattcagtt

SEQ ID NO: 35122 - DNA, 1577 bp, Bovine  19866881198945
  misc_feature (1)..(1): n is a, c, g, or t
nccatgaagctgggccgggctgacccctggcgggtctgctgagctgcgggacaccggggagactcatgggctgccgggggcggtgctgggccctgacctctcagggaagaacaggccatttcttgcagtcaggttgaagatttaattgatgtttttcttctctctctctcttgtttttaacctttctcactagtcagttctttctgcgatataggttctcctggtctactgtcatgtactgatgtttttattgctaacaagggattgtctgttaattctctaggtgctttttaattaaaccaatttggcttcttccatgtttttactccttttttccttttgctttgcacattagttttctcaaaccatgtgcgtacgtgtttgtgtgcataagaaagctcttccttgacagactttgttttgtcctaaatatatattttatatgaaatatatatcatatataaaaatggttttatatatttatatttacgttatatttatataaatatcaatataaatatgttgctgctactgtgctcaattgtatccaactctgtgcgaccccatgggccgtagcccgccaggctcctctgtccatggaattctccagacaggaatcctggagtgggtcgccatttcctactctaggggatcttccctatccagggattgagcccacgtctcttgcatctgctgcactggccggcagattctttaccgctgtaaatataaatatatttataaatacatacaaatatttttaaggatgtaaatggatctatgaatagagatctttcttcacttattgttttgaattccttaacatttaatggtgcacctccctctgttatgataaaaaaaaaatccatattcttaagatgagatgcatataattctaaaaactctgatcctcaaacttattacacaactctaatcaaattacatccttttctctcagtgaggggcattaaatgtaatttttcctggctgaataaacttgagcgttctctgctctgcatatttccatgttaaaagttttcaagtcaacctttttactattctgagctgttacatgagaccaaggaggatgcttgcaaatcagacgcggggccagtgtcccccggctcccgccaagctctgcctgtggttccctctctggtggaaaagccctagaggggtccaagggatcctcggcctccccgtgggtgtgtcctgaagacgctttttaggcttatttctttcctctctgagaattctgcgtgtaagatattgaaattagcgtctggtctgtggaaacctatccccgttcccagccgtgctcactgtaaaatgcggaactgatcaaggtaggggctgtgatggcccaggagcaggcctgcagtgaacagatgctgtgaacacgtgctgaccaagcttggaggtaaaccttagcctgatgaccatcgtgcagagacccgggcgaacggaggcttctggtcgggggtcagactggcctgcagagcagagacaagtaacaaggagtgaggggtggtgaaatgaaggaggtcttagaaagtgggaacgccctccagagggcc

SEQ ID NO: 35123 - DNA, 1935 bp, Bovine  19866881220546
  misc_feature (1)..(1): n is a, c, g, or t
nccaagtgcacccttgaaagggattttgaatctctttatcagtcagctctactacaatttatggatttcaaaggaatcattttatttaagggccttttgcggttcaatttcaatagaataaagatctagacaacacataaattttcagtgaaaaacagagctctgtaatctacggctgtaaccctttccatgaacctgtacaagctaactggtacatcctttttgtgaaattccctgatttctgacatttagtcataaaatcttttgataaaaaatataaaaacctcatactgcaatactataaaatgtggctgcattaatagcaaaaaaaaaaaaaccctctgtattttagactgtcatgaattgtttaagcatcataatgagaaacatgtatggcttaaataattgaagtgcgtgtttctcagaatccatctactcatctcaaccttttgttagaccttcagacaaatcgtgaggctgactggcttgagtttctccgcaactctttctcctccatcacagggtgatgggactcgcacagggctgtcagctagctgttcaggctccgctctcacgttatggggaattgactgaggcaagtctgttaaccttcctggacctcagtttctttcctagctttagataccttcattctctgttttcgtacctttcgtttaattactctttaaagacagtttccatgaatggcacagtgaggtcatcgccacagtgaacaaaaggacaaacagatagtctggtcatcagggtcatcagtcaccatcaatttcatcatcagtttcatccagcaatatttaacaaacgtttactaagctcttactgtgtgcagggtaaatgtttgtgtttcactctccagcgttactaataacgacagtgttaaattctgatttacttggaatttaccttctctcagtttccccactgctgatgtatccttcatggctacatcattactacagaatcttactctctttaatcttattttcttatacccccaacaaacaaagcaaagacaaaaacattcatctcaacaggatctttagtatgttgcaaattattattagaccatatacaatacttttctttcaatttttttcagtgtaaagaagcccccttgtcaacctgctgcttcttagggaaacccatagccatcaaaatattcacatctaatccagatggatcagctgacatactaggtttaatggtttgtagtggtgaatttgtcatagatttgaagacctctccaggttgtaaattgcccagactcagatgctctggaaattttacaaggactgcaattagaatagaagtgttttggcttatctcagttgtattgggggaaaaaaaaaacccaaaaaatcctgatgagaggggtatcaagatagtcataagttcacgtaacaacaaagatttattgggcagtttgtcagatatgagatggacactaacagtggccaaaatatgttacttttccagtgctttagtgggtgctggcatcgccgcgattccacgcaatcctcacagtaacttagtgagtcacgtgttatcgttgctcccgttttacagatgagaaaactgagcttagtctcaaagttgcgcagttaacacgcagctgaacatgattcgggttgcttattgtcgccttcagttcatcgtgttcaaatcgaatgtctttatccttgtcctcaagtcagctctttcttactattcctgtcagtgataccacagtttcttcagattcactctcacagtcactgatttttccttttttgtccttgttgtaaatccattcggtcaccaagtccttttgctagttcaatgtctgtcagccctcttcccgtcaccctgcccagggctctaggactcacatctaaagtgtagaggctgaaggcccattttttcctttttttattgaag

SEQ ID NO: 35124 - DNA, 1673 bp, Bovine  19866881300793
  misc_feature (1)..(1): n is a, c, g, or t
nagacaaagggaagagctgcatgtcaagtgcaaaggcagcctgttagggagctgggaagagctggtccgcagaggaggccacaggcactctgctggcagaccctcttcttgctcagggagaggccagcattctggtcttttcaggccttcaactgattgggtgaggatcccccagcacgatggagggcaatctgctttgctcaaagtccactgatctaaatgtaaatctcatccaaaaaacacccttcaagaaacatccaagaataatgtttgccaaatatctgggcactgtggcccagccaagttgacacgcaaaagcaaccatcgtaaggaagttaatctcccagggccttggtgctctcatctataaaatggagataacagaagagcctgtcatattgggtgaacataaaggataaatgaatcaatgcatgtgtttagaacagtgtctgcacagtgcttggtgagagtttgctcttgactatttttattattaattactattgtcagaggctttagttgtatgctgctgctctctgatgaaagtgctaagaaaaattataagcagaaccaccaagagtacaggagcatttggttgggaacaccactaatgtgatgagcgacttcacacattagaattctcataatgtagaaaatggagccttgcagagtcacaatttacaggctgtattggccagtgctccattaatcagtggctatttttttcttgttattccatgaataaattttaatatattcaattttccccataaactgcttatttactgttcatattaatgcaatatagcaaaaaaacatttacatgaccagagtcttttgcaatctaccagagcatttctcttgcatttctttcccttcattcttggtgagaaaattcagttttgctctgtatgtttctgaattaactgtcacctctcaggaatacaatatcagcatatatcaagagcctggcggcgagtagagtggtgtagaatctggttcgctcggcatgaacctttctggccctcagcttcctcacacagtgctgtcgtgaggatgggatagtgagtctcggcacagtgcccggcactcaggaagcacgtgaccagtgggaatagaatgatcccttcagtaggaaatctccatgttgttacaatgtcccaccttgtaccggcctgccttgtatcctgggtccctgaatgactgtgtggaagaagtcacccagcaagaaggatcaccagtgtcaaactgttacagacgggaggagtaaagaactctggttaatcttttaaattggtgtgtgtgtgtgtgcgcgcgcacgtgcctgctcggttgtgtccaactcttttcgacctcgtggacccgtagcccgatagactcctctgtccatggaatttttccaggcaagaatactggaacaggttgccatttcctacgtcaggggaccttcccgacccagggagcaaacccacatctgttgcgcctcctgcattgacaggaggattctttagcactagggccaccttattacagcaatcagcttgttaggcattgtgcaccaccttaaccaatatggtcagttaatattacagcaatcagcttcttaggcattgtgtaccaccttaaccaacatggtcagttaatattacaagatcactgggcattcatgatgc

SEQ ID NO: 35125 - DNA, 1882 bp, Bovine  19866881327877
  misc_feature (1)..(1): n is a, c, g, or t
ntgtgctttctatttgagatgaaagataaaaaaccctgtgtgcatgattaattgtcatgatgaaagactactaggcagttgcttaagagacgagaacaacaatagggataaaccactgcaggcgtccccaggactggagcgacaccgcttctgtgtactcggcttccatggcaaccagcgatgggaagatgaatgtttcatagtcactccgctccgcggtacacatctataaatcaaacttacataaagagcacaagatttctgctgtgggctcaacgcagagccggtttattttcctgttactgtataattatggaaaagaagcagaaaacaatgaggtcatcctgagtggggaacaaactcaggaatcgctaacacacctgcagaacgccattcatcccgcaggaagcaagaggcggcagggcggtcggtggacggaaacgctgccgtctcgggcgcaggcttccaggcaccgacctgctccggctgggggctgcgagtgacgcgcctgggctgggctcccgacccctgctcggctcgaaaacagacacggggcaacttcatcaactgcctgccacgctctacaggttttcattctgatagaccgggcagaaacggcactccctgtttagcatggaagtttactgaggctgaacaagcatgcacttgcttttatttacacccaaaatggctcgtcttgtagacgtggggatagaaaaataacgctttggcattgaatcgggagccaggagacccgaacttgacccaggtctgtgtaaccttgggtaagccatgaagttcctgcagcctccattttcttagcgatggtgtaaatgatttttagtctctgccaacatctgcttccatgattctgtatctcaaaaactcaaagatctgactcagtcagatctaaccagagttattagctgtgcgtgttcctaaatatacacacagcctaggccagcagtccccagcctgtctgcaccagcggctggtttcacggaagacagctcttcttccgtggaccagggaaggcagagggacgctctcaggataattcaagcacactacatctatgtgtactttatttctattactgacgcatcagctccacctcaaatcgtcaggcattagattctggagactggagacccctgctttacagttacactttttaattccatactggctaaaacacctaagtaatagcattttaggattaccattgcagtgaagctctcttctgacttctatcaatctttcaaacacagaatatgctctggaaaactgaatgatatcatcagagttttaaatgcataagaaaattgttacagatgatcctaggactgattttcttaatattataaacaacatttacaatttaatcatcttcctgtcacctagataagggctgcctatcaattcctgccccttgaagtctgcagctctgagagacagggtgaggctttcctggacttcatctctgaagagtcatgctcaatacaatctgtggaacaaataaatggatggatgagcagactcttagtaacacctttgctgcacctttcagaaatcgctccccagtcttaattaggcagattcagaccaacacataaatattcccgggacagacaggcacgtatctgaaaaccagatataactatacgagtctctcctttgtgggtctgtgagcctacaaaatccttgtgacactttataaccgggaaatagctttgctttagtggagcacgaggcagtggcagacacagagacctcgtgtcctgaggctctggctaaagtgcgggggtatcgtgggggctcagaagcaactgactcacagtctctgcctcaagggaggaaagtgtagggaaaacaacaccca

SEQ ID NO: 35126 - DNA, 1107 bp, Bovine  19866881372281
  misc_feature (1)..(1): n is a, c, g, or t
ngatgtactctgcatataaattaaataagcctgcctgcctgccaagtcgcttcagccgtgtctgactctttgtgaccccatggggttctccaggcaagaacactagcctgggctgccacttcctcctcccaggtaaataagcagagggacagcctaccgcctgagggcctcctttcccgggtttgtataagtcagttccattctggttctaactgtggcttcctgacctgcacacaggtttctcaggagacgggtgaggtggtctggttaaccctacctccctttgttttaccagctttaactcatctcagactccatgtagttaacacattcgcaggatggtttagcttcagagtaaccaggaggaaatgcaacagatagcaagagtacagactgagagaaaactgttaatatatgaaaaagcctctcattcatgtgaatgtaatgggggaaaaacatgttacatgtaagtaaatatgtaatatgtgcaatgtaagacttttctcattctgcggagcccctaaaactttcttaaaggacagtgaggaaatgtacatcttcctcaacacctggggacccagctcatcaagttggtcacttcctaaagccttcctgagtcgggagccgcgtccacaggcctgtcaggaagcccttgccccggcagtctcgggtcttcggccctagacacacagtaacagggcatcttccccctggcctttctgaaaaataagtacaaattgcaagaaatgcagtacaggttgtgagccatcagtacattagctgtgacaccaggagatctgatgggagtcaggaggaaaaggtgtaaattgcaggataatatcaaggggaggtcagtctgttagtaattcagggactctgatggacttaaagaaaaggcatgaattacagggtaatataaagcagaggtcagtacattagtaacacgagaaaactggcagctttgggaagaaaaggtgcaaaccgcgggatagtgtaaagcaggcgcttcgctttacagacgcacttacatctggtcaaggaagcacgctggccgtacctaccaggcggaagcttcaggattttgtccttccatttcgcagcagatct

SEQ ID NO: 35127 - DNA, 1459 bp, Bovine  19866881394163
  misc_feature (1)..(1): n is a, c, g, or t
ntccctggtggctcagagcataaagcgtctgcttacagtgcgggagactcgggttcgatccctgggtcgggaagatcccctggagaaggaaatggcaacccactccagtactcttgcctggaaaataccatggactgagaagcctggtaggctacagtccatgtggttgcaaagagtcggacatgactgagtgacttcacttcacttctgacctccccaaactgcctttaaaaaagctgagctcatcccattggcccctgggcagagaactctggggcagactctggggagtcctgggctactcccgagattaagctggaaccgaactggccctgaggccagccgacttcacaaagatacttgggccccctgatgcaaagaactgattcattggaaaagaccctgatgctgggaaggattgagggcaggacaagaaaggggcgacagagaatgagatgactggatggcatcattgactcaatggacgtgagtttgagtaaactccgggagatggtgatggacagggaggcctggcgggctgcaggccatggggtcgcagagagctgggcacgaccgagcgactaatcaacagcaaactggcccgagagtggtagctcttggaacagctgctcagctttcctcaactccaccattttaattgtgattagtaggttcatttgcatctaaaaggagccgttttcttatcagcaccattgagttgggaaccagtgtgctccatttatacagagtggcccattttaaccaggcccattaagcagtaaaagtaaatggtgtgggtgtttacaaatgcaaatatgtcatgcaaataatgtactttatgctgaatgatgccttggttttcatatgtaaaattagaaactgtgtagcacaaagataatgacagcacctttgcatctgttcctgagacgcatctcgagctggtgcctctcaaactgcagcccaggtttccagcagcctttcttcagtctactcaaacaggtattccatagtatcaaaaatgtgcgtgtacttatctagttatttatgtattcctaagtaatcaagaaatcacagaaaaggggagctccaattaccaaatgtattacttacaatcaaagatgagatttgtaattttgtttccatttttaaagatttttaagtttttatctgagatgatggtagcggaagaagacgtgttacttactgtataggctagttcatttgtaagagaattgtgtctaccaagagatttttttaagaaatcttactgtgtgaaatgattctgttttctactatttgacaccagcccttgtgtgcaatgaacatggctaaattctaagggtccctacctccatggggttcctgggctttggaaaggtgcacatctatgggaagagatttcaaggtataaggcatcaagtcgggaaccaccagaggatgggttgccaaactgagtata

SEQ ID NO: 35128 - DNA, 1238 bp, Bovine  19866881407304
  misc_feature (1)..(1): n is a, c, g, or t
naggagcctgatgggctacagttcacggggtcacaaagagtcagacacggctgagcgactaacacacagggtggggaggtagctccattttctagagaaaaccagcatgcactccaggcccttcttagaaagcgaggagaaagaatgaagctaaattatcctattgatgactacatgttacattcagctccctggagtccatgcttggaagagaattacaaggcatcacatttagcttgttggccaagtgggacttgctgcatacttgagcaaacacaggtttcctaatggtctctttcttagggcttcccctgtggctcagctggtaaagaatgtgcccgaaatgcgggagacctgggttcagtccctgggtttggaagatcccctggagaaggaaaaggctacccactccagtattctggcctggagaatctcatggactgtatagtccatggggtctcaaagagtcggtcacgactgagtgcgtttcactttcacttagaagaatggagtaccaaaatccttgagttcaggagaatttaaatatcttagggaggcaggaacggaaaaggcgatggcaccccactccagtactctcgcctggaaaaccccatggacggaggaacctggtgggcctgcagtccatggggtcgagaagagtcagacacgactgagcacttcactttcacttttcactttcatgcattggagaaggaaatggcaacccactccagtgttcttgcctggagaatcccagggacgggaaagcctggtgggctgccgtctctggggtcgcacagagtcggacacgactgaagtgacgtagcagcagggaggcagaaaaagggatcaacttgtagaaacatagaggaaggaagaaaaccttactgcaccttatagcagatagctaagggagtgtgaaaaattattgggttggccaaaaagttcattcgggcttttcatcccatcttacggaaaaactcaaatgaatttttttggccaaaccaatacactgcagaaaattaccttgcagctgccaattgaagctctagcttgcaaagttgcctggcccctcgaataggctgaatcagttacaaactctacttgcttgacttgaagcagtctgtgaccttcattcccatgtaactgatgtgtttggccagtgtgaccctggacccgtgccgagcacgacaggtgaacaaagagccgtgagacgtggccttgggctcggaaggtaa

SEQ ID NO: 35129 - DNA, 1690 bp, Bovine  19866881408527
  misc_feature (1)..(1): n is a, c, g, or t
ntcaaacatacgcttgaagtaagcactgctttccccggtagcagctgagcgtattgttacaccacgattttctccctctgccgtgtgttatgttaactagggggactgagcaccatttctctgctccctgttcaaaggagcaatgcccctgtctcagtggccctagggacaaggcacaacccagctgaggccacccacaccctcagccgaccagtcagaggctcacgccttcacctctcttcctaggattcagaaaagcttatcgggtgtttgtgaggaattaacagagcttccgaggccacgaatgaagtcaatgaaaacttctggagcttgagttagctgtgtggtaattgcaacacaactacttccatctggaacatcctatttacatagagagatgtgtggaatagagtgtaaagcccacatttgggaatttaaccatcctgacttgagtttcatgtctgttaccaagtgatcctaccagcacattgaacatcagtgtctgcagaatgggcccgtcctgcgtctgcacagattcagtgagatgaaggcagtgcgaggcaagatgcccgccactatagttatttactcccaaaatgtttttccttttgtaaaatatttattcatttggctgcttcaggtcttagttacggcctgtggaatcttccttgttgagcgtgagatctcttttttttaactgtggcctgcatgatcttttttagcagtagcatgcagggtcttttagttttggcatttaggatctagttccctgaccagggcccctgcactgggagcagggaatcagccactggaccaccagataagtcccccaaaaggtttttcttacctcttaattgtctacgacacacttctgttgtgcaatgtatgacgggaaaaatcaaaatggtggtgttgctaagagccctctgccatggggccaggagatcagtaaggaagtgtgacttacggacatcaaggtcctttgtcatccaaaacaccttccagaaactcaagatacttactggactcttaccctgaaacaacttgtgagtcctcaaggacaaatactttctggcttgagtcagagtcaatcacagttgtcaccgggcagcttttaacaaccctggtggcttttcatctcttcttcaggacactttcagggttacccaagtttgtatttcctgaattgcaattcttccagaatccaaataaactctcctcttctttgcagcctcctgccttgcttttttggttgccagatgcatgtatgtttattgacatatcacagaaaaaatttgcaggatggctagaaaaaccattactcctgccttttttaatataaaaaatataacttgtgcatttggtgacattcctttaaatgtattgaatatatcatttctgtagattttaataaatactttttcctttccttctctccttaggtattatcaatgcaaggaaaaaaaaaaaggatagccattgacctcagccttcccacagataagatagagaaatgcagtgcggaagtaggatgaaactcactgtaaatcactttctgtttcattttccagggaagtagatcaagactcagagggtcatgtcagctttaaagacttcgaatatgccatgaactctggacaaaagcaagcgtaattacggtgtgctgcttgtatgcaacttctgcggagac

SEQ ID NO: 35130 - DNA, 781 bp, Bovine  19866881455280
  misc_feature (1)..(1): n is a, c, g, or t
ngccccccctcctattacagttaccactagaattccttgccttcttctctttctgttcttaatctctttgtcttagtatttatcggagttttataagtctctctaaactgtgaactgcttcaaatgtgcgtgtgctcagtcgctcagttgtgtctgttgctttgcggccccgtgggcgatagcccagcaggctcctctgtctgtggaattttccaggcaagaatgctggagtgggttgcggtttcctattccaggggatcttcctgacccagggatcgaacccacgtctcttgtgtctccaggactggcaggtggattcttcaccactgatgccccctgggaagccctgcttcaaagtagcatctatgttttattcatctttatatttctagcaacttggaagtgctccttttactatatgagaatacaataaatttcattctgtaaacattttcatgaatgcagagtgatttattacacaaaagtgacttacagcttcatgacctgcattcaggagttatttcatttgctcaaaagcaatatttaaaaacaaaatcccaaacctcaacctaatataagagtaaaaacctgtgagatttcagaggaaatacattttcacctgaatgttcatgatggttacaaatgattcttaagtgtataggtgatttgttacgtcagtattttactgtttagcagcctgtagtcaacaagcatttcctttgattaaaaagtaaacttcaatggtgactttttacatgccctctatcccaagactaggcca

SEQ ID NO: 35131 - DNA, 1091 bp, Bovine  19866881504716
  misc_feature (1)..(1): n is a, c, g, or t
nctagcttgcatcacacctacccccttgaagttaaaactgcataagtgaattgcaaagaggctaatgggaaaacatacattaagttgcctttttcgtgccttttttttttttccaatttaaaaagcaaactgacttaaagttggtaggagggaagataaaattcaccattcaatacactgagagaaacaaaaattcggttattttaaaagttcaaaacccaggaaagaattctcacacacacactatgaagaagggaggagccgagagccagcgccagctctggagtgaacctgcgctcttcctggtccttctactttttaaaagggattcaaactctacaaatgacgatcaacgcagtaacgttttattggggtgacaagcgcccacgtgggtctgacaagagacacccttggctgcattccaactggcccatgagggcagctttatcttctggttgtccacagttactcatctatttttaaatgttccagtatgatcttatcgaggaggcacacataatttgatcaccttatttccataactagaagttgttgaatgtgcccagccaggtaggagttacggttacagggtgtctgtggactaggctggagcttaacggttgtggtcttttatttttaaaaaacaatcgcaaagacccgctcagtagaaagtgcacgctgggctggtcgttggtctgctggctttgtgcagagtgaccgttggccttgggaccaatgagacacccactctcctttgctgttcaggcactgagtcgtgtctctctgccaccccgtggactgcagcacgccaggctcccctgtccttccctgcctcctggagtttgctcagattcatgtcgagtcagtgatgctatctaaccatctcatcctctgtggcccccttctctgcctggtggtcctgaaggggcctgggggtggggggcagttcctaggctgggagtccaggtttcaccacagtgagttgctataagcaactcggcccacttggaaggagaaattgcctttacggtgcctctaaattctcacacacgcctcccaaatgcaaaggccgctggcgcgggggcatcagt

SEQ ID NO: 35132 - DNA, 1357 bp, Bovine  19866881995729
  misc_feature (1)..(1): n is a, c, g, or t
nactggcctcctcttagcacagagcggacagaagccagctccaggagaccagagtcttccttccccgccctgttctccacccgactcttccagaaccttcaacagaggccttgttctccagggctggagaccacagtttcccagcctctcgaggggaaatgagtggaggaaaccagcccagggtttttattgccaaatagttctttcccgaggaggacaacgcagtcgactcgccaagtggggattggagtgggtccagcctaaaccaacttaatgaacactaacagagaactgcaattattgttgacttcaaaacgcacacaagaactttagacactgattcctatcagccggtcgggccggtacagatgctgcgcactgttttcgccgttgcttagcaacgggagagaaacttctctctcttatcactggaggtggaggtaggacaaagcactttattgaactgaaattagtttattctctctctcttggagaaggcaattggcagccaagagtcacttggacaatgggcagtttcgaggttgggaggtggccttcctttcctgttatctcagtaaatcctgacggctgtgtttctctacagataaagttttgaacttttgtcaggagtgtccttccaaaactatcattagagaaaatagcttcacatagagactcacagaccagggcaggaatgaaggtgaggaggaaagtgaagtcaagtaggcaaaatttaagggagttctccccccaagtcagcaatcaaaataattcatattttaatgctgtattttattgaaaaatatctttttctggctgcacagactggtttttggggtctttcctgactaggtatggaaccagggtccctgcagtgaaagctctgggtgctaatcaccggactaccagggaattcccttaatgcaatatttttaaaaaatacacattactgagtaaagttccacgatgactgaaatatccaaattttaaataaagacagaatcagtatccgtgatttttttcctttggcctcaggttccaacatggcagcatggctcagcactgccacagaccttgttcctgcctcacacgtgttcacaacacaggagacttctggagcatctttttcctcacaagaatgattgcactggggggtagagcatcatgcagctgggcagagggcttcccttccccagtgggaagaggatctttctgcagtcctttcgggagcttcttccaagactgaagtggtttgccagggtgcatcatgcgaaatgctgggttgaatgaatcacaagctggaatcaagattgcagggagaaatatcaacaacctcagatatgcagatgcatgcatg

SEQ ID NO: 35133 - DNA, 1180 bp, Bovine  19866880492656
  misc_feature (1)..(1): n is a, c, g, or t
ncacagtctattaagaaattttttataaaaattttaggtaaacctggaaaagactcttgacttttattggcctcagtgtccatatctatgaaatagaactactactagtaatttattacagtatattatgtatgtacttctacatgaatataatagtataggtaatttatataaataattggcattatatataccaataaatagtacaattactataaagcagaatataaaacttcaatgtatttttatggaattcaaatttttaaaatatcttgctttcataaattattatggaaaatattttccaaaaattattatatgaaatataattaatatttcaataaattatttgtatgcaaaatcttatgttacaatggggacataaggaggaaatgaacaaggttctgttcccaagaaatgtcgagatgatgggttcaggtgacaaactctccatccatactgatccaatgtgatgatccagacataataactatgaaatttacataagccatgcagttctgaataatgtttccaatcatttctacaaaatcaaagacaaaaggtgtctttgattttgatgtgtgcttctgtgtatcctcttaaaacaagaaagaggagcaaaaatttcagctctttaaatctgtttgggggtgaagaaaatgcttgtgttttttctttttttcctagcagaggaaacttacagagaatttgttacgatgtttaagtgctttgaaatgtgagttagaaggataagtactgaaggaggctagatctctgtgaccttttcagtgtacatccaaaccaaactttctccgggtctttcatcagagcttcaaagtcccccaagacacaatcacatcctaataattcttgataaaagtctgaatgctcagcctctgatgcaaaatgaggagaaaaaaactctgtcttctagcactttatcaccaaaaagcaagcacaggtggtctgttgggaaagggcgatgaaaagatgcagagaaatccttcccttcttcccatcctttgagcccagagctgatgacattttcaacccagctccctttcctctgtctaaacacctggttgataactccctactcacatcaggatccagggattctgtgcccatatggcaagttatagaattgctagtcacattaaacacaaaaacccaggatttt

SEQ ID NO: 35134 - DNA, 1492 bp, Bovine  19866880503367
  misc_feature (1)..(1): n is a, c, g, or t
ncagctacgaatgtgtaattcatggcagaaacttgaatttggaaaagaagtaataaaaccaggaagaaatgaagtgagaatcccagagccttcctcgcatgccagaataaagtagacgtgtgctgcactctttccttctgtgggtcccttccacacctgttgttgctttcctggggaactggccaaagtgatcctatttctaagccctaatggagagaaatgattctgtcccaacaacaggaagccaaggttcacattttccatcttttcctcctttttaaaaaatagtctttgatatgggaatattgacttagtgcaatggaatattgatttaggaatattgattttgcttttaggaaaagcaaaacgacaccatcagatgcaagcagcgtaggaaagtcggtaaatagatggaattttagcatcagggtgactcagagctcttttgtttgtttttggttgcttggttggttataggttgcttggttttgtggacatgttttgttagagaaatgacccctaagaggtgagtgggctctgcctcttgatgatttcatatataattgggtattgttaacctctctgtttgtgatcccatggactgtcacctgccaggcttctctgttcatggaattctccaggcgagaatactacagtgggtagccattcccttctccagggaatattccctacccggggactgaacctgggcctcctgcgttgcaggcagattctttaccatctgagccattagggaagctgatttcatgcatatttcattgaaaatgactgctctcttggacacattgtccccaaacaaagtgcaggctctaattttattacactgaaaaattcttctgcaaaaatcacagcccatttattaaggtttataagaagaatatttcatgtgtatagtcatttttaaactctgttttgcatgcttacgtggccagcgctgagctttaccaaaaaattggaaacacagaaattatccccagaaattctaaaagctagcatgaaaggaagtaaagcaatggtggtctacttgaaatcattttcacacattcttgataaaacagtatcacacattcttgccaacaaaattgctgtcacaagcacacgtaagtttgtttgtattcaagcaaagttgaatttttttcactgtcacatgatatttgaaagcacaatcattcattcatcccagtttataactcagtattgtcacctttaccaagctacttagcctcaccaagccttggctttctcatcatctaatgataatacttacttcctggagttgatatgagaagcaaatggaataataaagtatgtcttttcaggaatcaaatagcatagttctttccaactgtggaagtatatctccattactaaatcacagatattggcacaaaatgaaatataattctagccatcagaggtttccaagagagaaggaaaggcactggggcagtcacgattgctgcaactggga

SEQ ID NO: 35135 - DNA, 916 bp, Bovine  19866880592321
  misc_feature (1)..(1): n is a, c, g, or t
ntttgtcctgaactcccttgcctccaaacctcttccttttctaagagtccaagattcattaaacatgatgtccaataaaatttgtgtatgaaagagccaacttataagacaggagaagggctcatctccaggactgtggaagacttccttgcagttctaacattgtcaaaatgctagtaaacatgagacattcttaaataataaggaatctcatgagaggtgaatgacttgtcccagatgacactctaggtcacaggaaagacccgggatagaacccaagtcagatattagaatttagaatcctgctgtaactgccggaacttactatccctgatatattagccatcaacataaaagcagctggaatccattgatatttggactctgtttggaattcctttgtttctaatgtattctaaaagtattttttcaaagctttcttagtaatgcaggacactgaaagtgttttctgtgggctgtttgtaaatgtgggttgggtgatatacatctgcaaactacacgatgaagtattttgtattctatgcttcatatttatcattttatcaatctgatgttttggaaaaaagaactgtgtactgaggtctcatgtgtttgctggtggtgctcagcttgtttaaattatcagatgtttttactaaattataattattttttattgagaccaaaacactatttggcttgcagcaagtctcatctgactggtgaatcatgaggaaatgtttttgtttcaacagattacagagaaagcattcatttatacacatcataactaactaacccttttggtatttcctaaaagtaaaatttgcagcaaccagcaaggtgttgatttaaccaaattctgactagttctaaattcaaattatactgtttaaaaaaatctaatatttttaga

SEQ ID NO: 35136 - DNA, 1457 bp, Bovine  19866880612624
  misc_feature (1)..(1): n is a, c, g, or t
nactgtctagctatttctacacaatctttccagttttcatacaggtattaggaaaacagatctcgttttaaaaaattttagatcttatttcatttactcaagttataaaaatagcacatactcacagccagaagtatggtacagtggttaagatttgcggtcagactgcctgtgctcaaattcttcatagttgtgggagctggaaaaaattagctcacctctttcagtcttatcagcccccacttttgcccctcattgttttaagcattgtacagatcatttaggttctctatatattagctttccacttttggaaaatcatcataaaaatttcaactaacaaaactgttgagaatagtagatatgttatccttatttttaattacctgaataatctttttttttcttttgctatatatctgcatcacaatacattctaatgagttcaaagagtccatttatctctaagattgaacatttacctctagcttacttgcttctagattgtcttagtcccaggtctggagacgcctgattgccttgtgcctctctctcttgtcgccgagacttactgtaaaggccacagcccagtcagtcctgggagggtgtggcgaaagtgaaaagtgaaagtgaaagtcactcagtcttgtccaactctttgtgaccccatggactggacagtccatggaattctccaggccagaacactggagtgggtagcctttcccttctccagggcatcttcccaatgcctgtttttttgggttcctactggggttctccagactaggggctatacagggcctcctcctttaacctaatgcctcctagagcctcaggctctgccttttcaaggcattatttacaccaaagatcctcaaccaatggtgattttgccctccaggatctacttttttggttgttataactgggaggagatagtcaccgacatctataggtagaagttgggagagggggcgctactaaacattcgacaacatgaaggacagtatccctgcccccctcaacaaagaattatccagcctaacctgagaagtggtgctaagactgagaagtgcagatttatgtaaatactactgatcccaacaatttagtcaaagaatatctgcttattcaaaaattgaaagtgggacagtgaagttgtataagagataaatctaccttcatccaatcacactgtgactacttttcctatgaggcacttaagctctgggagaaaaaaatgatcaaccagttggcaacaaaaatttattgattagtttgcaactttagatacaacatatatttcatcacatggttataattcagtatttgtgctttgtaggataagtaaacatttgagcacaacagaagtctacacacaatattacaatcttttgggggtgtttaaaaaataaacatatccttttccatctagtatcacaaaagaactttca

SEQ ID NO: 35137 - DNA, 1344 bp, Bovine  19866880617665
  misc_feature (1)..(1): n is a, c, g, or t
nattggagaaaagccccagatccattaagatattattaaattgttgtattttccatggcttcccttagaactgccccttaatagagtcattgccaactcatggcctaactgttgatttatttcaatgattggagtctaattttcaattcctaaaacagaatgctataacttatattccctagatacactttaggctatgactttatttgatattcatgaattttattgatgttttaaaacatgaggcaattttcaactgctgtgtaaatttttaaaatctgtaattttagtggaaatgaaaagaaattacttttagtattggaattcaaataggttttagaacagagtgttacagatctatattagagatgactaaaaactgttcctatctacatttgccaaatctgaaccattcctaaagtttaagttcataatttttcaattggagattttataaaagtaattgatataatattgttgaattatgaggtcattagtacagtaagctgttatatagtaacagcaaaaattattattataaatcatgaaactacagaaaactttggatttacagagttcaaaccagaactttaagagattattcttctgagtacaaagatattatcatggaaaatatttctttttatccaagtaatctaaaaaagattttgttttgcccttgactacttcttcatgttaaaagaaagcaatatacaattattgcacggctactatgtgttaggtgttaatccagcttcacagtgcattttacacttttgcctcaataaaatccttataaaattgctacaaactgcatagtacttgtaattttgatgcgggaaggagatgatagtgtgttgttgaatgcatttgcttgtgtgctcggttgctcagtcatgtcagactctttgcaacatcatggactacagtcaggcttctctgtccatggggtttttcccagcaagaatactggagtgggttgccatttcctcctctggggcatttgccttgacaaatggaatgggggtggggggttgaaattttaagcttacttccagcatttttttaaaaaattggactccaaattgcttcatagattacacctctgaacacaacagacatacagaatgtatctgtaacacatatataccttatagatatgacatgtaactatgtgacaactatgcttaaacagtgtacatattttcagtgtacaagtgtacatgttataggatgccctagcagaggcttctgatttaatttataagtctaatctcggcactcaatgtctccttgtcagcttccatactgaacgaattcaaaatagattgattgatgtttttt

SEQ ID NO: 35138 - DNA, 1385 bp, Bovine  19866880684571
  misc_feature (1)..(1): n is a, c, g, or t
nctgctgatggacatctaggttgcttccatgttctggctattataaacagtgctgcgatgaacattggggtacacgtgtctctttcaattcttgtttcctcagtgatcttgacatcatcctttggaatgtactgccatcttggggccacctggtttctataaatgatgagatgtttatgccagactgtttaaataatattcttttctacctttcaattttctgttttacaacactacaaggctctctttgaacccattgatttttagattttatgaacatattccttcttaagttaactgacataagagtaaagttcttagttttgacatctaattatatatccccatcagtcttatagatctttctcacctatttttttacctagcacaaatagcaaggcttggtttatgaactggaaaagaccaagatgacttcagtagagtattttatactgagaaataatggtgactatgattagttcaataacttcaaccaaattgaggtcagtcttgaatgactggcatgaagtgaagtgaagtcactcagtcgtgtccgactctttgtgaccctgtggactgtaacctatcaggctcctctgtccatgggattttccaagaaagagtactggagtgggaagccatctgtttctccaggggatcttcccaacccagggatcgaacccaggtctcccgcattgtaggaagatgctttaccctctgagctactagggaagtcctggcataggagtccaaaatttatcctggaggaaattatgatgacagcatgaaaccaaagctttagaaagagtggcctacctgtctgacacaagagagcagtataacacatgggagagatcaggaaaaatactgggtgatttaggtatttagtccatattccctaaatgtgattttgaagaaaacatttctgttttttttgtgtgcccaaatctctaaaattaaagagtctgcatcagatttatttcttaggtattttaagaatccagtgactgtgttgtattttatcctcaataaagtcataatagaaatcatcaagctcatgatttcaactggatggaaatgtctgtgtaagtaaacagtgtgactggaaggaagggcagaagaaatcttaaaaaaataagtagagaaaaacataaaacccattgtgatgaaatactttgttgatggatttacctgatgtaataatttctgcatccaaaatcatcacctctgagttggtttaacttcaggagaattttataagcaaaaaccaatgcattattgtaggaacagtgactactcacaatagcttcttcaggaatgagtcactataatttgcaggtcctatgggctttctggctgaatctgagctgcagaaaatgagtttt

SEQ ID NO: 35139 - DNA, 827 bp, Bovine  19866880732781
  misc_feature (1)..(1): n is a, c, g, or t
ncttttctgttagaagcataattgtaggcactcaaggaagccatggatcaattcaaaacagttaacattagaatgaatttgcaagcaggacttgataactaaatatactagcatatacttcctctttatttaatatcatttcccaacatatgtttttaaattctcttgcatatttaaaaatacagtgttctgtacaaattctactccttattaaatgtttaaactcatacacaatgtcacccttgatcaatctgttcaatctgtttctcactttttcagggtgtgaaagcacaaacacattttataagcttccagagagttcaaattgaaacactgcctgaaaccataacaaaaatgcaataaaaagaaagaaaaagacatgtttgttttatgtcccatcccccaatcctcagggttttttttttttttttttccattttagatgtgttgcctttgtaattggacttattccctctaaactccaggcatttctggccagtctagcatgttgttttgttattttactttggagcaccatttttctgaatataagtgtaattgtcttttgtagaaactttggacaatatgggaaagtaaaaacagaaacaagctgatattccttctaacctttaagtaccattcaaaaagttctccttttcctgaggtaattggtgctacaaaaatgatgcaaacaaaattcaactaaaatgggaactagtatattattgtattgaggcccacagatttagtcaatataaatagaggatgctaagataaattagaatgtcagaaaaacaacaaatattatttgtagaatcagcgtgtcc

SEQ ID NO: 35140 - DNA, 1181 bp, Bovine  19866880807680
  misc_feature (1)..(1): n is a, c, g, or t
nggacaaagaattaagaaagaaagtcaaccagttttatgtccgaatgtgagttccttgagattggggcgggggttgtgagtagaactttcctacgcttagggagatctaagatccaatggtaatcttaactttggctataaatctatcatttctaattgtaggtcttcaatacagattcccaaaatataaagtttagaaaaggcctccttgccctttattatgcaattgttagtgcctcaacttttgtgcctgctgcaaatgacagattcctttagataggagctgccaggatgaagcctttgactgaagtgtagatgctgatagcttttcctctccatttctctcccttttgcaattcatagctgtataattagagattagtatcagcaaatgtctgaatttttctaccgcatcttagacctgaatttccaaagagggtatcgctgttaaaaaactcaccacctaatcctttttgttttcaccaaagatttttagccatcaactggttttctggacaagggattaaaaagtccccaaaatagcacaatcaaatcattttgcctaaacaaagagattgaattaagtgtgttgaatggactctgttttccttgggctatgagactctgcagtgtgaaatgttttacattctctgtctgccaattctggttctgctcattatatttaaaaagcttctccatcccattttcagcttcttctttttctttttttttcttttaacataaatgctggcatgcaacttacttctaggaatagctctgagctgatgctctcaacttagtcatgagaactacatttctctcctctttggaaatattctcccccaatttctgtaattatgaccccataagagctaggtaatttcagttaaaatgaaacatatagctttgtagaacatacaggaagcagactacttcataaaggaaggagagatcacagtgttgatttctcataccaacaatacgcctttacaatctaagccacaagaaacatttatctataagaacatctcttcccttgaaaaggagggtttttatacgtaaagctcagatacagtacagaatattaaaattcatggttgtaatttcttatgtgaaaggttttcaaataatgatgataacatagaaagtggtagaacattttaccgttttcacgtgcaaaa

SEQ ID NO: 35141 - DNA, 1046 bp, Bovine  19866880871612
  misc_feature (1)..(1): n is a, c, g, or t
ngaagtatcttagtctctggaggtatacccaagaagcctgttgctgatggataagtatcctcactgctactagaatgaggaagaaaggggttatgctgattgtcacccaccaggtgtgatccaccaagtctgagcccactgcagaaattacaaaatactgatgatgaggatgatggtggtgagtcagaagagtcttttattgtgttttctcctgatttggtcagaaataaacctcagtttaggggtcctagacacaaagcaatattctcctggggatcaaaggaaggacctcttaggatggtggaacgtcggtgtcggcagtgtggccaggtggcggagactggcattaatatgtaaacttttgctttgtcagcaatggcaacagtagtgccactagcagtcttggcattatggacctggacatttatcaggaaagcatgccatcttctcccatgattaagtaagtagccactgagatgcagtgattgtgagcctgctactctgattccatctggcaatccattttgatcattcaggttgtgcccgaccaccggcttcatcatgtctgtcctaccaaggttcccggagacgtgtggtttcatgtcactggagtaagaactcaggcgtgccgtagcctcaccctaccatcaaccgctttctatatttcaagtctatcccttatactataatcgttttggataaagcttatccatgtgttcagacatatatgtcattttacctagatggatacagagaaccaaaaacccatttaaaatgtaccatgacaaccaacaaaaactattgttcagtagaatatagtgtgagaggcttttccttttcttgtagacacctgggactattgccattaatgaatccaataccaaatggcactatgatggagatacatcacctgctccccacattatgaggcccttctaaaataccaagggaaaaaagtacaatcagtaaggcatgaaatatggtatataaagggagagcaacatgaggtcaggacttcatctagaatttgtgattgttctggaaaa

SEQ ID NO: 35142 - DNA, 1166 bp, Bovine  19866880893149
  misc_feature (1)..(1): n is a, c, g, or t
nctaacaattcccaataaaatgaaaaaaaaaaagaaaaatttcaactaattgagatattttgttgtacaacttaagatctaaagtttgtgattgtgtttttcctcatttcaggtcaaagaaccagataatatgtagaaaaatattttcccagactaaaatgcaaatttatgttgctatcatggtatagaaaaataatcagtcttgagatggaaatacaagatcctttaaatgacaaataaaatgcagaagaaggataaatcctccaatcggatctagttacctactaaatattttcttgactattcaaacctgtgagggtttgtagaaggaaggttgagaagaattgaaaattgcatctctcagagtctcccacaccagtcatctcaaccaaaaccatgcagtttatgtggccttttttttaggggcaagaatatctatttcagacccagtagtcatgcatcggagaaggaaatggcaacccactccatgttcttgcctggagaatcccagggacaggggagcctggtgggctgctgtctatggggtcgcacagagttggacacgactgaagtgacttagcagcagtccaatgtaatagccatgttagtacttctctagtattcgtttactccacaaaaaccataaatatatttcaagagcttttatatcaataagacccatcacttcatcttccatttacagcttgttcttcctaaacattaccaaccatatactgttgttttctcccaaagtgaattggtagaagaaaaggagattcttaaaggacaggcagaaaccatggagggtaagccactttcccataattttgagatgcaatttgcctatgatattcccatggaaagcgtagtaaggtggttatgtctgtgttcagaacgtgcctctggaacgccggttggaacagccagccgccaggggagcctgctggtgatcaactttgacctggagccagagtgtcctgacacggagctgcgagccactctgcagtggatagctgcatctgaactcggtatccccaccatctactttaagaaatctcaagaaaacagaatcgaaaaggtaccttgacccctgcttcgatatcataaggcttttgtgtttttatccctgcttgaaactgagtaaatgttcagttggcccctttgaa

SEQ ID NO: 35143 - DNA, 1701 bp, Bovine  19866881053822
  misc_feature (1)..(1): n is a, c, g, or t
ncagagtatcaatgtatatatatgtgttttaagtaaagaaaccataatttctcggcaactgagttgcgagattattctctctttgtcctcctctccctctcccttcccattcaactcatcttcctttctcccctaggtttattatctggagaaaatcatgagaggctcttttaaaatggtaacttttagttctagagagatagaactctggttatatttttaattattgttgcttcagagatcctcacgagccatttagcccacttcatagtaaatgaatgaagaaaacaggtagaaagcctgttagtggacagagcaattctgaacgtacagacacagcagagacctggtgacagatggaagtgcttcaggcagcaattgccttacacgttcctccatccgcacctccatctgtcagcagaagtatgttactattttgggactcaatttatccctttggtgaatcattttcaggcttgtttctaaggttaaaatgaagtctgtaactcattaggcctttcccttttcccttctcgttttcattagaagtaagaactattggggtgaggagataaatatacatggggaaagggtgtgcttaaagaggatggtaggatattaaaatttgacaccaatgcagaataagtcactgaaaagaggattgactatatcatgccttcttcagggaacatattatactaatttgaaaatgtaatttaagaataatccatgagtaggagagtccagattcaaaactaaaggatccattttcaccatatttataaagtcattgtgaacctaattcctgaacttaaaaggaatatttaatgagtgaatttttaaccaaatgacccctttttcctcttaaacctgaagagcctagaagttagaccagccattgtctaatttcagtagaaagagatgaacaaaataatgttttgtctgcaccctataagagtgaagtatgtaagtctgtaagagtaaagactcactctaagattatttagaaaaggagtttcaaagaacactatattctgtgcttcactcaaggtttaacaactaagaatggttgtctcacttttgcctgaaaacaaactcaggtgtgcttcctcttttgaattaacaaagaaaacaaaagactgtgataaatacaagggaagtaaatcttacgtatttagactttaagttgaacccataaagatgctcttagaccaacatgtcttaacagacatcttggacactggcatcagggttcacatatcacttatgatgaagacttttcacttctaacttttgaaagtgaaaatctctgaggaagaaggatcttcctcttgtcctaaggataccttatatttgcctgaactttccttgtgctcctttcgccaaacttgacctgtcttctctctgctgcttgtgaaaatcccataaagcctctgaatacacatccaacttctccttccaccaagttctaccaaatttctccattctatgtttttctctcctgaatcacataaagtccagtggtcattgggtgctcctagtataatgtttcatgacagttcaccaagaactcagatggagttagaaattgagaggtttatggggagaaggtgcctgggaaagataatggagaaagggctcaagatgtggcaggaaaaggcttccaattgtgatgtagacctgacatctgtgaaaggaaag

SEQ ID NO: 35144 - DNA, 1516 bp, Bovine  19866881244654
  misc_feature (1)..(1): n is a, c, g, or t
ntaataatacttcatgtttggtatgctatagccaaaagcagggaatcagaggtcagaaattgtgatttgttctatcaataattagcttatgactttgggccaatattttgaactctgtagacttcaatttcccatctgaaaatgaagagaactggtctctttccaattctatgagtcagattgcatctattgcgtataaaattattacacatttaaggatatgtgaatatataaagggaaaactcctatagcatattttttaaatttctgaaaaatcttaagccaaaattgtatattcatgacattctttgtactgatttatcactcataaactctgtgtctttcaaagactaacaaactgttcttggcaaagttaccaggtaccttgttctttcattttctaggaaatacctaagagcaactgatcactctaacagaataaaatgctgctacactctataaaaggttgattagttccattgaaactaactcactggcattttctgggcttgatttcaaaaaagagccttaaaataatttattgttttacatctacttatatgcaactcccatccatcctatttagagatctttttttgaacgaagatgagtgttatcaagctacaatatgtagcttaaggatttttatcctcacttcaggcaaaatttcaggcttacctagattcacccattattagagtttacatgaatatgtatgaataaatataaataaatttctgcagcaccatctaatttaaagtctgcttgctagatgaaagtgagatatgtaagaataacacttggtgtctgtctcaagcagtttgcagttcattgaaaattcaaaacacttttcaaataagtattttgtaaatctgatagtatggtatcatgaaaagaataaagtagacttcccagaaagatgccagggtcatggtaaacatcccaacctcatttcccaggtatcaactctgagaaatatcttccagtttaaataaatggaataaaaattgaagaaaagcatcagagcaacaacatatcaaggtggtaaaaaaaatttccaagttttatatttatatttatatacaattagatcagttttcccactttatatccctgatattagtagcaatttatataaatattctacgtctgacccacatctgtaaagtgagaataatacgtaccttcttcattgggttattggcaagtagtgttgttgagaaaacacctgcatcctagttaacctaatgtttagaacatggtactttatacctattacctaccaggaagataatgttgacaaaatttctaaatgatgagaattaacctgtggtaatatctgccgtacataggcaatcactagccacctgtcttaggctatccataaataatcatattatacagacaaaccaaggtctctgtttaaccagtcaattatgaaatagtgatgattgctttctggagtcatcacttgacggattggtagaagattttctttcacagtcagaaaactagt

SEQ ID NO: 35145 - DNA, 1709 bp, Bovine  19866881275289
  misc_feature (1)..(1): n is a, c, g, or t
natctgtttcctagttcaaataatcttgggttctatatatacatatatataatatagctgacaccagatttttcataaatactccatttactgtaaatatcagtttctctgagttgttttagaaaatttagcataatgtattaaaatcatgtgttaggaaatttcatggtctcacctacaataacttttattttgaaattgaactattattttattaaattgtatctaactctggactacagttcaattatactcaatgcttcttaaggtttcataaactaatttttctaaccttaaaaaaaagagagagaggatgaaaggaaacacatggatatggagttataacaattacattcaaagatttgttcattcagtaagggcataaaaatgtgatggtgaccagagaaaaaatgaaattaagggacattgtgtgtgtggatgtgtgtacttaggaagttcataagcatgtttttatgcaggtgagaatgttatgcagagagatatttgaggactaatttcgaaagcagtttcctgagagaatctggaaccaagttcaatgttgaagagttgatgcattagggcgaagaagagaaaatggacacacatgtgaatagatcagtcagttttgtgttggaaacacgtggaaagtttctcctcactgtttctgttttctctgtgaaataagaagaatggtcatcatctgagaatgaaggggggcaagaggtcttggggattgcaattagaagagcatgtggagtagttttatgacatagtgagagaataaagaagtatgaaaatatagtaggatggtaagacatcagtgaatacctctgaagatggtagttatgagtgggattcgctttatgtcccacaaatagaaaaccctgaacagcagaggttgtatattctaaattagcagtgggtcacaagattcttttctcttttctagatgaaattatgctgtttggacgcttgtctggggtcatctattgcatgtctcaatttagtgctaattgctagaccatcatttttgtgtctattgtaaatttcctgaagattttggaaaccaattaatgctcaatcctgagtgttgtaaagtgttggtttttattttgtttctgtaggcagtcaggaaggactgagcaggggattttaacagatggcattttcgaaccgaaagaagtgagaagactgatttattagccacctgataacacagtcctttgttgctgtttagttgctaaatcatgtccgactctgaaaccccatggaaggtagctctctaggctcctctacccatgggatttcccaggcaaaaatagtggagtagattgccatttccttctccaagggatcttaccaacccagggatccaatccccatctcctgctttggcaggtgaattctttaccactgagccactagggaagccctggcacattcctaagttatacaaatgcctttgtatcttacagaagtctcacacacagaccatcattttctgttttgtaacttcttgcatccttttcactgaatgtttaaataccagtgggattgtgactcttccaaagctgctgtccaatggactcagttggtacttttccacatctcagggtcatctaaaagtcagtgctccttcatgatcagataggtttatttttgtgctcacttaaagtgtcttaaaactaatttatgtgatagattaaagt

SEQ ID NO: 35146 - DNA, 971 bp, Bovine  19866881356151
  misc_feature (1)..(1): n is a, c, g, or t
naaaatgaaagtttatattttatataatttaatatacaaggagattttctctccaaagactctctttagtaggaaagctttcccatagggtaagagttctgtaaccatgtcactcatgtaataaacagatggaaataagacaatcttccacctttctctctctcagctgaacaccaagagtcttttgattagctgggaactcaagacattgctggggagatatgaaatatttatcagtgggctagagtgaacaaaggaaatcacctctataggaaacactgagatatccttgcatctctgttaatatccactgataatggtctaaaactgaaaaagcttttatatcaaaattttggaaatttctcacccatatcttaactatttacctgggctgaaagacactttaatctgctcaaaaaaataaaataaagattacagcagagtttataaaatgattttgaccagtgatgctgtttccagttgattcatgttggagatattacatgacattttatgttattaaaaatatgcaagtgcaactctcctggagtttaggcctagcctgaagttttccatttgggcccattacaatttctgtttctccagccattctaacacaagctcttttaaactcccctacaggttgtgttgatttgtacagacctatattttgctttccttcagatttattccatgtgcagcagacttgaggagcagattttttcctagctcggataatgtgatgtgatgttttgagaaagtttagagcgtttagagcaaaccactgtaatctaagctggaaagaaggaaagggatactctgcaggagactgctgccttatcccagttccaagagccaatcaaagagactcggggtcccatccctccgttcctcatgtatcttgcagtactgaaccactgcatggaagatatcccccaccttccaggacttcgaggaccagccgcacgaca

SEQ ID NO: 35147 - DNA, 1098 bp, Bovine  19866881421824
  misc_feature (1)..(1): n is a, c, g, or t
ncatctccaacattgcaggcagattctttagcaccgagccaccaaggaagcctcactgaaattttttactgtgttttaaatacttggaatgtcaattttaaccatatctacaaagactttcaaagctaactggctaatgaaatttgatttcaatatcaccttagaatatttacaactaatttgccacacttttccaagagaaaaatagtatcagaaataagcaaatttggggtgactccactttaaaattttttactcttattacataaaggtatttttgcatccaaaatatgcaaaaggttaataaaaagtttaaaaaatacatttattttaggagcaggaatcagagaaggtgtagcatttaggtttgtgaacttcatgattcctttgcattttgcagtaggcattggtaagaagataccttttctgagaggcttatcacgaagtcagataatctggctacataacataaaaatatttcaaaaatggaaaactcattaaagtacaataaataaatttcacgtagtaaaagcaagcaagaattgaaagggaacaaatatatcctcaagctgggaaaaatcattttaaactctcaaacatttatttgatactatctttccaagaataatggagcagaaataatcacattccttttcctttacatacttttgttcagagaaaccagatgcagaatgaagctttgcttccctgccaaactgtcaactttgtttaatatttaagtttcatgcaacataaacaaaagatgcgaaattattgttagtgtggagggttctgaatttgaatcgtttttgactgatcactgtgtgttctgaaaatagacacccatctccatatggcctagatctttcgagtgtttcttgctgtaattccagtggtgatgaaaagtgaagtggttttataaatgtgggcatgagtacatgctttatatatatttcaagtggtatggtttcccactattgaaatgtcttcgtgttgttttgaaggaatatctctttcagagagaatttaaaagctctcaaaaaaaccgtcttgatcaagagcagtttgatagaatcaggattgagtggcttcttacct

SEQ ID NO: 35148 - DNA, 1482 bp, Bovine  19866880372445
  misc_feature (1)..(1): n is a, c, g, or t
ncttgggatttcccaggtaagagtattggagtgggtcaccctttcattctccagtggctcccgtcagtgggctcaaattggctgctcatagctcctgccatcatgtctgcctcccagtcagtaggaagaaggaaaggataagaggagcacatacccatttcttttaatagcaaaacttaaaagtggtctacagctgacctcctcatagctatcagaattcccttcccttcccttacccacctcagctgcaaggatgttgggaagtataatcttcagctatgtgaccacatgccagctaaaactcaggtgtgataaagaaagaaggggctcatggaattttgtagaaaactagcattttcttcattcctgggggcagccaatcttcctcatatagagcccctgaggaagacagtgacagagggagggatgagagggagcctgagggaaaaaagtcatagaggggtcacttaagaaggaaggtccctgagggaattcccaggtggcactagtggtaaagagcttgcctgccaatgtgggagacttaagagatgcaggtttgatccctgggttgggaagatcccctggaggagggcatggcaacccactccagtattctttcctggaaaatccccatggacagaggaacctggtgggttatagtccctagggtcacaaagagttggacacgactgaagcaacttagtactcatacatgcagtggttaggactttaccccgggttcaacccctggtcaggaacttagatccctcaagcaaagaaggaaagtccttgagacagggataaggatatgggagggcagaaaccaagaccagcttgatggccaggatctgggatcagggagatgtcctggggacagcagggacagtctttatccatttggatcttcccctccctctgggttctgagttaaggtctgtggacttctgtgctggggaaaggtgtattattcttttgtgctagctcgagcccaagaggaggaagactaatgccggagggtgcctggggagtcctgagtagtgggagtggaatcagccacaggccagtgagaagtggcccagggtttccaccccagagggacgatgcactgagattcccagggcccaggagaagccaccaacaggaggcactggctgggcaggtgtatgggctacagacctgacctgcaggatagtgtgaagggtggcgttgtgtgaccactgatggagctggggacttgggggcatagggacaatgtgatgacactgaaacccgggctttcctcacacccaccccctcagcctgtcatctggctgtgttctgcatggatccctaagctgacaagagcctctggacccggcattctttacccagtgcccagaatcccctgcagctgtgcttgagcgtgtttttctgggtgatgacgcatcgtgcgctgttagcagattcctaaagggcctgtgagtcagcagaaatcaacaactg

SEQ ID NO: 35149 - DNA, 1183 bp, Bovine  19866880486427
  misc_feature (1)..(1): n is a, c, g, or t
ntcatggtggtttccatgggtcaaaaatggctggggtgctctgagggtttttcctcctggaaacaaggaggctgccctcctaatttcttgggactcaactttgagcccctccatccttgcagagggtggcccagcagagggacaggtcctgtagagggtttgtgaagcacagaacagccccctatccataaatatcaacaccacctcctctacccaaataccctgaaatcctttgggctgaagttctgtgtcttagttgtcagtgattccaacagatagagtcaaggagtgagggggtggaggagtagaacagggtcatgctcaagtgaggggagataggtacaaaaagtactgtatgaatagcagggaatgagcccctgggtcagatggggtcaggggtcacctgtagttctgcacgatgttccgggaagcttccagctgtgccccagacagcagcagatttcgggggtccgtcacggtgaagaagtgccgggctctgcctaggaaagttctttggtcccagcgaggttcctggatattgatatctaagggcaactcacccattttctgcagggcagggaccaaagtcagaggactccaaggaaggggtccaagggctccacatgggggaaacttcggtggtgctgccctggtccctgggcctattgccaatcctctggagctcaaggtaactccagataggtaagcaagtgggggaggagctgctctctaggcaatgttccagcccagggacctacagccactggaggaggggacaggagagaacagggccaggaaagcagatgtccttgtgctctggcctgctgcagattttcatgagtgaggatttacacgtgtgtggttgacgcatgagcggcaactaatcccatgcagctactcttgtgctctgtatgcacaaaaatgcagattatatgcatcacacatccacattcatgtcagctttaggccccagttgctttgagatctacatgcaaacacccgaggctgtttggaaaaatggcataagctgtaccacactccaggccctaaatggaggagagcaagggctcaacagcttcagggcttacctattccggtctcaaacaggggactgatgccagccagccagtgtgctcgcaggcatccacaagttgcctctccagacccatctccctcaaccaca

SEQ ID NO: 35150 - DNA, 1236 bp, Bovine  19866880522283
  misc_feature (1)..(1): n is a, c, g, or t
nctgcagaatcttctgctccgactgccagaggcccagatcacagtcattccctcacccccaggataaggtgaatgtccatcaggccccttcctggaacacattgatgggacctaaggtcagctgctaccacaggtgtggaaaagtggaagtgaaagtgttagtccctcagttgtgtccaactctttgcgaccctatggacctgtccaaagcccccagccaagcccagagacagcacttaccttctctgggggaacagggcacagcacaggggggtggcaaataccaggctgagggagaagagtgttagagaggtttgtgaagcgctgatctaagagtgttccctcccagtcccccaccctatctctggagacagcccctacgggtggaaactgattaaagccaacgatgacagatgacagtatgttctggctgaggaaagagcctccagagcagtgatccggagcgccacagccagtgacagaaccaggaattaaatgtgcatcaaactctaagatggcaccaaaaggcttatttccatggtggatgcgggacccctttgactagactcttgaccttcaagaacagacctcaccccttaacacacacagtatgctttacaggtgtccaagacccctaccagctgactgtatgaatgaatgacatatacaaacatcttaaaagcaataatacccacccacattcaccacagaaaggacactcacacacactctagctgtcttcctgcatacttaccagaagcccaccaggcccatctgcagtggggcccccagccaggggcggcgctacgggtagagagagaatataacagtgtgtgtcccctgcccccctcacccgtaaacccataccatggcagcggttctatcccatcagctctacctttaagcctctgaaatatggcccttttctttcccctaatcccataacagcgattggccgccttccatcccagccaggcatgcttgccaacacccttcctagcataccatcctaacccttacctctcagaatcacttcctacagttcctccaggagcatttctccaggaagccttctctaaccctccactccctccctcccatctcactgcatcaatctgtccatttccaaacacacctcctgctctgcacacccttcttgatttgttccagccatacagaccaccaatctgttgcctaccgtgtgtgtgtgtgtgtgtgtgtgtgtgtgtagcggca

SEQ ID NO: 35151 - DNA, 737 bp, Bovine  19866880572631
  misc_feature (1)..(1): n is a, c, g, or t
ntggtataagatatggtgctgccctcacggagtttctagaatgacagaaaaattagacatgaccaaatgcccatcttactgcactgagctaaataaactgtgctctatcaggctctcctggacagcagagggcaaacaccaaacacttagtaaatgaactgggatttatgagagggaaatttcctagaaggtgagttttgaggaagggtaaactgaggttaggcaaagattgtgctctaggaaaataagagcaggatctatgcagaaaagcagtcagaagactggttgagcagtgttggagggagggctgctaaaaagaagtggacgagcctggtgtttgcatgcctttgtctagcttggctcctccccacccacccagccacccacccacctagcctacagaccagcaggcaactgttacggtctgcctagttggtccacacaagaggctgtcctggccagagtatctccttcataggcccctttgcatcccacctctcctagtttctggctctcttcttatccgcctccaatttttgtctttcctatcaccatcacatctctcccactaaaggcattaaatccatctgtgaaggggccctgctctgcctttccagatattttcaagagtgggaatgaaaactaccctcactcacccacccccacgggccacagctctgcacctagtagtaatcttcaccctcttcactctcagcctcctcctcaggagccaggtg

SEQ ID NO: 35152 - DNA, 1247 bp, Bovine  19866880573189
  misc_feature (1)..(1): n is a, c, g, or t
ntctccttctgtgagtaacttttatcccatctagttctgaggtgctggtctccccacatctggagtttttgagtacactttaacttcagcatttgtcccccactgagatagttgctgaggggccagggttattctctcagtcccatctctgcctaggaagatgaaacaaaagggtgaggattcactgggctttgcccccaccacacctcccagtgttagctgagcacaatgctataggttggcaagtgttctgaaatggaggaggagactcacacagagcttatagccagtgcagcttcagtgtttccacagcgcttttccataccttgcaggatagtccttttaggaaagggccccacaaagcacaggtgatgtcctatgcatctgcagtcacaattacctcatctcatctttcaataatcctgtgatgtggcttttattatctccattttacagatgagaaaactgactcactgaaacctggaaaggggcagagactggactcaaatgcagcttttctgactgcattcattactagctgctttctcaacaccaaagttggcagaggtggtctatgccttgcaggagtaccctgcacacatctaggtgcctttaagcccttaggccccctggtaataacacccccaaccccaccgccatcccagaccccctccccttgcctgcaggataataagtacctccaattaaaagaagagcagctgggactgaggctggggcagggggaggagaaaagggagggctcagccataggcagaggcctctttggatcccacccggctccctccctgctcagggagagacccctgggccagaggttgtcctttagcttaggggtgtttgtgataacttaattactttgtgtttgtgggactgcaaccacaaggggaaagcgggtatgaaagtgcatggcagtgagggtagctgtgcatacataccgggcatgtcttttaggactaatttgttaatttatccaacagatacatattgtctattatgtatcagtgttagactgttgggatagtaccctattaggctgcaagaaaaacacttcagtaagagtgctgtaagagatgaaaggtgtctaggtcatttttacaactggatttgtttgtgtgaggctggatgtcagtgagaaggcaggtaatgtgttttctgtaacaggataagaatgtgtttctgtaactggtcctctataatgggcacatttgatagggcaagactatatt

SEQ ID NO: 35153 - DNA, 3777 bp, Bovine  19866880591466
  misc_feature (1)..(1): n is a, c, g, or t
nttagctgtcctccttctcctcctgtaacaacagtttaatgaacattaatgaggagagacaaacagataaaagaagacccagtggggtgccttttcaccttaccatgagggagaagtcagtgccaagagctgcctggggccattgcttccacagaaagaccttcctttttcttttaaacttgagggaatctgtttcttgtaaacagaaggactcctgccgagtactcctgtctttctctcgggtctggacttgagctcctcacagtcttggatgatactcctgcctgggccttgaacacaactcatggtcaatgcttggtgaacaaatgaataagattccaagtcatttctaaggaacctacaaaaaagctgttcttcagggacttagaaacgccaggggtacacatctgggagagagtcagccccctggttcatggcctcaaccctcaagctagggaagaaggcaggccaggaccaggatcactctggaggaccgatgctgaggggtgtcctgagttcctgtcttgcctgcatgctgctaggcctggcctcttcctttcctcactccctctgggctcaggaggaggagctgcagggtcacaggaggggcaactgggggaagagagtcactgggtcacgttgccagtctgctgaaacagggccaagacatcagctaccagccctcatcccctcccctcccaaccccgtacccaactccagcacactcaaatctattctgacccttcccttcaccatgctctttcttactatgtcattgcacatgctgttcctgccctctcagatacccttccctgcctgtaccttgaccaaagcctcctaccagtcttttaacactcagttcagagctggcctcctgctggaatcttcccctggatctcccagatagagttaaatgctcctgctctgtgcttctgtggtccttgtggagacttttatgagccaaggctcatcactccagttatccatgtacttgtgtgtctttccccaagaaggtctcaaggacaggaattttgtcctattcattgttgtgtctagcaaaggatctggcacatagtaggctttcaccaagtgttgactggatgaatgtatgaacagggtaacggtttcttccagctggatcctgttttctcttcttccctggatatcttgacatcatctgcagttctgtgaactgtttctcccaaaggtacttctatctacccacagtcccaagcgacatctggtgtctacaaggtaggacacagcagggttaagggtctggagtgtttgggggttagagatctggggcttagggatgaagcagggaccacaggagaatgagggcaaagtggggtgggctgggcgcttgaacgtcttcactggccatttgggtcctgatgggtaggcccagactctctctcccagacaggcctctgactgggctcccaggcatggctgccactctcctgccctcctacctccccaggcccacggctgagcggctggcagaggcaggactgggccagcccgagcagacagccttgcgcgattgctggctccaggcctcccagcccagcttgtagctccccccagagtggcgggattgattggctgcagccggaatgggcaccagtctccctggcttggacagaaacggggccatctgttacacctctagttaaaagtacataaagttgagcatttgtgcgccgacaataccacccctgacaccctccacgcggcacagcgctccggctccttggcaggcttgtgctccatgacaggccggcacagcaacgcctacacgctggctggcatcacggctccaccccccagcggcctagcccagctgggtccaacctagaagccctagattctacctatatcagaggatggaggaaggaaaggggacgggtggaagggtgtatactggtgggtgactcttggcccaagctcggggctcctgagtggcagatgatgccagacttaaggtctgatttgggagaacctggtacagctactcatgccagtcctagggcatggggcttcaggtgggcctaggctggctctgagcccataccaggccttgcatttcctgggccaagccaaacagaagagtccatcttgtgacccaggtcactcatgcctcttgagtttggagcccatgatggcatctcacatcaacccagaagacagttctgttcaaggccgagttctggactgtggctttgggctcagaattctagactctgatttctgaaccccaacttctggtctctgactttgggtcaggacactcaaggcattccacggacatcttttccacttatgtcctctggtgctctagccaggccagcctactgtctcccaaaactgttacaaggagtcccgcctgcctctgtctttttgcccatgcttcccctctctctaacctggaatactcgatttcttccctctagcctctcagtccttcccatcttccgagactgagctctagtcccagctctgccaggcaggcttctctggctacagggcctctgcctgctctgatctcccagaggcctcctccccaacccaaatggtttcttccgaggcttgttcagtatgagactggactcctctgcacaggtggaagctgggctggcctttgccttgcccacagactagaaaagagctgggagcgtgagtggggaggaggctttataagtgccagcctgaactcagctcagtttcagggaaagggggacaatgactgcagaggtggtactggctctcccaggggccacttcatagctctgatgggcacagcatggaaagcgaatggccaggtagacagacagcttttgattactcatgtgttttttttagtacacatttattaaacatgtgctacatgcttagttctgtgtggatcatggaggagaaggaatagttttaaaaaaaaatgagattagacacagtgcctgccctcaatgagcttactcattaggaaaggccacaagacaagttcaaataataactataatttgaactataattaactaaccaaaatcaacagaagtgtcctttatcttaagcaacaatagacagtcagagatggaaaggatccagaaggtcagagactttaatacccatcctcagccaaaagacatttaatacattgcttgagataatgtgggtaaagctcttacttggcacaaaacacacgatggaattgagttggccaaagtttgttggggtttttccgtaagatgttatgggaaaactggatgaactttttgcccaacccaataaaatgatgcagaatatgatgatggcaataagactgattattagccttccagctggttcgaagcatactctacctgttgggaaagctcactgccctccccccacccctggcagttcattccattgtttacacttctacatattcattcataagggtaaggcgaaatcattctctgtccccactgcaattgtggtaattccagccctggggccaccaaaagaggctggggactaggatgagacaagtgagaagcccaagcacaaaatttcaggggttgtacacagcactgagaacaagtacttccttaaactgtgtgccctaagcaccttatttgcctcatcctagtcccagccctaccacacagtgagtgggtacccttccccagccagccccaggctgggaactgtcagatttctcaagtacccttagccttcaaagaagctcctaccagaagcctacaggagcgggtgataggggcagatggg

SEQ ID NO: 35154 - DNA, 1555 bp, Bovine  19866880671146
  misc_feature (1)..(1): n is a, c, g, or t
ntattttgatgccgccttgagtctacacacacccatgcacacatacactcatatatacacccagcctggctgatgtccaaacaactcctttctcaaagcagggatgtggaaacacacacagctctcaaacacagccctgtccaggacgcagacattcttccagcctgtccaagagctcctcagagcgggatgtccaagtcgagggcctctgcccaagcttgtccagagtgagggatgggagagccaggaatcagggaagacatctccccaacgaagccacaccttcgccacacccccggcccttcccctgctttggctgatggtttcaaatgtttattcagcacctacaacgtgctagacacagtctgaggccctctctgccatctctcttgagcatcaccccaaaccaaggaagtaggcattatttctcccattttacagatgaggaaatggaggcccagaaagacaaccagttttttgaaacagatcttctacatgatttgccttaaaagatctctcctttccttgcccagcaccccacctttccccagcctaaggcagaaggagcagagatcatggagataattctgttaccctccggcggaaaactatggcacagagaatgttccaaggaccattgtggtaatcacagcaagacagcccttggtgatctgatcccgcattcacccagatagggtgagagaattagaaatcagagaacatccccattctgacacaaaaggcccctgaattggatttccctggtggcccagtggttgagaatccacctggcaatgcaggggacatgagtttgattccttggcccaggaatattcctcacacctcagggaaactaagtctgtgtgccgcaacgactgagcctgtgctctagagcccctgagctgcaaccactgaagcctgtaccctctagagcccgtgctctgcaacaggagaagccagcacaatgaaaagcccttgcaccacagcgagagagcagtccctgctggccccaactagagaaagcccgtgcataacaaggaagacccattgcagttataaataaataaattaatttaaaaaaaagaggcccctgaattactagatcccagggtgcagattcagggtctggcgtgaaggcaaagactgatgggggtggggagtaaagagtacatgaaagcagcaggtaagtcctcagccatgccagtgatcaaaaccttaagacttggggattctggtcctgagggtctatggcaggggtctccatccacccccaccccaagcacaagaatggcctcaagatgcggtggggtggcacagaaagttctgtggccttaggtccctccactggccttggccccggaaaaccggtagggagtaaacactgccaagactgacagggtggaatcaatggctgccctgagcaagggggcgggggctcaggaagggagacccttgaacctttgcttggaaacaggctccctgttcccttcccccctccccctggctggcccagcctggaagcagccacttgaaatgggtcccagggagcctggga

SEQ ID NO: 35155 - DNA, 1161 bp, Bovine  19866880809608
  misc_feature (1)..(1): n is a, c, g, or t
naacccacccaggatcaggctcccagctcccccaggtctgctgacctctgcccaggacctcattggcacaggcgcacagtctagggaggcatccagttaccacacaaaccaaccatccatagttctacagcctaaccatcaccacccagcacacccacagacacctcccacagccgaccagggtcctctccaccttactactgccgcttccgacctgctgaccctcgtgaccccagtttgctcagattccgggtcccctcacccacatatcgtgcagcccccacccctgtccactctggaccccttatctaaccactccccctacacttgcgctcccttaggcccctttcccagaggtgtgtgtgtgtgtgtgtgtgaggggaacatctgtattctcagcacaaactactttctgcgccccagaaaaagggttggttattggggtagggagcaaaatcaaggtgcccctgggttctagctgttggagacatgcagggcggggtgagtggacttccttggacctggaggctcagaagggtggggaggagggggtccccgcagcgactggcaggggcggaggggaggcgcgcggccccagcccgtccctttcaggggggactcatgcatcaaacttcaattttccggacgattgaattagtgattttttttctcctgaactaaaatacacttaagtctttgggattaattaccacgttctggtccctcagactggagtattacttatcggagctgcgtctgacaccggcccgacacctcgtaaaataaggaactgcgcctcctggtctcacccggcgccgcccgctggccccccgggccggggaaggcggagcggggaaagcagagctagccggatagcgcagaggggcccagcctgtccgcgcgccggcggggtcccgggccggagagcagaacctgcccgcgtcccgggacttggcaagcagggccgaggccccagacccagccgtgaaggaagaggcagagccaggtcgcttctccagggcagcggggaagcgaaagtgggtccgcagagaggccagaatcctgagtacgcaggcccgcgacggcccggggcggtaaagtaactcgggcaacagggctggcggcctggagggtcccaaaccttaacgaacctcgccccga

SEQ ID NO: 35156 - DNA, 2108 bp, Bovine  19866880885778
  misc_feature (1)..(1): n is a, c, g, or t
ntccatttctccccaggccttagcgaaccctctgctccctggcgtcactgcagggccattctgaggctcctggacactttccaggtgtgggtggtgtaactccaaatgtcaaatattagctccaggtcctcttttgtcttctggttctcgcccacaattcctttccactcaacctcccactgagtgttctcaggagaagggagcccaggcccagggctgcctgaacccaggggaggtagggaggtgctttgagattgttgaagctgttcagagtgaccaggagtggcctgcaccctcagaagccctggacactcacttctaagggcaataagaggtgaggggagacagagtattgacttccagcatgactagggttgagggtgagcccaaagcaaaatttcctctccaattctctgtgcttggtgtgtgtggggagtggtaagtgggtttggcagggtccagagctaaaggacccccagaaggggtctgagaatccctgtgacccagcctagtcctcttcttgcccccagagaggtcccaagccccttcctagaaaagttaccacagttataattgcacagaccatgtattaggacctcttgaaaactggggagtgaagaggggattatggttggaggagacaggagcttgtagactttatgctaacccatacccactaaaatcagattttcaaggaactttaaattgcacaaagaatattcacaggagatgatgataagcaaaaaaatagaatacaaagtattaggtacagaataatcccatttatgcagcaaaaaaaattttatagattaaacaaaatgatgagaataaaacaagcaaaagtagagacggtgatggtttctaggtggtaagaatacgtgtgatttgattttctttatatttctctatagtttccaaatttctaccaccaacatatacatttataattcagaagttacgaaaaagattaagaagatgactctgaagtcaagctggcaccccaaatgcagacccagaatttggcagccctttgcctgctccctgggtcttctttggtgatcctgggctggcttcttttatggcagcccatgggggaggggctgaggcccagcagctgggagtcagctgtgcttggagacaatcccgtgtccaatgggatagggtggagtggggaaggggggctcatttccgagctggacaggagccaggttttagggaccaaacttgccaatcagctacctgaggcaccagtaattcataactccttttcagcctttgcccaagggtctccactccctactccagtgcctggctttcagctatatgagaagggattaaaggagcttcatctgtggttctgaggttcagtgagaacctggatttatggacatacattcaggcctatattcacccctttccctggcttcagctccctcctgcttctggattcccaaggccatggactctgtctggggaaaagaatggcaggttaaagctgggagggggccccacagaatctggctgaggggttttggaccaaagagtctcagttaatccaagcctgggggattagtaaaaatatggctaagaaattctagcctaccttcaactattcagttgtgttaaagaaaaaaaaaaaaaaaaacccacataaaaaaggctttttagaccatttatttatgagcatgtgtcaaagttttatttcagtcttgctgcaagtgaggagacctttaagaggccaattcaaggattacctcttggtagacatatttagaggaaagaagagtggttagcatcattgtttaaatggacatacaaaaatgatgtcgtggataaaatgcatcaaactctcactgacaaccgtagaggtagatgggaaactgacttctaagaagaaatctgcatctgcttaaaatctatcagaaaagtttgagtatttttattcagaatgctggtttttctccccacccccacccccgcccctgcaaatggattatattgagcaaaaaggctctcttacagaaaggtttggtgtcttttcatcttacagttggaaacattgacctggctccttctccaaggctggaggctcaagcatgaagcaatca

SEQ ID NO: 35157 - DNA, 2216 bp, Bovine  19866880971904
  misc_feature (1)..(1): n is a, c, g, or t
ntggcctggtcacccggtgggtctggggttggggtagcccctccactttggaagtcctttggactcagaatcctcctctcctgcccagatcctggctcaaagaggagcacagataagggtggacaagcagtgccccttccatcactcagccaaatttcctcctgggcctccttgggttggaggttgccgtgctttgtcctgtgatatggcagagccaagagggcagtctaggccaggatgagtactctgatggtttccataactctcctgccctcaaccccagtctgggtgaacacagctctgcatacacgaacaagtcccacaacctactctcttccagtttttagccataaagttctctcactcttccaccctaaagaaagagccccctatgtccccactctactaccccaggatggcatgtttcctaaagcctttaccatctggcttcttccagaaaagcaggcttaagtcagttttgtatgtcctgacattggtctggtaggtgggggactaaatgttatggggagtgttgtgtactgtggctgctgtcctggctagagtggtctggggcctccctgaaggtcctgggaagtcagtttttcagatccctcctaggccaggctagtctggaagctgggaagtcttggcttcaagcaccacagaagatcctggtccaattactcatagaatgctccaatctctgcagcttgctgggtaaggtcctagaaccccaaacttctagcagatgtgtatacccctacaatggatctgcacaccccaccatcatgtactccaccagtgtacaattaattatacccactaacacagcaccatacacactcactgcagggacatgtcatccacaatgatacatattccccattaattcactcccccaattatatacaatcctagacaagtatcactcatacaatgaaatacacctctaacacatgattacatacatacaattatagatgatatacagccataaacattcatacatttaacacaaaaatagattcataatgaaaaactaatacgtactctcacaaatattagcccctgattcactaataatcacggatgttggtgggtgattatacaactacccaaaaagccacatttacatatgatcacacacataccaatacaagtctgtatataaatggtagtttcgattcacaactgaagcaaaataagcacacacaactgcatacaaaatcacacacttgaacacttattatacaaacactcattgtcagtataacatcccgactgcccacaccatcacaaacacagagtgcacacacgtaactctcactcccaaagacaaatcttgagcactaactgttccgggagacactggctctcccaacttgtctcactgctgccttctcttcatttctcctcctccttctttcctctttccagaacctgacagtcctgaccccaagatgtccttcaaacttaagtatgaggggctgccctggctgcaccagctcacaccagacccaagtagctgcaaggtgctgggctcagcaaggagcaagcagccttgattccggattcagagggttttattattatttttcacataaattacacaagcactttataaaaaggttacacagaaaacaccttataagtgcataacttaaaccccaccccccccctacgaacaggatctggagaaataggctttttgtgtggaaacctgcctgtgcgtacctgggtgcggctagggtgtgtgataggggtctggcaggccaagtgacgctgttgtggctgttgtgtgtgcgatggtgtgtcacagtgtgactgtggccttgtatttgtgagaagtgccatgctgttcagaatgaatctgggccctgatcgtaagggccaagggagtgaaggctatgaccctgtgtgtgcaagacactctgccatagggcccctgtgactgtggggagacactaggagggacagtgaaatcacgtccgtgtgggccggctactaccaggagtggagaacagagagggtggtcttcccaaggcaagttcaaacgacagctcatgctgtcctctagggaccccaccagctcttcttccaccacctcttctgcctttctcagtcccacgttaaaaatcataataaaataaaatagacgctaacggaggactctgaacagttccagcaggcgcgggaccgcgtaggcatctgggaga

SEQ ID NO: 35158 - DNA, 1826 bp, Bovine  19866881128403
  misc_feature (1)..(1): n is a, c, g, or t
ncctgtcatttctttttaatcttcacttaaatcttattcattttttaaggccaagatcacaccccagttcttacacaaagccttccctgaccattccagcactcactgagctcccatggcctatacctctgtatatccagaatatcagaaactatcagccttagaagagccacagagatcacaggttcaaccaaactctgatcaacctctaaaatcatattttccaagcttcagcattcaagtaccagcttcacaattcactccatatccgtatacccccaataatgttatttacttgatatttttctttaaatcaatttatgatttttttacttgagtatgtttattaaaaaaaaaaaaccctagagcactataacaactggaaaaccaatcattagttgtcaaaaatagaaagtaattataaaaattagtaaaataaaaaacaatgaaattcaattctagctggctaccactgcctgccgagaactcttaagcctagggtctcctctctctttgttaaaaaggaagggagagaaacacatgtcacagaggtattgaagacacaccagcaccaaactgagactttctctttgatacaactggaataatcagacaacccaaatgtccatcaatgggaaagcagtatctttgtgtgtgtgtgtgctaaaatgtatgtaatataaagcattatttttgttgttgttgttttggctgtgcagcgcagtttatgggattttagttccccaaccagggatcaaacccaggcccttggcaacgggagtgaggagttctaaccactggactgccagggaattgccaaaacattaccattaagaacatggctataaggagagtgatatcttcacaacaatctatagtatcctcacattatggaatgttattattttttaacttttttgcctgtactgcatgacttgtgggatcttagttcgctgaccagggattgaacctgggcccagggcagtgcaagcaccgagtcttaaccactgaaccctcatggaattcccacagagagtggaattttatactgtagccaaaacaaaggaacttaagtgacatgaaacagttggtatagatgactcattcaatacaatatgtaagatggtccaagaaaattatatagtatatagtctgatactattttttaataaaattaaaaacagtttaaaatttaaatatacttttcaggaatacatttaggtataaatatattaaactatatttactatactaaaagggaagcaagaaatgatgaatatgggattcagaatgtcatttgcctcaggtcagaggcagggaagggaacacaagggtcatttagttagtactgtcaaggcttgagattttgttttgagtgaaaaattcatggggtgtctatattattatttaaaagcaactaattaaaaagctaactaaatatatataatatggtggtctatgcaaggactaagatgagattgtgtcatgaacagaggaatgtgattaacctagttctgtgaacccaggatctaatggaaaagagaggaaaagaaagtaactctctcactatgggattcagtatgatttaatgtcttgtcaatgcaccattgaaagcacctggcattccaccagaggtctactttctgcacttgcagaaacagctctagaatatctctatcatgaggctgcttgcttcctctgcccttttgcttacctccagcatgagggagcttcatggacttccagagagacttacctggacagatccttttgtctggaaatattccctggtaggagagaattcagcctccctgcaatcctgccca

SEQ ID NO: 35159 - DNA, 1191 bp, Bovine  19866881149650
  misc_feature (1)..(1): n is a, c, g, or t
ncagagacgacagctgccttatcccagcccaccgctgagaactggaccagtcctcccccagattccaaagccccccttcttctccgcagccacattgttctactgttacatcatcagcctgcaggggcaggacaggtgctggatagatcatggccatccctccagctgccccacacacatcctagacacttccacatggcatctgggagctccagtccaactctaggatgggagtactctggggtaactgcacttcctgtctgacttctattagcctctttcctctctcctgtggattacattcactctgacagccttgagtcagacacccttcccagctatcaggaagccaggctgctcccacttaccagcattacttatacctcctcctcacctctggtctcagagaaccacacgaactcatgtctccaccccgcagatctgatcctggttttgtcttcccttgcttgtgactcatttgacaaaagattctgtgtcctgagattctggtcttactcctagtctagaaacccttgaataggttggtgatgagaatatgagggtgtgtgtgtgtgcatgtacctgtgctcacttggtcattgcatgcccagggcacaggggacattattcatggagcaggacttggtaccaccctgccttccaaattagggaactgacatgcataaggaaaatgaaggagcaaccagggaagtaacctcccacagcaggaaggatgcctctcagtcctgcatgccttattcaaatgagattctgggaagtcattcttccatgatcatttactcagtaagccatcagagaggacccagtgacatggggtggagggagggaagaaggtactggaaatagccatgtaagactcagccactcattgtgattcagagcctgtccattccttctccctatgtgagaaggcagctggagacagggctcaaaggagaatggaccttcgaaaaagagaaagcctgtttccagggggcaaaggaagccattaggagctggaaggaggaggtctggttggagaagccaggcttcacaaaagtgcgtttccagccttagcaacaaagccagtgttagctatgcgactgtgatgagaatcacctaaaccctctggaattcagatctcccattggttaaaaaaaaaaaaaatgggggtgtccttttcagctataa

SEQ ID NO: 35160 - DNA, 909 bp, Bovine  19866881149898
  misc_feature (1)..(1): n is a, c, g, or t
ntaaatgtgcatgctcaactttgaaaatgttgactcagtttgaccagaccatgcaaaactgttgagtcacaggaaaaggatcctttttttttttaactggaagataattattttacaatattgtgatggtttctgccatacatcagcataaatcagccacaggcttatccttaaacctcctccttaaaccttcccgataccacccctctaggttgtcacagagctttgggttccttgcatcatacagcaaattcccactggctgtctattttacatatgatagtgtatatgtttcgatactactctctcaagtcatctcactctttccctcccccactgtgaccaaaagtctgttctttatgtctgcatctcttttgctgccttgcaagtaggacgatcagtaccatctctgtagattccatatatatgtgttattatgtgatgtttgtctttctggaaggattgttttaattcagatgatgtggctacagcaaaggatgctgggtgacagcatccttttgcatcagcatgagggagactagttcagatgaggagggttaagttaaaatttgttgaagaacagataatcctgcttcttacccctcctcactttttcctgtagatgcttgtactaaagaaggaatgagttatagaatatagtgtgctttccactgtgaatcacagcttggagctcacaggttatcatacctttccttttttcagccactgacccatgagataatttttaaatataatgacagtatgaaatgggtcctagatagatgagcaacataagatgaaacaaggcataaaggatcaataaggtaagaaatttcttggtaagaaattacgtaggaggactcacacattctaacctgtcacttcttgaaccctgttttgacatgactg

SEQ ID NO: 35161 - DNA, 771 bp, Bovine  19866881160979
  misc_feature (1)..(1): n is a, c, g, or t
naagaaacaggacaggtgacctgggaagctttgcagcagaaaggcgctttagaaaataatccccagggggaaaagactagaagcccagagcacaggaagctaggagccagcaggcaggggaggagagagaagaggggaggaaagatatccctttccacggatgtgccttggccccagcccaggcaaaggggggcagattttctgtctagtcccaagcccctgcatctgccaccttgtttacctcgtgcctatttatagttgcaggctccaagcccggcatgggactctgcaatttatgtgactataaacctccaaagggcactggatgctggcagggcatggataaagacaggggcaggcctctcaaggtcaaaatggccaccctcccaaccctgttgaccttacactccactaaagagcaagaggtcataagactaggctcaggcaaagaagccatgcgtggaaagacacagtcacctctttgcctcttcctaccctgagctggttcagtttaggattgcaagcaagttagagaggacctgtttggtttggttttccctttgggaggtcgttgggaagctctggataggagggtggatctcatcaggggatgactgattttggagagagtggctgaatctagctttctgggagggaggggagaaaggagctctgccacccaactctcacctgcccatcctcttaacatcagaagagaagaaaaatcctgatggctcagacagtaaagaatttgcctgaaatgtgagttcg

SEQ ID NO: 35162 - DNA, 944 bp, Bovine  19866881308379
  misc_feature (1)..(1): n is a, c, g, or t
ngcggcccattatccggcgtcgttaaagagcaattagatggaaattaagccgagaacaagtattgattatctcattaaggccgggggagccctgtctgtcggcgagagtttactgcggctcaccccattatctgcaaggtgaaagcctgcggtcatcaacacctagtgaagtatcgatctggtcccaaacccagtcccgccccttccccctagagtaagggttctaagaggtgacactaggggtgtgacaaggtggaggaagaactcgggccccccactctctctgtcttagctgttctctgtagctgccttcctttcttgctcccaaatcatttcacaccctggtgctggccaggggcggggctgtaggtgtagggactggagaggaaggtcagaggtagttcacaaccctccaggcctggagagatgagactcccctagttttacatccaaagaagagaaactagagttgagatttaatggaaagaatttgccccagctgacacagcgcatagggcacctccggaccccaagcccctggagggagggggaaaggcttcgtctggttgactaccatcaccaaaggcagagacacctgggaccaccccacagatttcccaatgcttagtaacctcagaattcagaagacgtttcctcaggatcccagatgatgtgacatttggagaaaaatcacagtgtgttggagatgagtttttttcatcccagctttgcttctagtttggttgtgtgaccttggacaagtcactttgcttctccgggtcacagaatcctctaaagaatggagtcgaaagagctctatggctcttgagtcctcagacaccataatctgaccgactaactgctgagctcctgcctggtaggggcttcccaggtgactcagtggtaaagaatccacttgccaatgcaggagactcaggttcaat

SEQ ID NO: 35163 - DNA, 776 bp, Bovine  19866881391762
  misc_feature (1)..(1): n is a, c, g, or t
ngggtactctgggggagctgtagggagatccgctaggcccaagcagttggggctctctggctccaggcagggcccacaccctcactggccttggaaggcacaagcagggctagggtggcattttgcctctccccagactcgaggaagaccaggagccttcccaagtctgagcggtctcaccctccccatcagtccagggcagaggcagggaccagtggatgtgagctgccacgatggacctcttcaccccctttctctctgagaatctctcccagacttcagacctcctgtgccaagccctgtgccggccgggattcccgccggaccaactggcttcctccgaggcggtccagggaggcgatgactcacttattccatttaatgcctcccctccacccagtcaactgagatcaaacgtctgtctctaaggtggacagacctaatgggagtccctggggcctccagaagcaatttgtaggcgatcgatgaaggcgagcgaagccagcgagagggcctctcccagcagcagacgccgaccttcttctcgccgccctttcttgccttttcgctctgtctctcgtctgcccgttctttcctgaatttcaaactatttctcttctttaggctttgtgtctttttctctggtttttctctcaccccacccctttccttctctcagaatttaagggaatttgtttgaaacgaaaatgaaggtttccctaatctattgctttcctttattatacataagacttcttcgcctccagggaagtcca

SEQ ID NO: 35164 - DNA, 717 bp, Bovine  19866881557260
  misc_feature (1)..(1): n is a, c, g, or t
nctccccgtgtctcggtgtggaaggcagggtttgcctgcaggcctctgacctttaatgtctttctgttattgttagcatttgacagaactttgctgaagacttggggatgacagaaatcaacacagagaggagcttataattgctgctagaagggctactcactcttaagaccctccctagaacagaagtcagtccaacctgggatcttccaggtctaatgcctgggccagggacactgggccaggtacaaacatttcccccataaactgacctcctgtggccgcagtggcccctgtgagccaaggtctactctccccagtttcccccagagtgtaagcaagggtccaagagccagggggctgggtccaggcagagtaggtcatagtgggaaactaaagttacagggagaacaagaacacaggaaaccaaagggcttctggcagaacgattaagatctgcaaagacaaggatccgagggagagtgatcagaaaatggaaggggaggatctgaatccatcaccacaacccagctttccctgatgcttaccgaccatacccctggcccctgacggggttgggtgtcacactgcagaccgaggacagtggaccctcctaaccagctctattctttaaggagccccctcccttccatgggggcattgaggagctgtcttcacactatccttgcactccggctacaggatcaaccaaaggaa

SEQ ID NO: 35165 - DNA, 1986 bp, Bovine  19866881710307
  misc_feature (1)..(1): n is a, c, g, or t
nttgctggatactgttagcctttttaataaatgttaagagagagaaatattctctcaccttcctgcttgcacccaactgttgggtgctatgctctgacaacaccccatctcccccagtgaaaataataataataaaaggaaaggaaattcccaatcctactttgaagttctggctcccatgacattctccaggcataattcatgaggccctcgtgggatcgatagtatgtgtattttaaaaattaccttttctgttgttgttattcacttggagtcacggaggcatggagtgaagtctcatctgcactgctttacaaatgtgaattggaacagattcatgaacttctctggcccatgcttttttcaggcacagtggactctgccttcaatttcaacaagctactgtcagagtcagtataaagatgaaacattgtaagtgtcctaattcatccagtgtatctctgctttaccatctttcttattgcattgacacttacatgaaatgtttgtcatcgctacgggtctgggagtcattgaaactgaatatttgtcaaacccgcctcagtttcccagtcccagcaggtgaactcctcagacatactggatgccttctccttgcctccctaactcccctcctcttgagtcttcttcagagtccagctgagagggtatgaccaaggcattagaggtaagttctggaaaaatagaacatcgaacacagcagaaaagtgtggacagggtttcaggtgaggcaaacccgggacttccctggtggtccagtggttaagaatctgccttccagttcaggggtttggtccctggtcagggagctaagattccaccagctgcagggcaactgagccagtgtacggcagctactgagcccacgtgctctggagcccgtgtgccaccactagagagaagcctgtgcacctcagtgaagactccacatgcggcagctaagacccaacacagccagtaaatagataaataaaatagaaaagagaggcagccccttgcttcaggccttgccctggtacaggctggtcattaacacagccctggattcttcttggccttcaactcaaaagacattcatgcccaaagacctcagtaataagggaccagggaagggctgggcagcctgcacgctcagcataagtttcccggcctcagaggcctcccctcctttctccttcctccaccatccctctgaagtcagcgaaaccattgagcagcttctggaagaaggcctttgcctttggagaaggcagaagggcaaggggagctggcaagaccccctcctaggcctcctggagcctctctcccctcccccaacctctccaccaaggcctaatagtctttagctcaaaaggccattaggtctgggggcccggggcctgaaggatgggagaggggagccatgcttaaccatattctccagtccccttaaaactagggttacccctggccagaccagcacatacttatcaccaactttgacctgccattcttgccctgggctgcaagtgactttgctgaattctgcaaattggtctgaatctggagcacttcggacttcccacagcatcccttcacttggtttcaaagcctcagacttgattgtctttcctcttttcactttctgtccaccctacctctcttgtcccgccttcccgctgcttcttttcttcgtgttcttggtacaggaaatcttcctcagcagaccttctgcccactttgtacatgtgtgcacacaaacacacacaaattcaggggtacatgtagacgttcactctcaaaaacacaaacacaaacctttgagcttaagacatcaggctgtcattgaagccccgggttcacctactcacacatgcatctctggtatcttccacccaaaaagcatgcactcagagatgtatccaaccacacacattggcctgttcacaccaaaggacacacaaacacaaatatgcatccactcaa

SEQ ID NO: 35166 - DNA, 905 bp, Bovine  19866882052535
  misc_feature (1)..(1): n is a, c, g, or t
naggtggggatagcgtcaagtatatgtgtgtgtgttcaccacacagatgctcagggacacagcaggtgctcagatgtacagacacacgccaccttggagccagatactcaccagacacagatttcatactcacacaggctaacacacagaggctcacgctgttgtgactcagaagtgcttccctggaagctgcgggctctgcaaggatggggacttgggggagatgaaccagagactctctctccagccagaaaccctggtctgcccctgccagcctcccctgatgcccgtccaccttgaccagggcaatgatgttccttttcccttttctttgagcaactcctcctgccccagggctgagatttggaagcattggcctgtggttagaatgacttacagcaggctcccagccaggctgggagagagaggggagttcttatgccacagcccctagtcctccagaaggtctctgtgcccagccgtcagctcagctccccgaagaaccccccacccccacccttggcctcctgacaagcccttgggttctgaggggaggcatggccacaagcacagaggtcacggaagaggaggaggaggaaagggaggaaggagctgataggagccagggctgggaggagcagggcagggcgaaatcacttaaccccgaagccgccactggtccttggaacccccggtactgatgggggccagctggagctggctgaggacgagaggcctcagtgtgggaatccagggagggggttactggggtcagctgggagggggacaccccaagccttcgtcccctgcctgcctggctgccaccatcactgcggaggatctggagccagaacctggctccccagactctgttgctgacagggaactttttctagccttcatca

SEQ ID NO: 35167 - DNA, 1502 bp, Bovine  19866880406664
  misc_feature (1)..(1): n is a, c, g, or t
ntggtgggaggtgggaatggaccgccccaggcagtctgtcctgccgtgaagagccgcggacaggagctgcagggccaggccttcctggcctcgggcactggccggcctgggcctgccctggcagcacagtgtcctgaaggcaggggcggggatggtcaggctgccagtctcagcgtggtcactcgatctccaggatgaggtcgtcaccctccagcgtcatgtccttagtcacgtggaccttgcggacagtgccctccacaggcgaggtcactacagtctccatcttcatggcactgagcacacacaggggttggcccttggtcaccttggcccctgctgccaccttgatgtctatcaccttcccgggcatgggtgccccaatctggcccttgacgtccttcagggccttggggtggaagtgcatctcctgcaggcagggcggacagcacgtgaggcctcagccctgcccgtccccaccacctggctggcccggggcagctgtaccttcatggcctgggtgtccttgaccaggatggaccgcagctgtccgttgagctcgaagaagacctgcctctggcccgcccggttgaggtcacttatggccaaggctttgatgtgcagcgtcttgcctcgctccagctccacctgcagggaggccgccgggaggctcagagctgggcagggcgaggggcaggcggggagagcagcccctgacccagtcccaggcaggccacccacctccccgagtctcagctccacacttgtaaagacctagctccccagtctcttaagggtactgtgtgaacccccagctcacgaggccaagggacaggcacatcagagccctggcaccctggaagtgctggggtccctaggggtggccgctgtgcagcgcaggtaggtgccagagccactgacctcaaactcctctgcaatcttgggtccctgcaggaagaggcgtgtattgaggctgtccagggggccgaaggtggcagtgaagtccttgaagtgggcaaagacgtcggggtacatggcggctgagagcacgtcctccggggtcacctcctccccgtgccgttccgtcagctccttctccagcgcctgcaggtccaggggtgggagggaggctcctggccggccctccaaccctcggcaggtctttcagcacctgggatgcagagcggatggtcaggcctggctcccagacgcccttgcactgcgccgccccccatggagccgggccttcctgaccttggagcgaaggggctctgggaagcccccgtgggggatgccgatgtagccctgcaggaactccaccaccgagcgggggaaggacagctcctctgcctgcgcttcggcctcagctcgggtcagcccgttctgcaccatgaactgggccaggtcccccacgatcttggaggagggcgtcacctgaggagaggggacccctgggtttagggggccaggcaccttacggagaccccgtggcaagggtgggcgca

SEQ ID NO: 35168 - DNA, 864 bp, Bovine  19866880509406
  misc_feature (1)..(1): n is a, c, g, or t
ncccacctgccgtgtcccagatttggaggtggacgggtttgcccttcacctgcagattcacgccgagccgctcaaacaccgtgggggtgtagctctggggaagaaggggttgggggtggttaagagggcagcttctgaagggcggtggtcctggcaaccaggtcagagcccacaaatgcgcgcggcacagcccctttggcagtcagcagagcggatggtttctgggagggagctggctggtggcgttgcagccactttgcagctgtgtgccccctgccccgtcgaggcactgaacctccctgggcccctccgagactgtagagtgggtctcctggagcacccaccgcaggtgctgctgtaaggagcttcacatggagccccgagcccagggcctggtacagactaacattctacaggtgccaggaccgctatttttatctttgtcctcatccagactgtcccatttctgagccttccttcctgctgtccccgcctcctagaatgacattaacctacgtttgttcattcacttattcattcattcattcattcacgagcaccttctccgggtctgattttggacattcaggaacaagtaatagagactcactgcctagcctggggagctcctagctttcgggggtgggggagtcccctcttttgcctctcaacctctcataatccaaccaggatgctcccatttctgtctctcttacctgccctgcctggccccaggtggaggtcacccggccaggggcccctccaccccaggcccgctaagcctgagcttgccccctctccacaaaggccagatgagtgggagcaggaggggcttttacacaagtgcaggaaggaagaggggag

SEQ ID NO: 35169 - DNA, 1358 bp, Bovine  19866880537998
  misc_feature (1)..(1): n is a, c, g, or t
ncggggtgcggtgccacgtgggaccaggctccgtcccgctcccaatctccctggggtgagaaattcaggtccattcaaaatgtgtgctaggcagtgcgagttcccctcccccacttcgcactgctgccgcggagtaggactctgcccatttcctccgcccctagagcactgaactgtccacaaacagggactttccactttcagcaaaacagactgcacagaaagatccacaattgttcaagagtagaacagggacctaactatcaccaaaagcagtctacctgctagatttctgtgggggacaaggaagggtaggtgggtaaattgtgtctgtgttggggcgggggtggagggtgtggggtgtgggggcagctgttcacagaggcacgactcagttactagggtctgcgtgggtgtggagggaaatgcagatttccttccaagccctatttcactggggccatacaaccaagcacgccctgctttcatcaaaaaaggcagactccagctgaggcccttcaagaaaccatataaagaagccaccacccttcaccagagggggtttgggacagggagtgggggtggagtgcggaaaggcttacgcctatctagcctcctggcatgagagaatgttcaagcgcaagcccacacccgccacagcccaggaaggcgacgagaaccgcgggcgcctgggcggagaaggggaagagactcccaaaggcaaacgacccaattcgaaagcacatcccaccgggagagggaacaagtgcagtgacgacggcaccaccgatacctcagcactatcccggactcgccgccaggcagttctcctgcctctctgccgccgagactggtccctgcagttccacacaccacacaccccagaccaagagggctctgccgcccgcccgcccgtctgaccttgtgtttcccgtcctctggagctgccgaggctcttggatgaagtttccccagcgtctttgttttgctttctgtattggaagttgtgctgaaggagttaggtgttctgcctctagtaaaaatcccagtttattgaaaaaaaatctgaaatctcccagggcacttaaggcagggcaatcgggcgatcacctttcaggctacccggagggagcggcgcgcagcgccctgcgctccttctcgagccccagagctcagccgcggcttcctgtgcctgcgaacaatgctgctgcgtcacccacatgcagctcccagaaatgctttgcaacggaagatggcaggaggggagccgagctcgagtgagcgagccagcagagggcccagcgtcctgcggcagagtcaggaggggggcgtgctgggcagcgctcccggcgcggcga

SEQ ID NO: 35170 - DNA, 839 bp, Bovine  19866880556634
  misc_feature (1)..(1): n is a, c, g, or t
naaaaaaggccagcagtccgatttttggaaaatataagcagtctttgtctgttcccagcgctcttggttttcacaagaccgtggtgtctggctccctgctggccccagttggcagctagcctgcctcagcaggaggcccaacttctggaagggtgtggcttgggaggcctgtcatggggagacgggtgtggctcctcaggacctcaggaagcccccctgtagggccaggcagcctctgaggagaccccttgagtccatgtggagggcaggcagctgggcagagggacctggggaggctgcagccgagcacaggggtggctctgttggctggctgaagcagcaccggacgcgtgtccccaaaacgatgcaggcgggggcagtggacttgcccccttcccccggtggccctccgtgtggcagcgcagcccttgacagcctcctgctcttgaggttgccccccctgcaggaaacgccactgattgcaccgaccctggcgcctctcctcagcctgaattccgaggcccctgatggtctgagagcgcgccctggccgggcatggtcctggctccgtgcagcggcccgcctgcatttcagacgttgatatgcctccctgctccacccagaggccggccagccgctgcccccgtttcgcagccaggttcctggctcagggactgcgttgcccagagctcaggccagtgctcagcatggggattcctttgcccggggatttttctcagatgacccttcaagacccataagctcttctccatcctgagatttttccatgtcctcacatatcctaggtcttgggccagcagggctgttttccaccccga

SEQ ID NO: 35171 - DNA, 1722 bp, Bovine  19866880580343
  misc_feature (1)..(1): n is a, c, g, or t
naatgttccttatctgacactttgggagtgattctgacactaacaaagagaagagctgatagagagcccagtataattggattttaatccatcaagccagatgaggagggaaaaaaagaacctgtataaataaaacttcatttgtagtttttactgatatttgtaataattactgagtaaaaagttttgaataactcacctacaaggcatataaagctagattaaaatagagacagttctttaaaaatgttttcatatagtcctgtattatgtaatgttatgttcttactaattctcatcattgttgcctaccttttattctgaatgaaaaggagaaaaagaatgggccttatttataatgtgtgatttgggaacttacttgaaatgagtttcctagtgccctgatttttgttctttcctggtggcctctagaatttgtgcttgctacaacttagacttgtgtttagttttggagtaacttgtttctcttaagtatttgagcatactgtatcatccctctaggttagatagcactaagacctaaataagcattttccaagaggacctctcacaatgttaaggaaggtttttctaacataataggctaattacagagagtccttgaatcgtaaaagtacaagtttaggattagaatgaccattcacacatttccaggaagagctccacagaacagtacaaaagtctctccttcccttggtaaactaatgtcagaagcaaacgtgctgcccctggcaccagagccccaggcctcagagagcctactcggccatttgactgtgcaggagaaactcaccgaaacagctgtcctggaataagctagaataaataagcatgtttccattggtaagagctaggttctcagtggcctgaggtgtttatttcagagccacttctgtaatttcccaaaaagccaagttacatttattagagtctaaaagttacataaatctggccccaatatactgaatgctgaagcctgagaaaagagtgctccttcagtctgagtttaaccctgactgtggatcggtgagtgcagagtaggtgacacgtgtcacctgagtggctgtcaaaagtggcaccaagatgtgtgaccttatgggagattggttgcttcatcaggcaatgtcaaacgacaagaataggaagagtgcgggggtgctggtatcctgaggatggagtggtgagaggcagagtccgcgctgttaactgaggccccaggagagcggcaggtgtggagtcggaggcggtgctggtcctaggttcccgggttaggttcccggtgcctgatgccaagcaggggagtgaagctcctgagggtgcacctcagccggtctcacttgatcacgagggagcctcccgcagcggggcggctctcacggtgtgggctggggcagaggccgccgcagttgtggaagtagctgagatgaacagacggatggtatcgggtcccctccgtgttggtgggtatgcgtcatgcccaaggtgtttctggaaacgtgtgctggttctgaattccggcctaggggaggggcagcgggggcaggtgaggctggccggcggtggggagagaacgcaactccagaggcgctcggctccgggccgggctctgctgcagaggctgaacttcaggcgactcgctgtctgcccgggcacggggagagccctgtgcgcagcccgggggagcgcggccgtgacggggag

SEQ ID NO: 35172 - DNA, 1314 bp, Bovine  19866880617686
  misc_feature (1)..(1): n is a, c, g, or t
ngggagccataggcctagaactgaggagggtcccactggtatcagcactagccctttattcttttttttttaaatttatttatttggctgtgctgggtcttagttttggcatgcaggatcttttagtcgtgggatccttagcagtaagaaggatctttagttgtggcatgtaaactcagtttaggcacgtggatctagttccctgaccagggattgaacccaggcccctgcactgggagcgtggagtcttagccactggaccgctggggaagcccctggtctcgagttcttacctgcatgaagagcttgccactgccatggcccagcagctcgtgcagccccacctgcacgtcaaaggagggtcccttccagcggatgtacaggtcctgccaagacaagcagagacccacgctgcccactgccccaccacggtcacacagcctgcccacagcccccgtgccagcccgagggcccattgtgaggcacacatctgctaaaggtctaccacctgccagtcctactctgggcactgcagagcccatctcatcctggcaacaacccacgaggaaggggcttcctccaccaccggctggggaaacaggctccaaggacccgaggtcacaccgcggggaagcagcagagccgggcctgaagccccgtccttttccctgttctggcctgttccgccctcctgcgtcagctgaggtcaggccaggccccacgccagtgcgcaccttgtcctcctcctccaggaaggtgagtttctcccgctgcgtggcgtaggccacggccagcacattccccagggacacgttcttaaagccttctgtctgcctcaggtcatcatctggagaaggtgggaaggagaccagggagaaaagggcaagggcaaaggtcaagggtcacaggcaaggagtctaaccagagggacaggctgggaatgtaagtggagcagggtgctatgtggccagggcgagtgtgtggagggggagggggtgactctcagtggcgtctcctagggggtttggggagcccctgtcttgttcaggtggggatagggggcgggcaggaccctccggggaagctcacagttggggatgttgatgccggcgggaatgccggagccagcgaaggtgagaacatccagggaggtgaagtcgggggtgaggaacttgtccttctcgaaggctgggggccagggcagctccttcagcagctgctccgcacttgccaccagccactcaaacttggcactcatggccttgttcaccatggccacgaagcctgtgggggaaagagtgggctgtgagtggg

SEQ ID NO: 35173 - DNA, 778 bp, Bovine  19866880671955
  misc_feature (1)..(1): n is a, c, g, or t
ngtgtctgagacacagaggatcaagtccgcctccggatctgtggtctgccacagactgtacgtggcattggacaggtccccttgcctgacttggccctctctgtaaaatggccgtaacggcattttcctgttgggcctgattgaagcagaattagatctggtgtgggggccagattgttgtacagaacaatctaagtgtgttaagagtgtcggcatgggccctcatttacagccaggaaatgagcagagagaggctgagtgacctgctcagagcttgccccctccgcagagccccaggctcagagtaaggagccctgtgaggggctggagccctcccctcactcctgagctgcccctgacaccacccaccctccctccaggtccgaaagctggtacccagccgtgaccagatgctgcaggaggagctgacgcggcagcaggtgaacgagaggctccggcggcagtttgcagcccaggccaacgccatcgggccctggatccaggggaaggtggaggtaaggcttggatcagggagccaacctgggagacgggggccgggggccaccaggggctggaagccttcatcctgcccggtccccctgtaggaagtggggcgcctagccgcggggatggccggctctctggaggagcagatggcgggcctgcggcagcaggagcagaatatcatcaactacaagagcaacatcgaccggctggagggagaccaccagctgctgcaggagagtctggtgtttgacaacaagcacacggtctacag

SEQ ID NO: 35174 - DNA, 3216 bp, Bovine  19866880703296
  misc_feature (1)..(1): n is a, c, g, or t
ntctgtgtacagactttggcagagcttaactaatggacaatgactagaaaggcagcctactatagaggctgaccactcagtgagccccattaccgccagtacaagggtagcagccccagacccaccccagacgatctgaaacaaggtccgaacctcagagaacagactgatgaggtgagaagactttagtcttgttccaggaataaatcatttaaaacttctccaatgaaggtcaagttagagctgacagatcaagctacaaggacctgaaggatattgtgagcccatattcccacccccttttcccaaaacacacattaaatgtctatcctcccattcactcaacccaaccgtcttcaagttataggaccctggaaatcagaaacccacaaaaagcaaagtaggagaagctggctataggattaacacaggtagcataatttaaataaaaaaggggaagagaattttaaaacaatctgcaaggaagaggaaaatgacaagtgatttggctttagagctcttcagagcttaaaccagaagcctggcagcagaggcagcaagggcatcagtacctagagatgacaagttggggtgatcatctcggccaggttgctctgaagaactaaagctgtaataaagaaatatcaatactggccctgagagcacattaggctatttttcacacgaactgtgggactgggacagtggctgaacgctcactgtagagaaagatgacagaaaatcacactgacaaagaaagaagtaattacaaatacacaggccacaatcacagcactacaattaaacaacccttgatttcccagggaaataaccagagctaagtctgttaggttggccctgtgataactcccactctcactgcagaaaactgacaagaaacctattagattccccctcttcccagtccttaaaagaaacggaaagcagcagcaaagcagtgagcagaaagaaaagtgagagccatggcctcagcaccccttgagatcactccagtttgcatccgcaagtagttcatacttaacacagagcctgtgcttttggcccactgggcagagggaagagaacacctggggcaaactactgtgtcataagcaagttcgcaagaaaccagtggaggcagaagagaaccaacctgaactccacttgacaacacacctcccccaaatcaccgtgcccaaagactcccaaatcaaatctctaaagcccctttcccaaaggaatgttaggaggtttcccgttaccaccctacccaaccagtcttccattcacccatcaggaaggccaagcttccatcttgtcatggctagaatcatcttattttgtgcccaggtcctctgaacccctagtcccagagtaaaagtataggaagactcaattccttaccctgtcccagcacccttcttagttatgtttgcaccttgcccccttcccatggtctaccgtaacaccttcaaatataaacccagccagaaaacatctggaaaccctaacagatggagagaaggaatttgcagtcgccggtgactatgatggcaggggttggcaggacgcaggcaggacactccaggatgatgttcaacaggcaaaataccaggtctatggccagaatccccccatattggcttccaaatgtcccaaccacagagacaccgccacagttaacgtgaccgcctgaacccaactgacccttttccaggtcccagccccagtactcactggagcccactgcctgaaggccctactagtcttctaagcaccaaaggagcccattccccacttctcacctgagaagtcaaaccccagaaccaccctgctggagtccaggttgtttctgaactggagacaagtcaaggaaacagccaagcatgggtgaggaaaatgggcaataaatttactgcattttggtgtgattaacccaagtcgaagcaactttgtccagattctccagtccttaagatggcagactagcagagaaaggagttaaatccctctggcagcagggaaatcattctaattcccaggttcagacccctttcctcatctgccctgggtcctctggccaccttcccttcagctgtcatgtattcctggatgtcaaactggcttctctgaaactgagtgcaatcaagacaatgacaaccaggtttccaaactgcaaatcgccccaagttttatttgtagtccatacaaaagggaaaaaaaattaaggttttctaacaccacctacttggggagatggggaagtgcactgtggcgcacagcatcagctagaacgtcaggggtcagtagggactggacatgtaccaaccgactgtcccaacaggaactcagtctcaacacagtctatagagggacacagtcagggccccctggacacctggcacagcttggcgcataggaaatggttaagctaaccctttcctggcctccctcacatctaaaaagaaaaaggcgccgccgacctcagctgcaggttgcttccccatccagacgaccttaaatatcgcgcacaaaaataaaagggagccaggaaaaaaaatcaaaacataaaagagattcccatcctagggagatggggcaggggagaggggaaccgcagatctagagccagtagcaagatttgctgctgaggcgaaggaacaaagtaggttactgccgaacactcaaaaggatagtctcctggggaaggcccacatggtagaggggatgaaaaaccaccaacaggagaggtatgggccagcagttataacctggatctgcacccgaccccatctctcctctccttccctccctgtggtgccccatcgcaggacggccctacatgcggcgctggtagccagagtgcatctgagctgcccgcaggtaatcattataggagcccgaatagcgtgcgtaatcggaatgggcatcgggcaggcgacggtaatccagcgaggactttgtcggcgagcggcggaacgaaagctgcgactctgataaacggcggtaatcagagagctcggctaaacgccggtcggaaccatacctagtcgagagaagaagacagttggtgaatgagacaatcgaggggagggctccaggtgggcactggggaaatgccaatgggggcagggagggcgtaatcagactggtctccaacaaacaagatttttcagaaggctcatcaccttatccaggccaagaaatcaagcctgg

SEQ ID NO: 35175 - DNA, 2299 bp, Bovine  19866880733669
  misc_feature (1)..(1): n is a, c, g, or t
natttaattgacaatcaaagctggaacacattagagacacagaaaaaataagccttgtcaacacagaaatgacagttaaagccttaaaactagaagattatctgaagtaaacgtagaataatgacgaagaataataaagggaagaaaggcatattggtgactaaactttaggcaataccctctgtgttaccaaagaagaactacatagtacttatcacacaatattttattttcacactgtattttgttataatgtccttgtggcaaggcagagattcaataaaggtttactggacaaaagtacagatcattagggacagagaagaaagaaaattttaaaagaacataaactattagagaggtaggaaccagggagattatcttggtcatagtttattgctgttgctgttgctcagtcactaagctgcgtccgattctttgcaaccccatggactgcagcatatcaggctcctctgtcttccactatctcctggagcttgctcaaattcatgtccattgagtcagtgatgctatctaatcatctcatctgttgtttattaatccagcataaagaaaacacccagaaataggagccctgtttgtataggaattgatctaatgtattcaagagccagagaaaaagttcccctagagagaggggagaccttatttttggacactgaaagaaatcatctgagcaatgaaaaggatttaacagctaacaaattgaattcggaggcatactattaattttgtacaggtatgtgattctttatcaccaggaaatctgatggttaatccatcagccaccagagacatactgatgaagttaattaatagtgaaaagatctgtgaaaggaccaatttaaagcagtttgctaatgttatagtaatgttaaataacaatagtaataaaggcataattaatggtacataaaccagagagctaagggattcaaatcttaatcttagaccatttcctttgtgagcttcactgagttatttttgttactaattagtaagaataaatagcattatcgagtggaagctaatattatgaggcctaacagctgcagagaagacaggctacagttggccactaaatgtgatgacggtgagcaaatgactcaacttttattgtgtacttgatgtgcagtgcttcctttttatacaaacgttagccacctcaactttatcacaaggatatgaaaatagtttaaataaatatgcacaaaatttgttaaaataacaaatttaaataaaaaagacacaaactgtctaaagtttgtattagcataataaatagatggttattccataaactatactcaacaccttctcccgaatgttaacaattaccataaaaccatttccttgtacttagatggctcttcacttttttcaaagcactttcacaaatattagtcaaagattagtcaaagatcatacattatgtatgatctaaccactcgttgtgccattcaggtttatgttgcaggaaacagtctttctcctctctggtgttaatgacatattctcttttatttttatgaattttcatttctttcaaagcactttcacacacttaaatggagcagcagcattaagaatgatctttccactctttgcatcatctcaatggcataatccaaaaaagcagagaactaaaagactgataaatggactggatgattttgaggcagtcaattcatgattcttaaagttgaatttagatttcctaaaagtcttagaattgcagcaaactctccaggacagtaagccaatcctctctttcttccaggcattggctttggaaggcagtataattaaataattaagatatcttaaatgtgggattaaggggagaaaccaaatatatcatgtttaccagtgtaacccctctatgtcaagcacatagctaagtaaacagtaagtactcaataaatcatcattttgattgtcactacagggagaaaaatctacccaagctcccacagaatatctcctatagagtgaagaacaaaaatctcaatttatttttttattacatttccttaataattactgcttttaaatgtgtgcacatcaagcagaatataaacaaattaaaaccacagagcaaaaagctgaagtctatttagagatcccagggtacagacaggtgggaaaatatcaatagattcagagggccaagaaaatttcaaagggcaagtgggaatacaccctgatgaccctgaaattaacaaacaagcactttaaaatccccatggttaaactaaaaattacttcaaaaaagaat

SEQ ID NO: 35176 - DNA, 1762 bp, Bovine  19866880769197
  misc_feature (1)..(1): n is a, c, g, or t
natcagcaggttgctctctctataacagaccttgttctggatgcagctatgcggtaggaggcctcgtgctccaccatcctgttggaaacagcccgattcaggacggcagccagaacagcgccatgcactgaccctgagaggggagcgggttagtgcggtaacatcactttagtcaaactcagttctgcccgacgtccaacattcccaccaccccagtttctagtagctgctgcctcaaacttaaaaccctttctttagcagaaacaaaggtgctcaggtttttacttccagctgctagtagagaggcagcacccaccataaacactcataagtcagcaagataccaaacagcaatttaatatgaaagcagcatttagccatcccattattttcagagatacagatactcccattcttagaagttattacaggtcaaatgctaactgtgcttagaacagaagcacacggagttttgccccaacttatatcccaaatgtagaactccctataatttgtactggagggattacaagctacttggctttcaaacatgcatggtgacattaaacttgtgtgatagacacaaactgtttcaattctgaagtcagtgtaaccatgccaatctaaaaagcagccaatccagagacctagaagtacattttcaaggaaaatatgtaacttagtcctttacagattatgggtccattttttttgagaaacaaaacccagtgatttttcccccttgatgtttctattactacatacaatctccaccactgcttttagagtggaattcagaagtttataaacatctgtagtagctgtaaaaaggattcaggtaaaccactctttaaaaaagatctacaacagaagtgatagatttttttcacatgatctttccaaaggtggtaaccaggcatttaatttaaatttcctaaaattcttatgataattgaaatatactgtgcttctttatttccttaaggaactaatgcaaagaaaactgaaagaagattaaattctactactctactacacttggagaggccaaaagcttaaaaattttctgaaatctccaaaaaaattactgagggtatgttgcccacatttcccagaaaaccagcctccaccgcccacaagtgttttcttttgaaagaaagaggtgggcaacctgagatcctcaatgctgagctcctaccaagtaacaggacccagagattagggatatagcttgatatacaactgtactccaatttaatgtttatttacacattggttaaaaacaaaacacataaactcatataaccagcttcccagctcagctgcctgagttattacttgggaatagcttcttcagggtctttcaatgcaaactgcttgctaagtcagtagcggttcagttcactgctgtttatggggaggaaacagatccccagagactcaggtaaactcagattttgctcctttctttttaagtcgtacaagtcaggacgcctcagtagcagccattaacatataaaggttcaaaagatgaccaaagtggcactcttaagaggtcccctttattaggagatgagtaaaaaggctttatgaaaaaaatgtgacaaattggtatctagattgtattttctgtaagactgcaacttattatccaatgctaaactttctcttgtcatctggaaaaaaaacagagctggttataaaaatgtctgtacgtaaaacataacgaaaagttgggtgctttctctagagagcccaggct

SEQ ID NO: 35177 - DNA, 1463 bp, Bovine  19866880781874
  misc_feature (1)..(1): n is a, c, g, or t
ntgggcacattactttctctttcacaagtcacggtgttgactgagacaccacgtgtaagatgccgcatgaaatgtctcctggatgagttactgttattcaggcatgatctaacccgaaggaaagagtaagagttgctccggtcggtccagcaggagctatggctgttcccatttggtagtgggcaaaggagagggtatggacttcaattacagcagcagctcttccaagtggtcattagaaggatgtgacattatagagcctgcgggtctcctgagtcagcttgccctcctgggataatttaaagaaaagacgggctcctctatttctgggctggttcattcaactggttgcaagaggatcctgtcccaggacaccaacattccaaagtcaagagtgaatacatcatcgtggaagttggaaacaggtaaaaagtgaacccgggaaacacagggtggggcaggggaaagccaggcagagttcagtgccaatctcacaaaaagtgacgagatgcccactgcctgtccacagggggagctgctgctgagagacgggatgctgttacatttcccagaaaaacaaaaattgaaattattataaatgacatagagaataccactgaccctgacacattggagacgtttacaaaggtttgttgaattggacaggagcgttaagccttggacccgacatttttatagcctgggtttcagtatatgagtattcagtatactcttgcctcattatttatggtaatatccacgactgataaattaatttcttccagtaaaaaaaaaagaaaaaatacaaatgacaaagtgagggaagaggctcagcccattggaagctgctctggccactgggatttcctcatgtcccccctggagaggcccagtgcaaggacccaacccaagtggccagggctgaagactcacttgtcttttcttagcaccagcatctcagaaaccgaaaagactcaccccttaatctcacattcctatgcacctcacccataaaacacagcgacacacccatgtctgttcctgtctttcttacctccaacaggggacctgggacaacctcagcgtcctaccaagtgctcagagggcctgatgccttgtgggcctcctcttaggatccacaggccctgcgggagccagggaccacctgatcaccagccacgactggatccagggagtctgccctcatgccagacacacgaggctgaggccattttggctcacaggcagcataaaaggggtaagacgtggaaacagggggcagctaggaaaaaaaaaaaagtgcaaagccgaccaccagagacagagcgtaactttaccaggtgtccaaaacatccgcaggcacacagaacaccacggcccccaggagaaacacactggcctatgcgtgctagagtgaacacagccgcctcagacccatacttaacccgtctgcaccagatccc

SEQ ID NO: 35178 - DNA, 2809 bp, Bovine  19866880848408
  misc_feature (1)..(1): n is a, c, g, or t
nactcagattattaggatattgttctttaatcaaatgtaagcagatccaggttacaggaaatatagttgaagagcacacttgagtactctttgcacatacatcgtccaatgatacagcgaggttttaagacacttccttttatggagaaaggaacctaaggcccaaagaggttaagtgctttgtcctgatgtcatctggtgattgagaggtaaagccagaattcatagtcaggcctacctgagtccaaaaccactttctctttccaccacaagtcactgtgatgtacgtggaagagtacaggttcagaagttaatgtcaccaatgaggatttaaagtaacttcagatttccaatttgctaataaaactactacttagctcatgagcctttatcagaaaaaactcttctaatatataagccaaataaaatcctctgagttttaggcatttagttccaagacacttgctggaaagcaatgttttgatgccactgtctgctctggattccgtgggtcccttccttaatagtaagcatcttgttctccatgggcacttagctgtatttctgcatggcttatgatgctactctcaagagcctgacacttcccattgcttccagcaaatttgggggatttttttgtttgagaacatgtaaagagctagattaaacaagtaattttctgaagtgtatgaaatcccattgatggtaaccctggcagtttaatttttcctccttcaggtaatgtaagcaaagatgttggaatgtcaagaataattggagtatctagagattgatacttagtaccttgaaattgagcatcagcagaactggaggcccagtaggaaagttaaactgagttaccaccgagtttccagggttcttaacagacctctttgatgtatgagtagaagaaaaccaagtgacaggaattttcccttttgcttagtgagaagcaaatgtatgaacctgtgatgttatatcctgtgtgactgtgacaagacagggatgcgctgtgactcctgtgtagcagtgagtgtccatgtgcaccaagtagatagtcttaacaactagtgtagtctgccattcatctcttaatgctgctggtcttccatgaagtgaggatatgcctctagagtaaggtggtgtcttctagataactgtacatttctctcaactgtgttccaaagttgaacattaaatagtatatattgtggtctgtaaagtattactaaggtatgtttacgtggtttttgactgctagcagtggttgttcaactaacctctttttagtgatgactgttaaagaaacttaccttccaggtatgaacctcatatggactgaataaccctgagttggttgcagtcccaggagcctgatgttaatgaggctgccaggatgaaatactccagaactgttggggatccaaattcgggtctcaccctagcagaactgattcaagaacgtcacaacttttgaagtcgattggcacagatcaagaccaagatttggccctttgtctgtaataagtagaggaacttggtgtgagttaactttttttttcccccagccattggtgtctggcgttcccatcaccaatggaagaattagagaatttaggatttcttctcttgttttggtaagggagatttggtcaactaaaggaactgctgtaactgtgactctaaatctgtgacagtgtgataatgcaggtgtgttggaggatgaatgaaccactccttgaaaccctttatgattgttacttctgaaaacgtgtttatatgaaagattaaaatgagacatatttagaatagtataactgaccatatttgagacctagcatcttctgattttttgaaaccaaaaattaaattatggttcttggtatctgtatgcccttggtttcagtgacagtagttttacctaaaagatgggtaaacaaatgagaaagatacatttctcaccaatacagcagtcttccagacagattgcttcttgttctgtatataagtagactcctatatatagccatagtagaaaggtaattacatgagatgtaactttgacccagtctgacttggttttgttttgttctgttctttttccccctggaatacaggacgggaccagggcccttgtactcggagccaagctgctctccaggcattgtgtaagcctcttgtgttgtgctctctttcaggtaggataattgcggactgaaccctcgggctgcggtcatatatgagaacttgctccgcgcggtcccctttgccgggatgtttccattgcttcatgtttcagtaaacaaaggagtttgtgaccaactatgttttctttcttaatttaattcttctacattcacttttctctcctcctggtactagtctctgtagcctttctgttcctctcgttcccagcctctgagcagccctaggtaaggattatgttggcgtcccctttctcctgtacagtgggatccctcttatcttgctttccttaggagttgaccccttctccctgtctacctgcaacatctcctttcccttccacgtagaggcaagcaaccttttactcttctctgttagctcttctctgttagctctggactcttaacactgaagctaatcttctgaaattgctaggaccattggggttttggttgttgttttgtttgttttgttttgttttatgtctgacctgtgatcgtggtacagcagtagctgaaatttagccttgttttactccacttctcccactttttttttttttatatatatattttgacaaataaacgtttctaacacttaagta

SEQ ID NO: 35179 - DNA, 693 bp, Bovine  19866880857806
  misc_feature (1)..(1): n is a, c, g, or t
ngacccggatgtgggggcgccgcgcagccctgacccgggccggacaaccccggtaagcgtacagtcccgtactcgggatcgaggctgcgccgcacggcgcgggcggggcgcactcactattcggggttcatggcggcggcggcggcccgctcggtcgctcccagtcggctctgctccgcctcccgttccaagatggtggccgctccgccccagagaccccgcccgcgacgcgcaggcgcaaacgttcccgactggggcctcgacgcattgcttctcggaacttgtagtccccgtacgttgtccagctcactcccgccgcgcaggcgtagaccggagagcccgaatctcctagcccacgccccccccatcgccgcgcagtgccttctggagcttgtagttcgcttcccagacgcacctgggcttaaggaccgcgctctgcagcctcaccgcgtcccggcgttgggatgctcagtttagtgctgggattggcgtttcacgtctgacagaggcattcatccttacactccccgcttccgggaatattagtaaaagttcacttatcaagggtttttggttaggcacttctaactcccagccacaaccccaggaagaaggtatcacccacattttataggtgaaaaaaatcgagtctcagtaattcggccaaggtcaaatagctggtcagggataaaa

SEQ ID NO: 35180 - DNA, 1839 bp, Bovine  19866880900671
  misc_feature (1)..(1): n is a, c, g, or t
nctgaaacgccctttgtagataacagcaaacttgggcaggacagttcttcagagtgaggggagaacccaggacctggagtgaaactaacaagtctcagtgatggagaggccagtggctctcggctccctggggacagcagatgattcacgcccatgtcacctgcagccaggtgggaatgtgggccggagacgggaggtgaaagggtggagcagagaccaggcatttctccctgggggtgtggatgcaggggccgcagagctgatggccactgctcttcctgcctgagctggtgagcaagaggacgttttaatcgtcggatgaagcagttgtgttttgaatgaaaatacatctctctatagccgcctctttgtccttcttatcattattttgtttatttagatttcaagccccaaagcctatttctgtcctctcccctctgagttaaattaatactgtctgaggtcctttttcttcagaaagtctgttctggggttgtagatgctgggtgggctttatgcagacgaaaggacccccagcctcattcacaagcacagagaaattataattaagaagacggtgggtctctttttttcctatttaactgagctgggggttagggaacagccccatttgtgagtgatgtagaggcgggtaactttctctttgtggagccttgtcaggctaaaactctcagggagagttcctaagtgtgggcaaaatgaggtcagaattcttgggtgatttgtatctgcgggtttattgtttttcctcatttagaacttaatttatataaaagaatacaacagtgaaatagtaatggcaactccattcattccgctctgctctgctctattctggaggtagaaggtgttaccttcaggaaactggggctccagggggtgaactacttgcccaaagttgtccagccacgaagcggcagagcccaggttcagactcgcctctctgcccgttacccaagccgtgccctggcgctgggcactgccagcaggacacagcactccctgccgcagcgtgctgcgcgtggtatgttccccttgatcgttgctgtgctttgagtccttcgcaaagcctgtggcttccttttattttccctcccccaatgccccagcctctgagtgatgcctggggtcctaaagcagggttctctgctcacgcatcttggttctcatctcttttacaagatcatccttggcctctgttctcttttgcttttgtctcctttctggaatacttcttttaggccataacaaagataaagataatcctgcccaagggcttgaagaaatggaggggagaaattttcttagcaagcagctgaggtttccagctaggttcgtggtggccacagtcctcgatgccctgggggtcgtcttcctcagaagcagaggagacaggtgtataaatggacgcaggtgggggccagtcgtgccaaggactcagtacgaggcatcctgcccacacttcctctatctcatttctctgcactgagcaaagcaaatgtgagcccaaggctgttccctgaggaggtcagaattctgacccaggtagaaggaagacagccagttgggcgaggctacctacaggacggtgggatgaagacaggaggggctctgagaggcccgggattgacaggaagccgtcgcttagagcagccctgtgccttttctgaagttgggagacaggccttctggtgactgccacttttgtgcacgcggttttaggtccgtgccatttctgccaggcccttgtacttgtcccagccccatattcccagagctggggctgacggccctgctggtgtgcagctgggcacctct

SEQ ID NO: 35181 - DNA, 1893 bp, Bovine  19866880917340
  misc_feature (1)..(1): n is a, c, g, or t
natgatatggacatacctatgatgtcatcagaagcccagggtctttttttgtttggttgttttttttggccacaccatgcagcacgcaggatcctagttccccagccagggaagcttgaaatcctaaccactggacaaccagataattattgtcttcccagggtcttttatcttgctgttctattagcctcagcacatggctacaattctcaaggtcacctcctgatccaaagtagctactggagttccaacgatcacatctgccttccaggctgaaggcaggatgaagcagagaggacagaactagccttcaccaatattgtttccattttgaggaacatttttagaaattccttccaagaccttctccttatatctcataccctaaaattaagccacacagccataccatatgtgcaagggaggctggaaatgttgccttttagctgagctcatcgccatctaaagtaaaactggggttctggtgttgaggaggggaggagaatggatagtgactggtgggctggtggttgatggctgatgtgttagagcaggacaatggaagaggggtcttcccatgtgggggagctggagctacacgttggctcccaacctgctgcagcctccttgaatgtttggggaccacggaattttccatctaagttgcttctgaataaaggatggacttcaatccctgcaaggcagtgggctgacgtatgagaaaagctctggtctctaacttcaccctccccaggtgaacagcaggtagctggacttttgctaaaaatctaatgtgcagcactgagcttatcacttcctgctcgaccaccttccatggctgccccagtttaccggcaaattcttggcattgatgttgaaggcctcagccacctcttccacagctctgctttgacccctacttcatgcctggcacctaagcctttgtgtgggtagctcccactgtccagaacaccctccacccatctctgcctgggagaatcccacccacctttagcaccctcatggtgcctttgcatggactagaaaagactgtcctttatccgggcttcccaggtggctcagtgataaagaatccacctgccagtccaggagatacaggagacatgggtttgatccctgggtggagaagattcccctggaggaggaaatggcaacccactccagtattcttgcctgggaaatcctgtggacagaagagcctggtggactacagtccaaggggttgccaaagagtccgacgtgactgactgagcatgcacatacaccctttatccaggtggatgcagctcccagggcttgaggagtggtgcacaggtaggattccaagcacacatgccccttgcccagcaaacatcctgcatagctgtacagggagatgtcactttaaggacctccctagggagggagggagggaggtccttcctttacccgctctgtcctccgaccctactccctgatccggggctggctggttccagctttgcgtcctctgatctgctcagtgcccattcccccagacccatgacaccaacagccgttaggagaactgagtttgtgccacaggccatacctctctcttcccactctggagaccagtcacccctcccttgggcttcccagtggcactagtggtaaagaagctgcctgccagtgcaggagacataagagatgccgattcaatccctgagtcgggcagatcccctggaggagggtatggcaacccactgcagtattcttgcctggagaatcccatggacagaggagcctggtgggctatagtacatggggtcacaaagagtcggacacgactgagcaactaagcacagcacccctcccttagtcttcagcacacccagcagcagaaggacaccc

SEQ ID NO: 35182 - DNA, 1767 bp, Bovine  19866880928175
  misc_feature (1)..(1): n is a, c, g, or t
ncaggtgcagcaaaaagtgccaggtgtcggcaacagaggtcccccagggaaacaagataaagcagaggtggctcttctcgccgcttgctcatcagccccatcacgtggcaacatcctttgtgaccagcccaaggcaaggccatgagtaccagtccatgctggcagggatccttctgcccaaagtgtcaggttggggacggtttatttgcacagatcctactgtgactctccagtagtcttgtcacagggaagcacactcactgttgtaaccctgtgctttgcagccactagtctgctccatgtctggctccccacagtgttccagacccctgagggtgtttgaccacgtacgcatccccaacccccaaatcccacctggcagagggtgtctgacgtaggaggtggtcagtagctgtgttgttgttattttagtcactaagtcgagaccgactctttgtacaaactgtagcccgctaggctcctctgtccatgggatttcccaggcaagaatactggaatcagttgccatttccttctccaggagatcttgccaacccaaggatcgaacccatttctccttcactgggaggcggattcttcaccactgagccaccagggaagcccccagtagctgtgttagcacatttttataccttcaagaggaaaggtgggcagaaacagtcttgggggcaggatatgccctctgctcctgtgtttcttctctctgttcctggaggctggacatcagggaagggatgctggctgcctctgatggtcaagaagccaagcttggccaacttaagtgcaggggaactgcagactgccaggggctgacagagtcatcgggaggctggagaactgggcttacaaagaagcaggaagcattctgaggctgggatgcacaatgggcagatgcctcctaggggaaagcaggctgggtagtggcgtgacttcctaggaagagggccactggctatgtccagtgtgccatcacccgacccaggattttagttccagggggagagagtccagttgccttctgtgtgtcctgggctgtcccttcgtcctaccagactgaacctgtaggaggacactggtaccctggggacggggaatcagacactgggaagccagaagtcagctgccgtgtcccacatgccctcttcccccggctctcactgcagcaccgcggagacctggggaatgtccgtgccgatgaggatggccgagctgtcttcaggattgaggacgagcagctgaaggtgaggtggaggagaaggcagggacctttcctaacagatccaatgtctgaggctgttgtctcccctcaaaggtgtgggatgtgattggccgaagcctggtcatcgatgagggagaagatgacctgggccggggcgggcatcccttgtccaggatcacaggaaactcaggagagaggtgagtgctctgcccgcggtgtacacagagacctggagggtcctggtgggtgctcagttcgaccccacgctcttctgcaggttggcctgtggcatcatcgcacgctctgctggcctcttccagaaccccaagcagatctgctcctgtgatggcctcaccatctgggaggagcggggccggcccatcgctggccagggacggaaggagcctgcccagccccctgcccacctctgagcgcagcctctgcctcgggtctgtcaccgtcctccctgctgagcaccgtccacttccagagggaggccctgctcacccagtcctggagaaccagtg

SEQ ID NO: 35183 - DNA, 3483 bp, Bovine  19866880936077
  misc_feature (1)..(1): n is a, c, g, or t
natataattccacttcgagaaactttaaacctagaaacagctgcacatagtgaataaacgaacaaggatttttttagagcattgtctgtgtgtgtaagatcttagttctctgatcaggaataaaacctgcgccccttgcattggaagctcagtctgaatcactggacagccaaagaagcccatgtctttgtttgtaataaggggctgattaagcaaaataaaaatacacacagtaggatattctatagcaaccaaaacaaataaagcagctctatgtgtatcaatgtggaatgagcttggggcaaattaggataaaattgaaaggggcgaaacaggagacaatgctactgctggtgccgctgcggacacaaggatgaacaatatattcacgcgtgttcatacacacatcggctctctctaaaataattttcacataatccaacctgccccccttccttgccatgacccctctgactcatgtctttctcctcctcgctctgctccacccacactggccactttgcctttctggaacaccccaagcatccgcctgccttagctggcgggaacactgttgtcccggatgtccacagggctcacttcttcccctccttcaagcctctgctcaaatctccccttcccggcgaggcctgcgtggactaccccagtaaaatcacatccttcaccctgtttcctcttgccctcctctgccttttcttttttccagagtacgtatcatcatcctccattctattattcaatgtgcttccgtactgtgtttatggtctacagtctgtgttccctcaggagaatgtaaactttacaaagggtaagggtcttggttttgttcagtgataaagacccagcatgagtacctagctggtattcagtaaatatctgcttttgaataagggaatggaaagatacacaagcaactggcaacagttgtcaccacaaggagaaccggggttactgaagggaaggatgggaagaaacactttttcagtgcacacccttgtgtactttgtaccaggtgcttgtatgaattggtaaataaatttaatggaaaattttagctctgccaacggtgtgctagacctggaagaagtgacagccaactcctttatctgacacaggaaggtccagatgtacagcagttaggtactttgcccaaggttacacaggcaggacttaaacccacatctactaacccagagcattagctcttagttatcatgccattgagcctcttggcttggtgttctaatcagtcaatctaatggctcgtgatagaaacgctgagctgaggtgttccacggggcatggtttctgtctgtctaacatttcctattacaatgaacttcaagggatagtcttagttcttttgatacatgagactttggctgtaatgtgcatggtttgacagaaatgggactactgggcttggggcttcttttatgagaacttcttggtcaaaatacagtgttaatgtcagtcccttggtagctggaatgcaggtttcctgaactctaccctcccagatacttcttctttcaaaggagtcaagaggtctggatgagctgctgtgtgtatgggggtgacagagagatccgagggcgcttgatccggtcaaagagtaatgggagtattccctggggctactaaaggctggctgctgagcttcctggacaggactgactgatgggaggcccttttggcccgggttaggtggcggacccgccgctgctgctgcagccagtagagcatctccactttgtcgtgcttcatcttgtccaggtagcgccgccccttgaaggtcaccggctcaccaaagactaactcgatctcctccaggaggggaaccaaaggagcctccaccatactgagcttcctttggagacggccgcggatctgattctcctccaggaagcgactcaggcccacatcagtcttttggaagaagcggttagggtcagaggcttgccgctcaaaccactccagtctccccagcagtatctcccgcagctggatgggctgcaaggcccgctcccaggcactcaccagtgccggcagctgcctcaggcgggcgttggagctgtatttgatggccatgtccagccggtccttctctggaacgtcaagcatggaccaaacccgctccagacgcttctgcaggctcaggattttgtgagaatcttccaggaggctgctcttagtttctagcctgtgttccagcaccgtgtcccaatcccactctcctggcacaaaatctggttcgtcatcttctagcaaggggggtgggtgttggatctttatggactctttgataggggccacggtctccacaggaccctcctcttcatacatttggaagatgacatggaggaaatctgtctcctgggtggtgaggtacttaaagtagtcacccacagacaaagtgcttttccaccagttcagccatctggccctgtttgaccacctgtcccagcttttacttgcttggagtgatgtgaaggaggatatcttatctgcattggactgtaaagtgcttgatttttggggataaagttcagccagcttggtgttgatgatacgatgctgtttttcttgacgtaggaaggctgaggacaggaaggctgaccagtctttattggctgcaggctcaaccaggggcccctggtcaaaagtgaagtggttgttagagacacggctcatcagctccttgtagacttccctgatgctactgccaaaagtgcgatctatatccatttgctcgataagtttgggttccagttcaccagccaggtggttgtatagcacaccggccggctcaatgtggaaggaatccaaaaaatttcttcctgagacctgtacagcagctatctggaccatctgattttttagcttcaaagtaacagtcactggctgtggttcaagtggagggggtttaggggattggaggccccgatgttccgaggcctcttgctcctcgaggctgttcaactttctctgcagctcttctaggtgatgggtagtagctgggcggtaggtcagagcccccaggagtgggggcagccctgagtccagcggtgagtactgagaccaccccagctgcatatgcttcatcatctgcttcaggtcctcagccaccgtgtcccttgccagctctggtttgctctctgccaccaggaccagtggggttaaggggcgaggactgagtggaggaaggcccagctcatctgctagcctccaaccctcacgcagagagggcatggactggcccctctggagctgggagtagaggggcaagtgcgaggtggggggagcccggctgcggggagccacagaggtcccaggcagtgatgcaatctgtgaagtgaaggtgctttctctcctcttttgcatggaggacagccagcgcagaggcttcttcttcttcagctggggaatggacttcaattccttcattggatccttttcagg

SEQ ID NO: 35184 - DNA, 3478 bp, Bovine  19866880974487
  misc_feature (1)..(1): n is a, c, g, or t
nagcccaaatggcctgagggtcaagtgaagaaaggcaaagtgttctccgggacaagcgtgaacagcagatacaagtggctagcaaactgttgacagtcccacctcaccagaaatcaccacgttcaaaggggaacagggggtgttgcttgtgcctatgaaactagcaacagagctgtgaacaatcagatttagtgctgctaaggcctctgggccttattttcttgggcttcaagaaatcactgtggacagtgactgcagccatgaaattaaaagatgcctgcttctcggaaggaaagctgtgacaaacctacaaagtgtattaaaaacagagacactactttgccaacaaaggtccatctactcaaaactatgctttttccaagagtcatgtacggacgtgagagttgggccataaagaaggctgagtgatgaagaatcgatgctttcaaactatggtggggagaagactcttgagagtcccttggactgcaaggagatcaaaccactcaatcctaaaggaaatcaaccctgaatattcattggaaggactgacgtcgaagttgaagctccaatactttggccacctgattcgaagagctgactcactggaaaagaccctgatgctgggaaagactgaaggcaggaagagaaggggacgacaggatgagatggttagatagcatcactgactcaatggacacaaatctgagcaaactctgggagatagtggaggagaaaaaggagtctggtgtgctgccgtccacggggtagcaaagagtcggacacaacttagcagctgaacaacaacaacagcccactgggaagcaggcccacaggcgaggtctagagatcagggcagctctctgaaagcaattcacgaaacctaccaagagcctttaaaatatgtatgccccttggtcaggccattaccaatctaggaatccaaccccaaaatattctaaaatgggaaccaagatggatgcagaaagatgttcagatcagcattatttacaatagcaaatgactagaagccacttaaagagccaatattagggcatcaatacaaacggacattatataaccatggaaaatggtggcagagttttgatgacatgggaaatgcttatgatataatatgatgcttttaaaaaaagacaaataatacaatctcatgaagttttatttagagcaagaaaaataactagcagaaactcagcattcactcactcctatgttctagaattggcaaggtatttcttttcttccttattccttctctttctctacatgttctatgctacagtttttccagtagtcatataaggatgcaagctgctgctgctaagtcgcttcagtcatgtccgactctgtgcgaccccatagacggcagcccaccaaggctcccccgtccctgcgactctccgggcaggaacactggagtgggttgccatgtccttctgcaatgcatgaaagtgaaaggtgaaagtgaagtcgctaagtcatgtctgactcttctcggcctcatggactgcagccttccaggctcctccatccatgggattttccaggcaagagtactggagtggggtgccattgtcttctccgaaggatgcaagagttggaccataaagaaggctgagtgctaaagaatcaatgcttttgaactgtggtgttggagaagactcttgagagtcctttggactgtaaggagatcaaaccagtcaatcctaaaggaaatcagtcctgaacactcattgaaaggactgatgctgaagctaaagctcaaatactttggtcacctgatgcgaagagccgactcactggaaaagaccctgatgctgggaaagactgaaagcaggaggagaaggggacagcagaggatgagatggttggatggcatcactgattcaacggacgtgagtttgagcaaactccaggagatagtggacagggaagcccggcgtgctgtagtccatggggtcgcaaagagttggacacgacttaagaactgaaccgaactgatacgttctgtattttctccagtggggattattatttataatcagaaaagaaagaaatatatagaggaaacagaagacctttacagaaaaaagccaagaaggagttcctgaagcatccctctcagtgaggtgactggctttggcttccatcctgtgaaacaaccccttctgggggggctggcctcccagaaggctcatcccaccgcccactgcatcttcctcaccggttggccagggaagcctgctacaggtcttcctccctgtctgcaggtgagcagcctcacagcgggttccactggcacggagactctccacccccagggacatgtcatcctgggcagggaggcctgctcttttcttccacgtgggtgggtttatccctccggaccatcaggcacttacgcatgtcttctgagtaaataggtcatattctctccccacccctaccacacacacttcctgatccctttcccaatgaaaagagagatccctagaggctctggtcagagggtgggggtggggagggaggaccaagagcctccccagctcagtcaggaaacaagaaccatccagcccaagactctcagactctttgcatttgaccctcacacgtgctctagacagcaaggatttccttggcgtcctgctttacaaatcaagaacctgggttctgggcactggaggtggggggcctctgaacgccctggcgccccgtgtcccgtgcagagggaagcaagcacaggcctggacttgacctggggttcgggggcaggcaggcagatgtttgcagaaggggaaaggtcatgatcgttcgctgaagtcagagtggtggttgagagtgggcagggggcagccacgtccaccggcggcaacccagcgtgaacccggggtcagcgagctgggcctgcccccgcgccatctgaccttgggagacccaggcaccccaattcgtcctctgtgaaagagggcgacaccacccccaaactgggcaggtcgacctgggggtcactgacaggggctaccatcaccatctcccccctggtccttcctcccagacaagtgtggggtgcgtgaaggaaggccctctgttgcccaccctgcagggtgctcattcccatccagaccagcaaggcagcaccggcccagggggtctcgctggacaagggcatacatgcagacacatggaagaccgtcagccgacaagggggcccggagcactcacccctcaccagccaggacctggtgctgcttctgctctgcctgaggtggtcactggcccagaatacaaagttctcccgcccaggctgccggaggctggggcagctgccaaggctgaaactgggggaaggggcgcccagagcaggggtgtcagatgcctgggagcgcaggggaggtagggaggctgggtcacgcgggcagcaggagcttcgcagcccaaggcccagctcctctatccc

SEQ ID NO: 35185 - DNA, 1372 bp, Bovine  19866880984397
  misc_feature (1)..(1): n is a, c, g, or t
ngaccgagggtgtccgccgttctgggcctccatctgaggaccgggacttctcacggccctgcctgaggctcagcgcccggcgcagtcggccttccgtgggcctcccccagggctcctggagcttgccgtaggagggccgtggtcctcgcaaggactgactgcgtagccctgtccccatggttctggaggctgcaggtgcgtctgcttcacccttcggcgagccactggccttctgagatggcctggtgcccccacccacctgacgggagctcccttggggacaaaggttggtgctggtgaggtggctgtcgtaatccaaagggcaggccaccagggtcaagcatccctgagtcacccacgcagcacactctccacctcccagggaagcgggtacaggcttcctctcctccttccccctctatctcctccaggcagcctttcctgactaacccatcctaaagatcttagcctctcccgaactcttgtagccctggctgtccaaacattttgttgacagtgagaacagatggcccaacagcaaaacagacacgggcttttaagaaacaggacagctccaacctagaatggtcaaattcacagagacagaaagtagcatggtggtcgccagggcctggtggggtggggaggtgggaggattgggggaatgggggccggtggttaggttgtttaatggctccagggcatcagttttgctaggtgagaaacttccggagtttggctgtacagcaatctgaatgaatataacactccccgaattgtacatgtaaaaatctaaggtggtacattttatgtttctgtatatttttactacaatcagaaatttaaaaaaagaaagaaaaaaaagaggctagttctggggctgaaagttcggagtgtgaggtgttttccaggtctaactctgcccataattttctacgagagaatagggttaacagctcaggctctgaggaccagctgctcctaggaaaacactggttccatcacccacagctgtgcaacgctgggcgccttcccccgcctggtttccttgtctgtaacagggacggataactcatgtgttgtcaggaggactaaatgcaatgacgctgtgccaagcccagggcttggcctgcagcaagtgctcaataaaagtaagccagtgttagtcagtactcgaggcaaatcctttcccctctttgtcagtcttctcatctgtaaagtgggttgttgtgaacagtaaatgaaatcgtgaatgcaggtccctccaagggccagactaccaggagcagctctttctcctaaggttggtggggaggagaaaggtacttgggctgggccagccaatccttcgcatcctagaatttcagggttg

SEQ ID NO: 35186 - DNA, 858 bp, Bovine  19866881009301
  misc_feature (1)..(1): n is a, c, g, or t
ncaggagcgcgtggatggtgccaatgcactggccaacgggctcatcgctgggggccatgccgcccgggccacggtggccgagtggaaggacagcctcaacgaaggcctgggctgacctgctggagctgctggacacgcggggccaggtgctggcggctgcacacgagctgcagcgcttcctgcacggggcgcgccaagcactggcgcgcgtgcagcacaagcagcagcagcttcccgatgggaccggccgggacctcaaacgccgccgaggccctgcagcgccgacactgtgccttcgagcacgacatccaaggccctcagcgcccaggtctgacccaagcgtgggtgggggcgacggtgtctgaggacactcagtggggaatgcagcggggggactggagggtgggcatgccctgcagggccacataagcatgcacttagagtgcttccagggaaccatctctggccaggggacatctagccactgtgtccacacccagaatgacaaggctctttgagggcccgtgacattttcttaagtttatttttattttgggctgcactgggtcttggttgctgcgtgcgggctttctctagttgtggcaaatgggggctgctcttcgttgcagagcacggcatgtggggccttcccagaccaggggtggaacccaggtggattcttaaccaccagggaagtccggccccatgacattttcaagtggttccaggagctagaagattcttccctttgtactaaaatccatctgttgctcccactcagacattagccctacgaaaaataagcatagttccttcttccagccatttaaacccaggagggcccccccaccctagtcc

SEQ ID NO: 35187 - DNA, 945 bp, Bovine  19866881041389
  misc_feature (1)..(1): n is a, c, g, or t
ncccgagctctctcgtcgggctctggtggacagcagaaggattgatggccagagcccgggctaggaagtgacactgagggtaagacaggcttttgcccctgacctactgagatgccaagaacaaaccgcctgggttctcaggcctcagttttgccatcaggaaatgggctagcactcactttccgctgctgcttctcccaggccgggtccaacagcaggtcgcggtcccagtcctcctcctgttccatgtattcgccgcccccacggccggcccgcgaagggcccctccccggtccccagaccctcgggctgcagaaccatcatcatcttgttcgggctcctggctccgctctgctcggcgcgctccagaacacgggggctgcgttaagtatcgcccggcccagccccggatcggattcgcgctaaatatgggggaggagggtggggccggatcggggcgagggcgctcgggtcgggaccaggcagaagtttggcctggggctaagagactgccgaattttgaggctctgggatggatcccgtggcggagatccgggattcgcgttctggctccgccgcttgggcgctgtgttgactttgagaaagccacgggccctttctgagtctctttccctatgtgtacaatgaagatgacgagaataatcgtggttgcagatcgctctagaagctgccttttggacctcctcctgacccttttcctgagccgcgctggttgggaaacagggaccactattcccatttcacagtcagaaacaccgaagcgccgagctgttttgaatgttttctggggtgatgaagggagacaactcgagcatgaagagggattccaagccagctggatgggccgaggcagggctattaatatcggggctactgggggaagagggggaatgtgctagccgggaatccccgacgccaccaatg

SEQ ID NO: 35188 - DNA, 1511 bp, Bovine  19866881074154
  misc_feature (1)..(1): n is a, c, g, or t
nttatcagagatgtcctggagttatcagagatgctcagaagctccttagactccttaaattaggggcctagggatacagcctagggcctttcttctcggactaatgaccacagaactccagggtaaaaggatttgaggcagcagaaaggggtaggaattcagaagaggaagtgccttgaaggcaaagatgctggttcttgctgaggggaaaactacaggtggagaagtgaacatttcctgagagctgggcttcaaaggtgaagctgatggagctctgcttagggctggaaggagcagggagttacactcagggtgtaagcaggcgatcaggagagctgtgatggcattaggaccctgaactggcgatgctcagagcataagaaggagctgggtggctattcttttgacagaggcgagcagagtttgaggtagaggagtggactggtaaccagaccccaaatgcagttctaacactctctgtggttttttgtgcccccaaatgtggtcctccagtggaccaggcaatggtgcccgactccagtcctcttgcctggaaaatcccctgggcggaggagcctggtaggctgcagtccacggggtcgctaagagtcagacacgactgagcgacttcactttcacttttcactttcacgcaccggagaagaaaatggcaacccactccagtgttcttgcctggagaatcccaggaacgggggagcctggtgggctgccgtctatggcatcgcagagtcggacacgactgaagcgacttagcagcagcagcagcagcatcggaccaggccacagggaatttgccatagcagtttgacaacacccacgctggcctctgtcctgtttaatgatgagggtcccctgccccagtgtgtgaggttctgggccccccatgtgtgcagtgaccatgggagatgctgcactggtgtgcagggcacacgccagttgacaccatgcgggtacctggaatcgaaggatgatggtccacaccagcccaagggtcaggcggtggttcccgtccacgatgtcatgtgagccccatgttttccaaatgcactttttgctccttcaggaactgcagcgccttgtccacattctccaggcagtggatccgcatgcggcccttcgtgggctttggctatggagggaggggacacaaagccgtgggcctgtgggcctcctcctcctcctttcctcctagctttcccggggccctgcttcctacggcttccccatgacctccctcaggaacacaggcaccgcccagggaagctaaagctgagttgcagatgatgcttggagcagattaagattcccaagggaattaattgcacccagagtgagtgggggaaaaaaatgttttcaatggggccactgttcctgtctccctgaagcaatgttcctggtttaatccacacagcaaagcctctcaaactgaaaccatcctctgagcagaaggcagccactgctttctgctccgtggtgtcactcttctcgct

SEQ ID NO: 35189 - DNA, 1344 bp, Bovine  19866881125058
  misc_feature (1)..(1): n is a, c, g, or t
ntccacttcactttcccagccacatataaacaactatttctgttgaaacacttccatctgccttccaaggcagtatcaaggccaccaactccaggaagacctccttggagaaaagtggtggtccctgtcccctggccaatgcaaagaccgagaagtgttagcaaatcacccccacaagccccagaaacaagggtcaaacagaatcaaggaaatcgaatcttcaatgtatggaaaaatcagtgccagcagggatgggggtcaccggaccagatggaaagtcagccagtatatgataaggggctgaaaggctgcagctcccagtgtcaggtagagctggagacgttgtcggggggccgggcccccccaatgtgtcaggtcccagggctgctgttcgcaaagagcgcacctggaagaaaggagagagctgaagctgggccgggaggaggaggcctgtctgcagctccgaccccaggcaaagaggagccagccccggactcacaatgaagtacatgagtgcggacgaagtccaggccagcgccacgtagtagccatcgctgccgaagagcaggcccgtgaggacactgaggatcatcctacagggggcgggggcaggagggaggaagaaaagactggaggcccctgagggtccaggcctgagactgccccagagcccagcctagaccccagctaccatcactggggccctttacccacaatctgcaccccaccccctgccagggacctagactcagaatgaattgggaaggccaggactcggtcctcggacctggatccaagacccccttcaccaccccagctcacccttctcccctgaggtcccgggtgactctagcacattcctgacctcctgagcaacactaccggctcctgaggaggctgctgagaacaggcactccctctaacaaagaagagctgggtgggcagagggggtccagagtcacagttcgaggctaccactgggcaggccaggaaccccgggcagcaggcagcctcccactcggcccacaggtgctcaccccacatatttgtagccgctgtaggccagcaggtggaaggtactcaggtcgctgcgcacggtggccaggtagatgcccaggagcagggccagcacttccatcacaacccacaccagcgctgtgcttgcacacaggcccagcacctccggggagaacctgtggccatgtggggtgggggtgaagggagtcccaaaccagccgtcctaaggcaggggtgagactaggggcatggacggacttgggagttggcacagatcccccagggaggtggggagaggagtcaggaatggggggaagtggtgggaat

SEQ ID NO: 35190 - DNA, 2631 bp, Bovine  19866881136290
  misc_feature (1)..(1): n is a, c, g, or t
nagcctggtgtgctgcagtccatgaggctgctgagagtcggacacgactgagcgacttcactttcacttttcactttcatgcattggagaaggaaatggcaacccactccagtgttcttgcctggagaatcccagggacgggggagcctggtgggctgccgcctatggagtcgcaaagagtcagacacgactgaagcgacttagcagcagcagtagcagcaggcacttggacagagagaagaggtccctgccatcatgaaactgacacttcattccagtcaggagaccaaatacacaaacaagattgttccagatccatccagattagtaagtactgacggcctcatctctgattcctcctcatgacaggcgtctcttcgagttgcctgaccaagaataaagtcagaggaaccacatccctgcatccctggtccaggacactagggagaaaaggcacattccttattcacttctgctcctgggaagttcgggacaaaacaaagggagctgcctgcccgtccccttcatctattccttgaaacacaaacacaccacacacagccagtgtctcccttctccatgagtctttaccctgtgacctggaggagagtttggcctgtttgcagttgaagataagaaccagaagccatctggggcccgtttctgtttttcctccccgtaaactgagggaaaggttttcttctaagcaaatgggagaagtcctccctgcttacacctaaactgtgagtctgctcaaacgccagaaagctggcctcccaggaggcggtgccacctgctttccattcactgctgtctaggatacaatcacagactcacgtccagaggagagctgatctttcccaggctcctaagggagagccaggccttccggctcggggctccagcgctcttcatccagacccgagtgagccaaggacgtgcatctcagcacgtgtctgcttcaggcccctggcctggtgctgtgctcagagcggacgctccccctgactgccgccagctgcaccatctccgcaagggacacaggcaaaggaaccaggtggcctttcccctaaatgcagccaccacacaaaggcgttctagcccagagctccagggcccatggtccatcttcctctgtccctaggtcttgggcagaaccccttctgaccgtcggtagggtttgtcttcctcgggctcctcggttttgcccacccctgaccagtgtccccaccggtccagcccagccctcccgggttcctgccccagaacccacctgccgtctcctttcccaagtatgagaaggctgccaacttctagagaggagagaaacggcggccacagtgcatgcacgcccccccaggagagcaacctggaggtgctgagggtggtccccttaccgcagcagctggtccgcagggcccagggaggccacactgtcctcggtgccggagcgaacacccaagtctgggccctctgcccgctgcctgtttataagtgacgttctgggttaagcctctgtcaatgactttccagaattgccccctcccttacagctcaggggagagagaggctgcttatgagccaacctccagctcacgactagaccttgaacagactgtttgagaaaaggcaaaaaacacaaaatcaggtcaggggtgagctgggaggaggcggtgaaaagccgctgcccgagggttctggcggaaggattaaagggcagtgtgtttgggttttacagggggcagaggagcaggccagggatggagagctgggcaggagagggaccttctggcctaagaaaagaggcagaggatcccccgggagaagaaaaactgaggcatctaatgtccttctcctcctgctgagtcctcgggatgtctcatgctgtcccctgggaacaggtgacatcatgtggccaggagactggatttctcgcaagggcatatgtcaacctcgtggctcttacgggctgttgacctggtgtgagcaagggttttaatttttaaatttaatttttggccacaccgtgcagcttgcccccgaccagggattgaacctgggcaacagcagtgaaagcaccaaatcctaaccactaggcaaccagggaactcccttagcaaggttttaaaatgcttgcccacactactgagcccacccaggccagtccatttaaggtactattctcccaagactaggccaatcaagaacaggaacagagcgcccaccccctgggcgccacccgctaccaccaaaacaacagacaaaccggcctcagccctgccgcgttcttggaggaagcagagtcaataactcactgtcctaacactttgcttagtgtccagaacccaaggttaattagtcagagagggctttctctgactccacgtgtcatggcgagtggtgcccagctaacgtggtgtgctgagtctgctaatgaaatgggggcacgctggcccctacgtcaggcagaggtccacatcgcaggagcctccaggagcccacaaattaagtgaaagcacagagaggcagggagcttgctcactcctctaggatccagatcctgacccacacagggtacttctgtttccacctcttctccatcttttctccagagctgacaacaagtagcct

SEQ ID NO: 35191 - DNA, 782 bp, Bovine  19866881225070
  misc_feature (1)..(1): n is a, c, g, or t
ntgatttagtgaattttcaatttgtgtaaaattgaaaacatgagattaaatgtcttacccccataaagtaattctaaatgttcaatcaatttgctgattcatagccatttccagttgtatttaaaattctgcagataatcttttcatcagggaaaagcctacttggctcatcagtttaacggacaactccagaaactctggtgcttatccaaactgcttgttctctgttgttgccatttcttctcatacagatatgcaatccgtactgcctggattctttgcgaacctgaactggacttcagaggaggccagccattctcaggacacatcagggctaagacccttccagatgatttttgaggcaagttttgctgtggttctataaattaatgatgttttgattcttatttttctacaaatgtaataacagaaaataaaagcataggtcctttatagaataaagttgaaataaggtattggttcccagacttccctgaacagattttaaatcacttggaagctttgaaaatagtgatgtttgtgttttactctaagaggttgtcatttaattggtcttgggtgttggattagtctgcttgggctgccataaaaaaaaaaaaaaataccacatgttgggtggcttaaacaacagaaacttattttctcatgcttctttatgaagttagaagtccaagttcaaggtatcttgtcaccatttgctcacatgatctttcctctgtatgtatgggagagagagctttcggtatctcttcctcttctta

SEQ ID NO: 35192 - DNA, 766 bp, Bovine  19866881255065
  misc_feature (1)..(1): n is a, c, g, or t
ntgacaacccaggaatcctgaggtccagtgtctggctaccttaggggcttcatttcaccccagtgtcagggaggcagaacttctccacccagaagctctgcaaccacttggttcctccttctctaggtttggtcagctcctgacccccgtctgtggatctgagtgctgtgttcatcccgttttcacctggttccctttagggccccccacctgcccaccgtcctcacggtacctcctctccaccgagtctgccttctcctggatcttctctgcatggacgttgccttctgacaccagctggcgtccggcttccagaagaccacggatccgctcaccgtttgcctccatggtgctcatgaagtcttccagttttttaatggtggcatcggctgcctggagggtccctggcatctccgtgtgagacaagacatattcctgtgggaggggagacactgagctcactgcccagcttcccagaaggaatcttcgaagggcggccatctgagacatggacgctgcccagggtgggacaggagactctggctcagagacagagggatggtactgactatgtggaaatctcaggttaaaagggagctgggcttggagtgccttcaatgctccaaatcctgccccatcttatttatagctgctgtttacatttccttaatagttatgacaagctaggttttctatttcttcttatgtcaagtttgggtcaagttacatttacatctctctttttttttttcattccttttttttt

SEQ ID NO: 35193 - DNA, 1189 bp, Bovine  19866881309887
  misc_feature (1)..(1): n is a, c, g, or t
ncaccgaccacggtcacttgtgggagcgctcttcctggggatgacaaagccccggtgcctgcagtgggccaggactcgggctccaccaggcagctagctgggtgacagacagaaggatcttgtccccagagagggctgagcccacagcagggcctgagctacacacgtgaacgtgcctcagtctagtgtgggaaacaggcttggacataactggggggggggggtgcaacacatgagcatgccaggggcacagcctctccaacaccgaggcttgaagagggtctctggtgaaagttgagtgtgcccaaaacgtgagggcattggagaaggttttgttggcagaaagagcagcaggagcagaggccctggggaatagaccataaggaacactgggcacgaggcagtgagggcgggacgtggggggagtctggctcataccccagcactgcgtgtgcttctgcgcagagccccccaagccggagggcaggggctgaccacgtttcccagggccctgggtcatacccgcatcatgctcactcatcagaacaggcaggagtgaccccagggatctgggaccactaggaggagggctgtgggctggaggacacattcgtcagctcgcacctgcccctagggaccagaacaagtacaaggaggctgcccacctgctcaatgatgccctggccatccgcgagaagactctgggcaaggaccacccggctgtgagtgaggcttcctccccgcccccctgaagctcccaggtcccagcagggcccaggtgcagagcctccgttctcccccctctaggtggctgcgacactgaataatctggcggtcctgtatggcaagcggggcaagtacaaggaggctgagcctctgtgcaagcgggcactggagatccgggagaaggtgggagcaggcagggcagggccagccaggtgggctgggggcccctaggccggccccgagcccagccactggctcctctggtcccaggtcctgggcaagtttcatccagacgtggccaagcagctgagcaacctggccctgctgtgccagaaccagggcaaagccgaggaggtggaatactactaccggcgggcgctggagatctatgccacacgccttgggcctgacgaccccaatgtggccaagaccaagaacaacctggtgtcctgggccggagggg

SEQ ID NO: 35194 - DNA, 1608 bp, Bovine  19866881345029
  misc_feature (1)..(1): n is a, c, g, or t
ncacgtagatcaggagccgctttcgtagcctctgattgttcaggtgactcatgccaagttcggtggggggctcctgccagccgcactttagctcgtccaggatgacctcggtgaaacggagccgtaccttgtgaggcgcccgcgcctccaggccgcttttggtcagccgctcggctacctggcggcagaccaactccgccgtcagccgtggaaccggtaaaggcagtagcatcgggacctcctgcgagaggtgctcctgagacgctgtgcgtgtcgtcctgcgggggaagagcgacaacggacgcagcaaccggtggtaaatccgctggaattcggggtccagcttatacggctccatcttaagacgaggcggtgccgacagcgccggctgctctagcggttactaaggtaacgaggggccagcgggcccaagtgcgcctgcgcaatccctgcccaccgtcgcgtggatgcgggaaggagcagagccttgcgtgcgcgcgcaccggaaggcggggcaaggagtggcttccggggctccgcctccccctcccgcggcgcggctccgggctggctcttcagttcctgccctcgggcgatagctggatcctggatggcttcggactcggaggaccgcgggactgcctgcacggtgagggtcgaggcctcgtgtgggagcctcgcagggcagagaacttcggcccctggagagcgatcgttaacttgagaatgagggaaggagcagacacctgggctggggcctggggccagggctggactgtgagagtaggaggacgcttggcgttaatgttacggggtgttgctcctggaatgatcgtgagcgacagtgaagaaggcgcttgaggaggggtcacatggggcgttactataggcctttaggggttgtcctaggggaggtagtgaaacaggatcacgcaagaagtttccccagctcctatcagcccgtccctgccacccttgcagctggagttcgcggtgcagatgacctgtcagagctgcgtggacgcggtgcgcacgtccctgcaagggatcgcaggtaagaaccagatgaacttttgtgaaagcaaaccggagacctcggggaggggctggcaaatctcttaggcctaccccgctcccgtttacagaaacagaaatgaaaacctggagagaggaaagaatgttctcagagtcacactgagacccagaaatggagtctagtatgcaggtctcaggcctgctctgccagatttttctactggccctaacttcctgcctttctggtgtcttaacctcaggtgcctgaaaagtaaggaggtaggcagagagtagtccccctacagggtgttccctggaaaacagacagttagttcttgcttgagaagcagcataatcttgacaaagcaaacagcagccctggccatgttctatccaggtagccctggattttttttttcccccacactgcccggtatgtggaactttcccaatcaggtatcaaacctgtgttaccagcagtggaagtgcggagtctcaaccactggaccatgaggaaggtccttgatctggcatgatcagcaagctctgagaaggcaaggccaccaacatggc

SEQ ID NO: 35195 - DNA, 1050 bp, Bovine  19866881403206
  misc_feature (1)..(1): n is a, c, g, or t
ngggaaggtggaaccccttgctaaccttcttgcagtggcagggctggccctgcagtcgcctggagagccaaggcttcagaagggcttgcccaatgccaggaaggtggttctttcaaggtttccatctgtgaagtgtagagattcatcccctttctcaggggaggaaagtcaacacggggccgttcatccttccattggctcaggcccaaagccttgagatcatccttgactcctctttctcccacaccccacgtgcaatctctcagcaatcctgttggcttcaccttcaaaatagatccagaatctgattgcttctcactacttcctctgccacccatgtctggcccaagccactacacttgtccatctagattcttgcaacagcctctcctctggtccctctcttgccttctccctcctgtcagggagatctttttaaaacccaagtcacatccaatcactctcctgctcagaactgtcacggcccccatctcactcagaaggaaggccaaagtcctcactaaatacggccccaggcccttgtgatctccctgcaaactccctctctcacccgtcttccttcccctcattcctgctgcgccagccactctggcctgtggctgttcctcaagctcaccaggccacgtgtctacctcagggcctttgcactgactgtttttctgcctagaacactcttcctgcaagagatgaagtctctgcttctttactttctgcagtctcagctcaagtatcatcatcccacattcccctggccccaccataccttggtcttgttccatttttctcctttgcacttaccattatttgacatagtataggtttgctttttggcctgatggctcagatggtaaagaatctgcctgcaatgcaggcagcctggctttgatccctggattgggaagatcccctggagaagggaatggctacccactccaatattcttgcctgggaaatcccacagaccgaggaatctggcgggctacagtccataggtcacaaagagttggacacagctgagcgactaatagt

SEQ ID NO: 35196 - DNA, 1275 bp, Bovine  19866881418982
  misc_feature (1)..(1): n is a, c, g, or t
ntgctgctcttggggctctttacccagggcaccaagctggtgggattgagagagggacccctcccctactgcatggcaccctccccacctcccacagggtgtggtccggccttggaaggaggaccagaggttgcctgtcaaatgtagcaacaaacgcattccctcattccagaccgaagaaatcattctgtggtggtagcgcttagagggtcccagtggactagaatgagcagatcctttgcttcaatattggctcagatggtaaagaatctgcctgcaaggcaggaggcctgggttcgatccgtgggtcaggaagaccccctggagaagggagtggcaacccacaccagtattcttgtctggagaatttcatggacagaggagcctggcgggctacagtcgatggggtcgcaaaaactgagcgacgaacgctatcgcattcacttgcttgaataacagtgatgctcaccaagcactgctacacttaggaagttgaacttcagcttggcctgcgtctgaaataactcactggagggccagagagctacttcccaaacagaacctctacacgagtagagcttcttaaggtttggtggtaggagcagcagaagagctgtaagcagtggtcagggagccattcatgtgcacgcagtaacctgagtttctttgaatgttgctctctttctctaatctcctaaaagtgaaagtctctcagtcgtgtccaactctttccgatcccacggactatatagtccatggaattctcttggccagaatactggagtgggtagcctttcccttctgcaggggatcttcccaacccagggatcgaatccaggtctcccgcactgcgggcaaattctttaccagctgagccacaagggaagcccaagaatactggagtgggtaacctatcccttctccagcggatcttcctgacctaggaattgaactggggtctcctgtgttgcaggcagattctttaccaactgacctaatctcctaaagatgctggccactcaggctgttttgaggacagtggattccctcatctaaagtatacacccgtgacgccatcctggcacatgcaggtgggcagaccaaccttgttctggtcctgcaggtagagccagccgctgaagggctgtagcgggaggtcgaggacagacagcttcagctccaccacccccgtgctcacattcctctcatcttcatcgatgccaaacaccgaaaaccgcaggctcttctcctccagggctgcggggtccaacggga

SEQ ID NO: 35197 - DNA, 756 bp, Bovine  19866881624366
  misc_feature (1)..(1): n is a, c, g, or t
nggacagctagctgcaggagtttggcttccgggccagcccggcccgagctgtttctccaggcctcactggtgccccgccgtcaggccaggagctgaggagcgggggactcggctgggaggttcctacctagtaaggcagcccaggccgattctggggcctccactctgggcctcagtttccccctctgtgagcaagcaggttgcactgtcattccttagggcccagctactctcccacattctcagttgcaggggacccaaggttgaggtcacaagcagagttcctgggctgctcaccctggggacaagggagcgtagaggggacaggaagaccaggtaggggacattttgccaagaaggaaggcaggggcatctggatcccaggggcgggagagacgtctgtgtccagtggccccattttacagatcaggaaactggagtccagagggaagggcctcattatagtggcccggaagttgggccagcccagaccagaaatcatccgtcctgttgttagaggggcataggacatggggctgggtccagggtgggccccacatttttctcagagctcctctcctgtctgttccaggcaggtgctgccacaggagagggaggtgaccggcaccctcatgaccttcttcctggcgctggggctctcttgtggcgcctccctttccttcctcttcaaggcgctgctctgaagcactctgtcgagggctctcccagcgtctctcttcagagctaggcccagcg

SEQ ID NO: 35198 - DNA, 923 bp, Bovine  19866881641067
  misc_feature (1)..(1): n is a, c, g, or t
naaaatcgaaagttttagcatgttctgtgtagaactgcccaacagtcaagccacacttcaacagtcgactgctaaaatacataaatgataagaagctgtgcagcgcggaagtgacaagccacacacctgtattgccagcagtgaccacctgtcaggtccaatgccctgtccttaaactaggattgggttgttgcaacacccaagaccaatcttatctgagcggactgcaccagctctatgtactacagcaatcatttccatagcatgatttcgtgtaatggataattatttttttttaaaaattgctttggtgctgctcctggcactctgagctgggggaatgagcagccactgaatttctgtgctgccaaatttctctcccaaaaggcccccctaatttaggcttcctgtgtgtgagcacagctcagggcaggccagccgaggctgggtgatgcccagggacacctacttgggtggcttttccacggtgcggtaggaattaaaggactggagctggttctggactccgctcagggagttggccagctgccggtcattgagggtcacgatggtctgctcgatccactggagcagctcggaggccagggattcatacttctccaccaggcgctctgcctccatggcgtggtccagcacctgtgagaccgcgatgtggggtcaccggcccagtcctcccctgcccctgcttcaggggaacaggaccccaggtcaggcctcctctggactgtacgcccatcaaccccatgctggagtgtaccttgccaattcttttgccttccacggccagggctttcatcttggagaagtagtggtagtaagtagccacataggtaataattatttctcatctggttggtccacattcacatctgagaaaaaggatcactcaggtcagacaaaga

SEQ ID NO: 35199 - DNA, 790 bp, Bovine  19866881845569
  misc_feature (1)..(1): n is a, c, g, or t
nccagcctggggaaggggcggtggtttgggcttatgcttggtgttcctgtcacctgcaaacccacaggctccaagcacagggcccgggcagctccggatcccccctcccctcttcgaatgacacaagcggtggttactccagccagccagggggctacccagccccaggagccgacgtggccttcaatgtcaaccacttgcttggggaccctatggccaacatggctatggcctatggcagctccatcgcatcccatgggaaggacatgatgaacaaggaggtgtggcccacccccagggcaagggtggcaggatttctggccagggctggggcatcacgggatcccacctaatctgcacagcggccctcagggaagagcagacaggagcaccctgaggttctgggtgcagctcgtccacagcctcctctcttccctcttagctgcaccgttttgtgtccgtgaacaaactcaagtattttttcgctgtggacacagcctatgtggccaagaagctagggctgctggtcttcccctacacacaccaggtgagctgcctaacagaggagctggtgggcccccttgcctcctgcctcctgccccagagcctggcccccagatctcagccccctcctttgctctcttgtctgcttttcctcacctggccgctgctgccacctccagaactgggaagtgcagtacagtcgtgatgtgcctctgcccccacggcaagacctcaacgcccccgatctctatatccccagtgagtctttgatctgggctgtgggatg

SEQ ID NO: 35200 - DNA, 862 bp, Bovine  19866880428343
  misc_feature (1)..(1): n is a, c, g, or t
ntgtagagatgcataatatgacaatgtgatttcaaaattgatttagctctacttagtggagcgtaaaataaaatgcatgacctgctaaagagacatagtaagcctgcagcatatagtacatcactgacaaagctaaaaaaggctttcaaagaccattcaactgaggatgtagtttgctatctgttgcataagcctaaccagacttttccttgaccttgaaaacactaaaagcataatcaatgatcatctaatagcagttgctcagggactgtgtgtatacggtgcgtgcttcctgctgaaccacagatgatgtttacctcatctgaagaagtcatactgtcagacagtccgtaaacagagatttatctctctggaaatgccacagactatagatatcaaactggtcacctatggctactttagagtccattcacattaaaaatatcatactctaactggaaatgtaatatatttatgattctgcagatattagtagggttaagatttttgggaaaaaaaataaaacatgatttgctaagttgaagtaatttaagaccacatccaaaactgtgtatagttgccaaaaaggtcattctgaagtaaaaataccaacttttgtgctttaccaactgattcaaaaaggtagaacttttggaatcaatgtacagtgattttgcatcaagctgaacagagtacttatatacatattggtgattaagataagtacagtatgatgaaatcaggcagaaaaaaaataaaaacccaagattatctgatccaagactgtcctccaattaagtgactgtgaaacccacatgatggacagggtgttaattggtgataaactcattcatcaagtcag

SEQ ID NO: 35201 - DNA, 871 bp, Bovine  19866880510093
  misc_feature (1)..(1): n is a, c, g, or t
ntatggatgtgagagttggactgtgaagaaagctgagcgcccaagaattgatgcttttgaactgtggtattggagaagactcttgagattcccttggactgcaaggagatgcaaccagtccattctgaaggagatcagccctgggatttctttggaaggaatgatgctaaagctgaaactccagtactttggccacctcacatgaagagttgactcattggaaaagactctgatgctgggagggattgggggcaggaggaaaaggggatgacagaggatgagatggctggatggcatcactgactcgatggatgtgagtctgagtgaaccctgggagttggtgatggacagggaggcctggcgtgctacaattcatgaggtcacaaagagtcggacacgactgagcgacctaactgacctgaactgaatttttttaaaaaaaagactattaactctccttccttcctttttctgccatctgctcccagttctttttaccaatattgctacaaaaattaaggaaaacacattctcactgagatcaagcagggctctcttgtagttcacttttattgtcttgataacacagttcgagaatgtaccatgtgtttttgctcttcagttactttgaagcaaggcacaattggtgaattggctgtcaagtggttttcgaaggagccacttcttgtgctctgatagagagatgagagcacaagacccaaatggtaaatatttaacaatggggagttctccttcccttgcttgtactctggcagagatttgtaatactaataatcagctttaattaataggtggttgtgcctgaagtcacaagtctcccaacaacaacaaattacatacacatcttatt

SEQ ID NO: 35202 - DNA, 2107 bp, Bovine  19866880664769
  misc_feature (1)..(1): n is a, c, g, or t
natgtaaagacttgtctggctagtgaggtatggcccctctgctgaggtgagtaccactgcagatatctagcagactgtaaagccaaggttaaggaaaaaaagatacaaatcagttttagtatcgaaaacagctcttactacccaaaggggactgagcagaatatataaacatgaagcagcactgctgtgccatctttcctgtatggagtgaggtacctaattaagacagtaggcaccagtcaggatgaaaagaggtagttaagcagagaaaatgcatttggttgccatgtgagtccttatccttactcttagtgttcaaagtaccaaacctcactctttccgcagattcccacgtttatttttttcatcctccttgttgaactgtgagaccacacagggctgctcacagcaaaaggctcctgctgctcttcagaaggcagcttgctgctgccccaggccctccatgtctttataattaggttgatgcccacaatgatttgggtacaatgtttctccaaatgccttaccttccaggatacttagaggattctaatcgttcccttttatcacacctaaaatttcctttccatgggcacaactccaggtttctccctaataaatgatagcatgactgtgccagcaatcactacagcaggtgacgtgaaaagcaaagggagggggttgttttgatgaggggtgaagggttgaacacttgctgtcagtgtaaggcagtgtgatcctggcagctaggaaaaagaatctggatgttttaaaagcaaaaagagtaatgttggcccctcttttgtctagatagatgctgcctgttaaagccgagacgtgcaggtataaacagacacatgtagacacccacagtcaccaccactgaacatcccacatgccctgtttctgcctaagtggaggaaatttataaaacagagactaataaattattcattccctatactttggagtccagtttagagatactgtaacctcatctttcacatttagtttattttttcatcttgccttgtagaattttccaaacatttatttttttgcatgagtatgaaaaatcatttatagatgaaaacaatttggtttctgcttggagttttgactggcttacagaaatggcacattcctcaacatttatagaaagtattttcaggggaaactactagtgttggaatgaccttgaaggtgaaacatgtctttgacaccagagagctgcttttagatgagtgagtgtcctttaactgcgttcgccagagtctctgctctaccaaattcccaaattgctattttcattgggtttttaatgttacaatccagtccattaggagctgcctcagtatttacaatttataactgccaagcacttgctacttaaccctgaccttgccataagccttcattgtgaagcacttttttcagagaccaatgaacttaaatcttccaagctgtttcagtccttggcaactctattaaaaatgtcattgatgatgacagcagctgcctgttatggtcactgccatcacaacatatttcaattggtcatcgacaatattcatatatcattgatttttctgaagccctgataatgctgagctgaagtattgagatattgaggtattgaacttctgacctacaaaactgttagatgtatgttatatttggacatcacttgtacaaaaaaatagaaatgttcaagggacacagtagtttctagcaaatatttaagaaatgttaaatacatgagttacatcatgagtttatctttagtataactttatgtatttatttagttttggctgtgctgaatctttgctgctggctgagcttttcctctagttgctgtgagtgggggctactctctagttgtagtgcacgggcttctcgttgccgtgacttctcgcatggagcatggactctagggcatgtgggcttcaggagttgcagcacgtgggcttcagtaactgtggctcctggactctagagctcagactcaacagttgtggtgcagaggcttagttgctccgaggcatgtgggatcctcctggctcagggatcgaacccatatctcttctgcatcggtaggtgaatt

SEQ ID NO: 35203 - DNA, 1546 bp, Bovine  19866880888977
  misc_feature (1)..(1): n is a, c, g, or t
nagtctttatttagatcagatttatattttctgcaaaatttagagctacctgtcaaaacaagcttcagccactttttcaccatttaatctgatacgttatgcaagtcttcttcaatttctaaccaagaggaaggacatgataatatcagcttttagttggactttagacagcagggagagttttgtattatttcctcctttatagcaatgcttgtaaaacttttaagagtagaaatattcagtatttatcttttgctgaaatagctacaaatatcttttaggctaagcacaaaaaccaatccttagttacaaagaaagtctatatgcaaacctaggcatttcggattacaggtgctaagctttgtgtatttatattcatgtgtgtgctaagcttaccaaaaaaggctttagagacatacacggtcaaacttgtgagtccttgtgtgtattttggcagaatgatattatcacactaacctagaatgcctagtgacaattaaaggagaagttattaacaactctatatgttctaaagcacagtgtgaaagtaatggttgttactatttttaattattgtattattttctatgatccctgatgggcatcatgtttttgtaaactattattaatgaaaatagggtgataatagggttcttggaggaaagagactactactgttccttgtataaaaatacctttatatcttatagaaactatttactctttaatatatattccattcaataagacatttaaacagtttgtttcttagctgaatataaatgagggtggtttttcagcaatatttaatgagtgataagaatctgaagcaattaaaaacagtaaacatgaggaaaaactatagaagcaacatagggtaattctgtaaataagataatatgtaaagtaaaattaagatctgagaaaaaatgaaaaattaaatgtaaagctaataaagagagcaaatttacattactattgttattcttgataaaccaaaataatttgcttgtgactagaaatttccccatggagaaggcaatggcaccccactccagtactcttgcctggaaaatcccatggctggaggagcctggtaggctgcagtccatggggtagtgaagagtcggacacgaatgagcaacttgactttcacttttcactttcatgcattggaggaggaaatggcaacccactccagtgttcttgcctggagaatcccagggatgggggatcctggtgggctgccatctatggggttgtacagagtcggacacgactgaagcgacttagcagcagcagcagcagcagaaatttccccaagtttcaaacttaagaaaaattatctgccaatggcaaagagaaattatattaaatctctagagagactaatcaggaaagagagatagagaaagagatgcaaagaattaacatcaaatatgagagctgaaatcactgcagattctgtagtatgtattttcaatgggggtaataaaattgatctgactaagcaaaaaaaatttactctttttatgtacaaagcata

SEQ ID NO: 35204 - DNA, 768 bp, Bovine  19866880925282
  misc_feature (1)..(1): n is a, c, g, or t
ntgacattatgatgttcggatattttgccttctgttaaacctttgagctacagacatcgattaaatcatctcctttttcagaacccatgggtatttagattatgatatctttggagtcttgttctggcattcaatcaatgcatgcaagagaatatgttgtatcatatttagcagactaagctctctgaggaaaggattagtgaatagttactgagtacattttaaaagcagattttctctgtaatatctatgtctattcttgaaacataaaaccggatacgttcaaaatacagatgtaaaaaggagagatgttctaaataaagtgtattcatctgatctgcatattttgaaagacctgatttttcctttctttcacattttatttttatattttaatttgaattttgcatgatttaaaagtgaaatagataatcaatacaaagattaattcagcacaaaatctattcatgagatcaccaagattttcttggcaaaatgctgtaagaactagttcagtctatggccataccaccctgaacgcacccgatctcgtctgatctcggaagctaagcagggtcgggcctggtttagtacttggatgggagaactagttcagtgtctccaattaatgtaatctattaaaatatattttaatatatgcaaggaagtattatgaatgcatgatattgaaggaaaataagaggaagaacaatgcagtcttatgtgaaactaaaatgtgataattttacatagtaacccctgggattt

SEQ ID NO: 35205 - DNA, 1098 bp, Bovine  19866881598300
  misc_feature (1)..(1): n is a, c, g, or t
nttttcttttgctttttattttcctttggggcctttctttcttttcccctgaatggaattttggtcaagtctcattaattttgaatcactaccagatgataaaaagtcctctagtcagtaatttaaatgtctaatcgaggtatttaaatgcctaaaggaatcaatatgttagattttatcaaaatttactcctctaaccagtttgcacaagacataggccagcccccagcagagagagggcgtggtggcttctgctgcctttctctgccttgtgtgtgtgtgtgtgtgtgtctttgtgtgttttctattctccatcatgctaataatggttatcaatttttccagacagttttacctttaaacaggaatacaagctcttaccctggattccatgctttagggtgtctcctattgactatcttctagtcttgcccagctacatgggatgcagagattatgcaaaacaaagaggaatactttttatgaatctgcattctctagcctcactatgctagaaatatgccagaccctgccactctttgcccaaatgatgccaaccctgaatctttggtctattcagggcacttccctaggggttgccttcctaagagggctgatctgctggagtgatcacgccttggattgggggttggccaagggccagacgccttggattgggggttggccaagggccagttgtctgtaataatgaggatgaaatgtgagcatatggtctcaggtatttgtatgtgtgtttgtgagtttctcacagtgctgaaaggagctggggcaaaaagagaagagagacaggctgcaggctttcccaaatttcaggagaccaatggtgggttttctacatgctgacagtttccagcactggaccaaaatgatgttaagaattctaaatttaactctggtctcttggatatttagggatgtatatttttcaggtaaaaaaaacagagcatattttatctaagagttttttactttaattcatagaactatttaaatgtatgatgtttcttggatacctcaaatattataggtgaatctagctccaagatcaggtgaggtacagatgcttgacaaaagaag

SEQ ID NO: 35206 - DNA, 1271 bp, Bovine  19866881718843
  misc_feature (1)..(1): n is a, c, g, or t
ncagttataggttatcataggttaatgctctgaaatcaggtgctcggatatcccatcatcactgactcccctctaaaaggacttttctttgtgaaattttacaaccatgacagaggcatgagatctcagatttgctttgaactagaaacttttcttacagctctaattaaaaggaagtttcaaacctacgaattaacagttttaatatgctattcctggtgattaactgcttcgttttagctggcattcactgttaacactgcaactgttaattttaatggcttgatttttaaattctaagaggagtaaaactagttcaaaatgattcctatcatttttaccattgacctaacagtctctatttagaaaatctcctttaataacatttgctccttttaagagttttatcttctttagctagaattgaatagacacttagaagaaatctgttttttttttttttttcttttcttggactatactttaaaattaaccttgcatgttactatgcctctgatggttgggtaaggagaagatgttttaatgaaaatattctttctaaatcaagcacttacatgtgtagtttttacataatacattatcatttttagaaataaacttaaaaaactgagctacaatataactaatttataacaatagatataaaaacgtgataaatctctcaaaaaatctaaaataaacacataaggccagctttatagaagctgacttttaactaacagaattttgcttgttcatttatatcttgagaggatgcatagttcctgattatcaaggatatcaagtccacagataatccaaaaaattcgttgtcatctctaattataaagatttccttcttcaaagctgttaatcagtagtcagagtgactgatttaaaatgcatgtcagataataacatcttacatatttataccaaatgtcactcatctagtatccattctttcacattttaatgtctccatcatttttaacctatttccacccacatcctacacaaaaccaatctcattaatttctagtttattctttctgtttatttctgtttactctctgtttctctttactcttcatgttcatttctttacacaaaaatgagcaaatatatatttacatatactatgcattcatgcatatgcaatatacatgtatgtatacttatataattatacatgtgcatgtgtgctaagtcttcagtgtgttcaagtctttggattcctatggactatagctccaccaggctcctctgtc

SEQ ID NO: 35207 - DNA, 773 bp, Bovine  19866881816365
  misc_feature (1)..(1): n is a, c, g, or t
ntgtggtatatgaacatcgatgtagaaaatcacatctagatacctgaagaaaaggatactgcaggttgcaaaattgaatctgaaattaatttcctggtttgccactgtcataaatccaagctttcaacatggggaagacagcacatgaaagcttattaagtaagattggattcatggcatcagtattaaaaaattactctgggagagaacaagatggtggaggagtaggtggacctggagtacatctctctccatggatacatcaggaatgtaccttcagacacaagtgcatgcagaacaccagctgagagctgacaggagtacctgatcagaggaaaagaatatatagaactacgcaaaactcagtaggatgaaggaagtagggggaaaaacaggagtgttagtaggactggacctgcctttggtgggtgggggaactgaagcaggtgtccaatccccacattggggcaattgtctgagttagaggagaaaggctgagagtgtaacagccgatctgtggcagcctaaatagaatgagaatcagacagtctttgcggcagccatacacaccctggacagggatgatggtcccctggaaggtgcagcagctgggagtttgagtttagggattgtggagtaatcccagggcaagggctgctgtagactgtgagagactgattgaggggatgtaagggaggagactctaaggggaaatgcctgtggaggaaagctgagcagccatggaagcaaggcaatactgctgagtcacgtgt

SEQ ID NO: 35208 - DNA, 4791 bp, Bovine  19866880356127
  misc_feature (1)..(1): n is a, c, g, or t
ntgtgctctataaagtggaaaaatcaggaaatagattcttcccaggaactggggagaaagaatatagtcctgctgacctatttttggatttctgagctccttaatgataagatactgaatttatgttgctgtaagtcactaaatttgtggcaatttcttatagaagcaataggaaattaatacacagggtggggatgagggtggggaatgtagtatcctatgctttaaaaaccttaaaggtaattctgatggtaaagtttgagtaacactgtttggaccatttggtaaaaatttaaacatgccaataagattcataaccaatgaggaagaatttctcaatagaattaatgctagaaaaaaactgtaaagagaatgaagctaaggccagtaagaagaaactgagaacccatttagcaaatagaggttaaacagatgaagacctcctatatgtgtgaagatttttaaaaaagcttatccatgtcaatgcaagagtgagatgctcgagataaaataacttagtcattttatcatatgaaaaaaatacataaataaatcaaactcatggcctctaaaacatccattcagtcaaatcactgttctttcttaacttagaatccatgaaaagaggtctggagacatagatgaaaaaaaaaaaaaactttatttttactaaattctaattgaagtctagcattcccttcagttgtgaatgtaactaataaaccacatagtaatggcagaaattgttacttagtcatcaatagaaaccacatatacttttctattacaactgttgcagatgtctgttaatatcatttatactctttactactgtaaagttatgatagagatgagatgcactactgaatccttgttaaacaatgtggtcaatgtggtgatacagaaacatatgtattattttatcacaaatttatctttttatattgaaaagataactgtcttccaaaaacttatttttaaaaattatatatatgcatatatattatttttgcatatatatattatatttaaaatcttattctgaaaaaggtttcataggatacttcagaccatccaaaggattaatgacaataattaattaagtattatgagacataatgtgtgtgatgtaaataagacaagtgttgttatagcatatttataagtaatgaaaagaaactaaaatcttgtttaatatcacataaatcagactaaatgtattataaggccagagcccttttctttgttttctcaggtgtccatctgagcatctccaatactttcagatgccaaattggtggtgatttccacctaatcacagagctttaaagttccaccttacttttgaattatactgattggggcatctcaaaaacttgagggagatagtctaaataccctgagaactaggctatgccaactttctgttttccctctgttgcactggcttccaaatcagttaatggttgacatgcctcccaaagaatgacctcaactctccgctaaggacctgggaaagagcgaaaaagcaaaacctgacatagacaataaaacagctgaaaagatggctttgaaataagctatggtccactgaacagcttcctagagtatattttgttcatacctactatatgatttaaagggactttgaagttcactttcaaactgcaactgtttgaatgcagtgcatcaagatattctatgatatgaggataggtggatatcttagcctcatggatactcaatgctagatgaaccatgaatatttgggagttcagagttaattcaaatgatcctccaaaatgttatttgttcatccagagcttatccaaatgatctgaatagtttcaccatccaaaatcagctgacactcaagtaagaattaattttcctatgagatttttctttctcctttctgccagaaatattccatgcactttctcaaggttatgcagctggcaggtcccaaaaggtctgggaagtaaaaacaaacaaaaaagtaaatagcaattaattcaatgtgaaaccctaggtacagaaaattaacttcctaagtaaatactgcaggtctttacacattgtactctgttagcatctgaaaaggatactatagacagtaaaaaaaaaaaaatctgcctgcagtgtaggagaccccaggtttattctctgaattggggaagatcccctagagaagggagttgttaccaactccagtattcttgtctggagaattccatggacagaagagcctggtgagctacagtccatgggatcacaaagagttggacacaactgactgactaacactttcacacttttcacttcatagatatagttacttacatgtactagtacaggaaaataataaagccttattcattctcactgcttgtccaaaatctagattctaccatgaagtagcaaatttggagagttgcaaaggttagaagaaagagctgtaaagatgattacgccttgagaattcaaatctagaaggaaagactcaaaaaacaagaactatttattatggaagaaaaggcagagtaacatgatacataagaataaatgcaataaagaaagatggaaaaaatatcctagataaagatagagatcaactgtggttcctttattctgagatcaaaaccaaaggaaaacatggtaagctgctctgagaaataggctgatcttcaacttgttcaatttcaaggtgaattaccattggaaagtgtgtaatcaccactctctaaaattttgattgaaataatattttctcttgcatcacttaattttggtctatcttgaattggacttccctggtgtctcagatggtaaagtgtctgcctacaatatgggagacctgagttcaatccctgggtcaggaagacctcctggagaaagaaatggcaacccacagtattcttgcctggaaaatcccatggatggaggagcctgttagaccacagtccatggggtcgcaaagagtaggacacgactgaggaacttcattcactcactcactcatcatgaattaagagaatggacaagaagatttttcaaggaccattcctgtaaatgtatcctgatatattgtgtattatcctgtgacaagaacaaatgagatcaccaagaagacttgcttatagagacttccatgttcaaagaggtactctactgaaaaaaaatcaagacatattatgggtatcccagttagcaatggctggaggaaattctgcaccaagaaagaggcatagtggcccccaaataattcctcagtcccacctaccaactcctggaagtctgcataacttttggttttaaaatgagttatatatccttctttaattaagtttaatgtaattcattgatagagttttaaatgacattggatatgatgttgtatagtttcccagatgtccatgaggtttctcacactttgtagcaacttgctttttcatgggagcatgtggctgattctggccaattaactgtaagaggaagaaacatgtctcactttcaggtcaaaatgtagaacatgaggagcaatttcttcgtgtgtctcttccagaaggctttacttcacatatggcccatgtgttgagaagatagcatcatgagaagaatgctgattgcatctccagattgccagacctgtactgttcttgtcatgaacaataaatagaatttgaagagagaatgcactgtcagtctatcttgactgatagctatgataattcttaaaataccaattgagataaaaatatttctactgcattttcagttctcactatagacacctttaaaagtaacagcgtcactgtgttttggctaaggacaaggagctgcagttttatccctattgattcatgaaaatacgaaatcatctgtcagttattattgttaatcattaatcatctgttctacatattaattacatttacaacagagatattctttaaaattatgaacatcatataatgtatttatatattatttttaaaggagtccatataaaaacatgctgttaatgttgctgttcagtcactaaattgtgtccaactttttgagacctcatggacagtagtgcaccaggctcctgtgttctccactatctcccagaatttgctcaaagtcatgtccattacatcattaatgctatctaaccatcatcctctgccacccccttctccttttgacttcaatctttcccaacaacggtgtcttttttaatgagtcggctcttctcattaggtgaccaaaatattggagcttcaacttcagcatcagtccttccaatgaatattcagggttgatttcctttagggttgatggtttgatctccttgcagcccaagggactctcaagagtcttctctagaaccacaatttgaaagcatcagttcctcggtgctcaaccttctttacggttcaactctcatatctatacatgactactggaaaaaccatagttctgactaaatagacctttgttggcaatgtgatgtgtttttaatatactgtctaggtttttcatagatttccttccaagaagcaagcatcttttaacttcatggctgcagctaacatctcagtaattttggagctcaagaaaataaaatctgcttccactttccccccttcaatttgccatgaagtgatgtgactggatcccatgatcttagtttttgaaatgttgagtctcaggccagctttttcactctcctttttcaccctcatcaagaggctccttagttcctcttcactttatgccattagagtggtataatcgacatat

SEQ ID NO: 35209 - DNA, 941 bp, Bovine  19866880360859
  misc_feature (1)..(1): n is a, c, g, or t
nacactgtttccactgtttccccatctatttgccatgaagtgttgggaacagatgccatgattttagttttctgaatgttgagctttaagccaactttttcactctcctctttcactttcatcaagaggcttcttagatcccttcactttctgccataagggtggtgtctagaatgacttgaattatcattagtgctagagacaggcctgcaatttgaatgtaaactgttcttatttgtgaccagttctgatacaatttttttttttttttatcttttaccatatcaaagagctgatagaacagggaaaatccagattcttttctctgagttactggcctcatgacaagctatattagacaggcccttgtggtgaaagattaaagtattaccagctttgttttgaaactgtgacacagagtgcttttttggaaactttctgaggtggtttgggcccttaacttgcctggtaaccacagcttctggactaatccaactcaccgtttgggaatttccaatttgggaattactaataggggcactggtttatgcaatgctttctcttctggtttgcaggtgagtagactctttcttattaaagaagagtctaattacagcaggtgaggggaattttttacactctacctccagacagcagagtttggagggattctcttagaccagagcatctccaactataatgtgcatgccaataatggaatcttctggacatcttgctgaataattaagtctctggggtgaggcatttccagccaggtgatgatgccactaaatagttcgtaaaccacaatctgcacagcaagatcttagagaaaagtcaagtgtgcctgtggtggcaggagaggaccatgtgctttcaggacactttgaatttatgtctcaggacttctctggtggtacagtggttaagtctctgtgctc

SEQ ID NO: 35210 - DNA, 1587 bp, Bovine  19866880376931
  misc_feature (1)..(1): n is a, c, g, or t
ngaggagcctggtaggctgcagtccatggggtcactaagagtcagacatgactaagcgacttcactttcacttttcactttcaggcattggagaaggaaatggcaacccactccagtgttcttgcctggagaatcccagggacgggggagcctggtggctgccatctatggggtcacacagaatcggacacgactgaagtgacttagcagcagcagcagcagcaggaaacactgatagtggaatagggaactgacacagagtgggaaatcaggcaataaagtttacatcatcaaataagttactactgtgggtaactgtttctttagtgtagctggggaactcttggagacagcgtagaatacatattagaattatgccaacagagcggcaagggagattgtgcatctgtcttccaatctctgtgccaacatcagttggactttgcatccagaacattatcctccctctggcatttctggcttgccaagagcatgggccagaatgaaagctaacaggcagagagcagcaggtgtttgcactaaatagctttcctagtgtagagttgagtaccatgggagaaaaagcaggctctcaacagcttccagctaccataaatcaagcaggaatgtggccttccttcaagtgtccttcccagttaaattatctttagagtctatttaagctaccaatcttttccagctgctattgaatgaattgcttcaccacatttggtgtatgacttcaattggttagtaatgtagttgggaaaagctgtaggattccaagatgcattgcagctgtctgaggcttgttattaacaaggacaagttcattgaatagtctgatctggattactattgtataaattttcatcctaaagaagcaaaatcatcgacatgtctaggcaaacatcacatgtgttttgtctgttttaaaaaatagttgtgggtatttattaccattctgttgataattcattttttactctctatcatgtttttcagagcatgattatgttattgttttccatttccattttctggaagtgacatgttttacacaggaaacatgactacagaaaaactcattagactttctcctaaatagcatactttttctatcagccttaatcaataatataatttgctttatcccaataacagttgatgacagagatatgaaatcttatcattatcaagaaactattacaggggaatttccaaacccaactgaaaatcatgctaaaatgctcagaacaggggaggtattcaagtgtgctttagccatcattagcagaaattttatagagattctcaaacatttaatggggcatggagctagttgattttaaagtattttcctatcccaagattctggatactttacaatacccacagaattttccattgtgaggtggcctgtattggttacctatgctgaataacaaattacccccaatttaggtaacaagtctttaggcaataaacctttattatctcacagattctgtgggtcaggaatctgtgtgtggcttaattggtcttccatcttaagggtttctcacagggctgcaatcctgttatgag

SEQ ID NO: 35211 - DNA, 907 bp, Bovine  19866880550143
  misc_feature (1)..(1): n is a, c, g, or t
ntaattaaactagctatacttttgaatgagcaaatgtggtttcaaaaatgattttatataattatattatatcttaaacttcttttatggatgcaaagcagatatcatcttggtaaattatgacaacatgtcattttttattaatttgtagaaattatttctttattgacacattagcccagcagggaaaccggagacaatgaggtcatatgcaggggtgataggaagctgtgatataatcagttctaaataatatatttaagtggtaaaaatccgtatttctcccataagaatatttggtttttacttcagtcttcaatatgcattgttatgagaaagattttgcatgagatttctctttagtgttgtgcatggtgaacaatgcacctggtgaagtgaatgcctcaatgaaaagttttatggggcagaaccagttgctatgctaagaaactaagtgttgtgctgatatacataatggattctatttttagatgaacatatgttcctatagcctggcttccttatggaagaggccagcagtttcagccccacattgtgaatattgagacttagatgatcagaggagatgggactttaggttgtgaaattttcatctattttagccctaacatatttcatgactaggggaaaaattaaaaacaaaatagattaacatataaaccctactatatataaaatagataaccaaccaagacctactgtatagcacagggagctatattcaatattctctaaaacctataaagaagaagaatctgtaaaaatatatattttaacttaatcacttttgctgtacacctgaaactaacacaacattgtaaatcaactatacttcaataaacaaaacagaaatctaaacaaaattctaaaacagtttcagcttttt

SEQ ID NO: 35212 - DNA, 945 bp, Bovine  19866880570543
  misc_feature (1)..(1): n is a, c, g, or t
natttcttgagtgtacttgcaaaatttatgaatgtgcaaagattatacatgatttcattatgtcatatttgttatttttaaatatatggctgatttaatatgtataatttattgaataatttaatattcagaacaattcagctaggcttttatatccccattttatatatgaggtaactgataatcagaaagattaagtcacttttctaaggacacaaagctagtaagtggagaatttagttttttaacccaggttgcatgtctttacagcctattctttcagccaccatacagttcttagtattatataagccagaaaactccagtttaacacatcgaaaataagcaagttttatgtcagtgactggagagtattgggtaaataaagatggttaaaattttattttaaaaaatagtaaacgtgattcagtaatgggagcgattttacttatgtggttgtagtaagatcaaggctgcttgttcttaaaacctaagttagatgcttctgttagtctgagtttggcttataacttttttgtttctgcttcttgtaggtttgagtggccgcttctttgtcactaccctcccagcatttttccagtaagttcaaataattttctggtcctgtaatgattagaaattagtaggtgcgtgtgtaaaaagtctgtcccgggattcttttgttgttgtccataaccttcatttgttcagcttagcgtttgaagggagaaagactagtctgcactgaacgatagtgattagaagagaggggtgtccaggtgctacagagaatctaattttaggccagcaaataggtgaggaggtcaaagagggttttttgacaatatgaaagatgggatgattcttaatagataacaggtgtatgtgaagcaggtaaagtagagaagatctttccaaatagaggatgtatcaggaaaagcccag

SEQ ID NO: 35213 - DNA, 826 bp, Bovine  19866880593263
  misc_feature (1)..(1): n is a, c, g, or t
nagggattgctttttgctggagaagaatgacaccctttgtatcgaagtggggaattacaggctgtggtcactctctgcacagtgtctctttgtcaagtaacacatgccaaaaaaaaaaaaaatacagatgggaaaatattgtgcactgtcagatcttggaaacagccaaaggatttttcctcaccaatgtcttgtcgatgactttcacattctggcaccctgaaaaaataatgcatacatttaatatgaaatgaatgcaataataatcaggcaggtaatcgttttcccaaggaatgtaaaacttgacaaatgtaaggtttatgattcaaggtaagcttgccaaatcttatgtggcatgagaccatttttattacctaaacagtccttaacacaaaatgactggcacatatttttattaacacaaagagtatattcttttctgccacatttaatacagagtcagtggctaaaagttctcttttaggatatgtctgtagcaaattaaaaggcagagtgaggattcaaagaatggcatccttctcacggatgctgtgtctacccggcctcagctcagaaatgcatagatcactgagctctggaattctatctgtggggatggtctgggtgatacagatcacagaaaaggaagcccttgctaccttcaaaaggaggggaggggatgattgactcaagatgattcaatgcaattagaggtccattctgagtcaaattcaaaacagtcactaggaataatgattatttatttgttcattcattcagcaaatatttattatttacatgctatgctctatccagacactagaga

SEQ ID NO: 35214 - DNA, 1796 bp, Bovine  19866880639528
  misc_feature (1)..(1): n is a, c, g, or t
ntatttaaaagagaatattgaatgaataaaatgaattgcccaagaattctaaggatgctaacatatgtgtacatttttaaagtgcatggaaaatacagaccagacatacgttgtaaagtataaaagcctaaatgggattgatattcatgaatttcagtatagaagtctagaaagaaatggagatataaatctgatgatggcatctaatttatctataacattgtatgatttaagagatcagaaggtgacatgaaagcaaatgtgtccaaatgtcagcatcatttattatatctgggggttaggtgtatgatgttgacaatattggtctctgcattcacctgtttaatggcacaatcatgaaaacatacaaataaaatatttttttaaaaagctttgaaaaaccttcagttgccttaaattctttctggactatgggcatgtcggtggggggggggcatgtttgcatttactacatatgcaattgttgttcagtcgctaagtcatgtccagatctttgccatcccatagactgctgcatgctgggcttcactgtccttcactgtctcccagagtttgttcaaactcatgtctattgagttggtgatgccatccaacacgtgcagtatgattgtagaaaggatgtgaaatacacaggcacacatggtatgcatatatatgccatatatattatgtatgcatgtgtaatacacataggacactcaaactattcataccatatgtacgatgaattgtgccctgcacttccctctaactgccaattactttgaagttttacaaaaggcaaacttagattaatttagagaagtctttggtcttattcttggcataacaaaatcacttaattcttttaacagattttattgactttcctttcatagtgttatacttttttatccagccactggccaatgcaggtctatgattatgcttcagtctgctttgcttcattattttctgtaaaaataggctagatacactttaataacatttgctattaacatattttaacttaaatctgttaattaagatatagtgtattcaggatatacttgagccataaaaagaccagaaatctgcctttacatgtcatggaaatgtcttatgaaatgtctaaagtacacccatctaattgcaatttcctgtaacttagggtgcttttagtaaatcttattctttttatattttattatagcttgacttctggattctgtgattttacatcagaaataacttagatgagattatttccttgaattttaactctcaggatatgtgcaatcacattctttttcataatgaaaaattaataaaaacctcaaggaacaagtggaacacaattccatcaattcaaaataattacaaggagaattggtctgaatctggaaacaaagcaaattttaaaagagacaccatatgcttactttcagctaggggcagtaatgggaacccacttacaacaacgtgcctaagcagagctcctgctgagcccattataatgaacagaaaatgctttcatagaactctgttaattattgatggtacagctgaggtttttaaagtgtgtaagaacagtgggttactaagcaagttaaagactcctttcctgccccctaaatctgatttaaaccaagggtgtctttaaaaagtacatttctcctccagatgttatgaattctgaaacatttttgtcagatatataaaatcacctatgttcaagaatccacatggaatgtttggggtacttttctctaaatctaaaagtaccaggttaggcc

SEQ ID NO: 35215 - DNA, 2081 bp, Bovine  19866880643688
  misc_feature (1)..(1): n is a, c, g, or t
ntatgagttgctacacagctgctcgtcagctcaatatttgcagcatattagttatgagagataacattgaattattaatataaataatgtgttaatactgccccacctgtatgtataaagggtcttggaaaatagcctccatacctagcagaaaatgacttttaggatcaaattttcctagaagagggcacactcatgaccaccagactcaagtaagttcatttttccctttccagtggttctgatgagatgtacctttcagtatttctctgtgtccattctgaatatctgaatgtcaacctttctgcagacagatctaccctagagaaacacaccaaacaaaagaatccatggttcattatttgagcattacagatcttagctgacaactttggtttaggaatctaaagggatagaagctatccatcatgcagcaaacaataagaaaatctggtaggaaatagaaaatactgcaaaaaaaaaaaaaacctcattagatcaaaaagttgaggaaagacccacctaatgaactacgacttacagatgacttcggtgagatcccccttgagagtctaaattagcctctgaaaggggtcacctaaaacagaatgaaatattttctaaagtccataattatgggaactgtaatatagttccaattaaaccatgagaactcaatgtctgctgaagtcctattatacactgttctacgttatctctctgaattcagactgagagaacactgaaatggacacagttcatgcaaaaataagaactctcaaataatccgaattctttatttgcactttttaaaattcactaaagaggacagtccccagaaatatatttttttttaagaaaaataattcattttctgctctcatccattgatttaagtagagaccaccaaagcactttcttcaaaagagcaaaagcgtattcccctctaaacctccagacattcattccctctttcctacttcaccactccatcacattaatatgatagttgattgccttttgctaatcctttccctcctcctgtccgcattcaagtcctggtcctcttgtcatgctggtcctcatcacaaataccaggactggtcagaccctcctcattcagcagaactgaaggaaccaggggcctgttcagcacgcagtggctgtaaaagactgaacatgacttagcagccagtgagtctctgatactatctaaccatctcactcctctgctgccttcttctccttttgcattcaatctttacataatggcatattgtgtgcccttagaaatcagatgaagcacatgtagtacatgccaaaggatcttcagagtagaagtcctaaatactgatgaattactgtgaaaagttgtacactgaagcagcctatacaacatttgatgaaaattaatgcactagagctatatgcatcaatgtgtgtgattctcatgcatatatattcctttcccctctagtactctgtctttttaacaccttggtctccccagactttcagctctctctccccctagtcatcatccaccaagctcttcctgggttctacctccatgcttctctcaagacagtaaactgggcgaatcacaggtttcaccacattcattttctatctctcaggtatcactgtcctacactgccagatgactaatgccttaaaaactcatcttttgatttatttcatctgttgttatttcatttgttgttgttatttcagctaaattggcaaatataattattccatcttagtaaaaaggagaggttctaccagctgcagattaaatagaaactcagactgtatttgatgaattaaattactaatgatccatagcttcagactcataatgccccttctgccactaaaacaagatctcaaaaaagatccaacatacttcattatgctttgtacttttacaacattatacgacctctcccagggtattttaggttctgcagtggcaccccactccagtactcttgcctagaaaatcccatggacagaggagcctggtgggctatagtccatgggggttgctaggagtcggacatgactaagcaacttca

SEQ ID NO: 35216 - DNA, 1718 bp, Bovine  19866880708482
  misc_feature (1)..(1): n is a, c, g, or t
ntgacgactaactttccatttcagttttagatgtcttttcattacatttttgaagtaagatttgaagaaaaaaatcttagtgtttttgctttggagtgtctctattttcctttcattcttgaataatacttttcctggatatagaattctagggtgaccattttttttttcctttcaacactttaaagatgtttgtccaactcttgtccccatgatagtaattcaaatcattgttcatgtgtaggtagtatcttgttttactcttttagcatcaaggttgtttttttttttttccccctctatctctgcttttcagctttttaaaaatgaagagtctagatgtatctttctttgtattaattctactgaggttttgttgagtgtctaactgcaaattcataacttcaccaaatttggcaaattttagcctttttttttaaatatatattttgatattgattctttcttctctctcactcctttccttctggggctccaataaatgtatgttagactttttttatattgccccatcttacattattttaagtattttttttaacttatatcttcaatactgtaatcagatacaaaaaaatggtctttctcaaccttggttactctggccttcttggtgaaataagtccagtgctttcactgtattcttttcacgttgggtcattatttgtttgttttaaaaaatactgttcaactgtccaacaagtatgcatgaccagtcatttatataaaccagctaaattaccactttactcatgagcaatatatataactcaatatttattgactttctcaagcagctttactcaattacatgatcaagcttccactaataggtaaatgttccaatctcactggagcactgagcagtggttcttttaagtggcattctctttgactccatctttattaagcttttttgtttatgttccatatacagagttagttgcatttctactgtagaaaacatagggcaattctcaggagacttacccttttaggatacttgtcagtcaagtcaaatgtcttctttgaacatttgtgttgtctcacagctctattacagctctattggagaaggcaatggcaccccactccagtactcttgcctggaaaatcccatggatggaggagcctggtaggctgcaatccatggggtcgctaagagttggacacaactgagcgacttcactttcacttttcactttcatgcattggagaaggaaatggcaacccactccagtgttcttgcctggagaatcccggggatgggggagcatggtgggctgccgtctatggggtcacacagagtcggacacgactgaagtgacttagcagcagcagcagcacagctctatttagaaggaggctataagactgtcctgaacaagacttacagattcattcttactgtcacattggcaaataccctggaggccagccatttggaggaacccgagttgagctttcaagcctgaaggcttggtaaagtcccaacactgaccttccagtctttcttttcttaaggaaatagaagaatgactgcttacaattgattataatgtgtatcaacttttaaaattcagcagttgagcattaaacttgttttactgtgcacatttgcttttgttgaattacgtccaggtctcttcatttcccagggcataaaatctggttaaattccagggaaaggattaagt

SEQ ID NO: 35217 - DNA, 1836 bp, Bovine  19866880734155
  misc_feature (1)..(1): n is a, c, g, or t
naagctcttggttcttttatttctttttttatttatggctaaggcatgtgggatcttagttcctccccaggaatcaaacctgggccccctgcagtgaatgttcagagtcctaaccactggaccaccagggaattccctaaactcctagttctaattgctgtgattgactgggtaatgaccatcttgggctgagttagtacatccctgaagtgaggggcttcaataaggtagggataaagccatgacaaatgagaaagctcttgtatcattcattttcatattacaattacaaaaggagaaaagaagagaaaagaaaaggaaaaagaaatctacctagaaaaaagtctgcaagtaacacatgctcatggtacaaaaattaatatccccaatccaactaaagcaaagcagaatgacacaacattcaattgtacagtgtcacaatgtcaggatggaagttcccctctgcaccttcaggatccacactcccattcatttctcagaggtagttagtgttaatttcttgtatatctttcccaaaatgttcttaggacattgcattagctaaggttcttttggtttcaggccacagaaataaactatagctgacttaagccacaaaaaagagtttactggaaggatgctggggtattttgcagaactgaagcaggattaaacccctaaatctttgaaggagtatactagaggaaagttataagacatcccagtgccatatgtcagaagattgcctgctaatatgactttgctacagagattctcagcctctgatactactgtttaaatttcaaatctgattggtcaaactacattaagcaaatgagctataatgtggctggatgtgtgggggcagaaaaattaggaaatgggcaaatctcaaagtgtaggtagttggggaaattttctggactagttaaatagtaacttgcaagaccaaaaccatgaagaatctttgaaacatcatgtgaacataagtacgtttacatttactcacatataaatcatacacccacactgtgtatttgattgtaagacaactatgtttcacattttagttagctatgaagtcagaggtgtagtttataactgataactatgttagcattagaggatagttttaatacaaaccatttctttgttgtttctctgtgtcatataaaataatgaaacatttccagtttggcattttagtaacttatgcacagtgcaaaaaatactatttgttcctgaacctagtgtcacttatggatacattgcatatctggaactattttggagaatccctaccttaaaaactaatacaaaaattatctttgtagagaagcctcttggccattataattaaactttatgtaaacactgtagagtttattttagaagaaaagtacaaagctaggtactgtgggtaaaatgtgactctatttttgctctcaagataattacaaattgacatccttattttgaaattctagcttccagaactgtgagggaataaatttctgttcttttaaggcatcatgtttatgatcatctgttttggtcatcctgctgctgctgctgctgctgctaagtcatttcagtcgtgtccgactctgtgcgaccccatagatggcagcccaccaggctcccccgtccctgggattctccaggcaagaacactggagtgggttgccatttccttctccaatgcatgaaagtgaaatgtgaaagtgaagttgcttagtcatgtccgactatagcccaccaggctcctctgtccatgggattttctaggcaagagtactggagtggggtgccactgcagaacctaaaataccctgg

SEQ ID NO: 35218 - DNA, 1017 bp, Bovine  19866880767037
  misc_feature (1)..(1): n is a, c, g, or t
ngcaggggatgggagagacacttgtgttaaatgaatattgtagccctcaaattgccttacttgacaacatatctgcgcttagagtgtactcatgacagacagtccaaagcaccgttacaagcctatgaatgatgtcttagatgcaggagccttttatcatccctttgtttgggtgcccatgggataataccttttagtaagattctgactggatgaggggcaggctttgcttggtaaacagtgcatttctttcggaaaatgttgatgtgttcacatgtcaggagagttggttattaagaggaaaatgccaatgatgagccttaacatattttcttgaagttgaactttcagattccctgcacataattatattcaaatgaaatagtcagggggtgtggactggtctatgctgttgctgccgctgctaagtcgcttcagttgtgtccgactctgtgcgaccccatagatggcagcccaccaggctcctccgtccctgggattctccaggcaagaacactggagtggttttccatttccttctccaatacgtgaaagtaaaaagtgaaagggaagtcgctcagtcatgtctgactcttagcaaccccatggcctgcactcctccatgggacccaggctcctccatccatgggattttccaagcaagagtactggagtgggttgccataaaagtcttcaaaacaggaatagatgcagaactgtgaatactaatgatgaaataaattaggaaaatattgaccaagttgtctttgcttgctgaaattctttacgtttttcttaagtttgtattttatagtggtagatatgtttattccagttcttactgaaatctatttgcagttcttccatgaattattattgggaaacattgaaaaatctcttgtatcaattttcctaaaataaattattcaaagcagttcattatctataattctatcctgagttaaaataaaaatctgctttctaagtcaatcttcattaagctattaatatcctttt

SEQ ID NO: 35219 - DNA, 1861 bp, Bovine  19866880847480
  misc_feature (1)..(1): n is a, c, g, or t
nccatgcaaccaccaccacccagatcaagatttggaagttttccattgtccccaaaccactctgtctaccagaagtaaacttacgctacttccatcaccgttggttagttctagctgttcttgaacttcatgtaactgggatcaaataatatgtgctactgtttctagttttgtacatgaagtccattcatgttgttgagtatatcagtaatcctttctgtttattgctctatagtaacccaatgcatgaatataccacagtttattgattcactgggttgtttgcagttttttctgctggaagctgattcccaccaatttaagtgaaaatgcaagttcagtgttattttcttatttttcaaggaaagctagacatccccattattatgtgaagatttttaagagctggcaaatatttaacagtttaaacatggagcaggtcatgttaaacatggtgtggccagtctagtgcatgagtcatgggttctcaacacctgtgacatcttggcctcacagatgttcccctcatggctaaaatcactctcatgtccccacacagaacatgcttgatatatgtagcagtgatgggtgcctgctaatagaactcatcagaatctttttttgttaaactcacttatattctgctatttagaagaatgtgggtgtgaaataaacttccttctctctaccatgcttggggagcccaggatcccagacctgtaagaatgaatcaagtagtactgatgcttcttagcgtgctgtctgcaagctgcatctgtgtcattgctgtgctattcattcatttgtttatcttgccaaaacattagcgtttgtgaaacagctttagagagctgtggtggattagtatagcatgaaaggaagtggtggcttgttctcaaacagggagaaaagacctttcattgtaaaattcattatttatttattgtccaaaggactgtattgcacatctgttgcatagcaacaaaataaagtttgtctgtttaggaaaatctgaaggcgtcttataacataaagataaagaatgctttctgaactctcatttgcttcaatgtgtgctttgtcacatgccaattatagaagaacatcaggatgagagtttattttaggtgatacaaatgttaacataaatgatagagggtattattttatgtttatgtgatgggaaatcttatctatttaaaaagatgcaatttcctgtccttatccaatcttactggagtagtcagtatcttgtttcttccctaagaattttttgggagagtttatttttagccagttatttgtttctatttctattcatatttttctgaatatcatttcagataatgcccataggttcaactgaaaaatttccaggatcttctgaaaaccaaaaactgtgttaccctgaatgatgccaatacaatgggtgaaattcaagtgtgcaatatatttgtttgttcatttgttcagcctcattggggaaaagattctggctcagtttcctacttgtgttctctggttagatcatctgcctttcaagttgattcatttttcattatagtcaaaatcctaagtttaacagtatggggatcttcttattgatggggtagtttatagtaatatgcttcacattatgtattagagttttattactaacgtcactagttgaaggtcaaagccaacccaccccaaagtattggactagaatcctgaagatctgagtaactagccatgtgaaacattatttaaccctaggacgctcagaatctcagctgtgaaatgaagacacagcacggtgatatatgtgagaatgtattgcgaattataaattgaacatcaaagtcttatttataataat

SEQ ID NO: 35220 - DNA, 802 bp, Bovine  19866880901737
  misc_feature (1)..(1): n is a, c, g, or t
natactcataagtactcatggtttttcttgtagccttataagaatatttactaaagtggtcaacttcaaaaaccattttattattattcagtttgtgactctatgttatttgtggtacaaataacattctttattcagttcccggactgttacattttattccccactgttaataatagaagctctgaagtgagtttacccagctccgcaattccaggaatctactgtttgtaaatatcaaacagacagggagaaagtagtcctatccacttcggccttacgtgttggagggatgctggctgtcagtagaagttccaacttccaattttgaagcaagcatgattggtggggttacacttccgtgctacattttcctcaagattgaactgagctcctgctgggaggattggtgtccttattcaaacattttctccaggtgtcattagactcagaatattggagagagacttgctctttgatgaagaccctaggaaaccctactgagagtaagcacatggataatttatgtgcaactcacaaatcaaacatggtttgtaggcctacaaggattctttaaataagagtttcaggacagaatttatcagaagcagccttattgcatacttggaagagataaccaaggttagtcagcttctggcttttacatttgaaataattcagatgactgtgattttgccaaagttataaataaccaacagaaccttgacacattttatcatgaagtgtaagttttatgtcttctactttggtaaattttacaaatgccaactagaagcagcca

SEQ ID NO: 35221 - DNA, 913 bp, Bovine  19866880943568
  misc_feature (1)..(1): n is a, c, g, or t
ncatttctctataaatgtagctgagaagatcacattaagcaaaattccaaagctaatggcccactgtgcttagtcactcagtcatgtcaggcttttgtgaccccatagactgtaacctgccaggctcttctgtccacgggcttctccaggcaaaaatactggagtggtttgccatttccttctccaggggatgtctccaacccaggaatcgaacgtggatctcatgcattgcagccagatttttactgactgagctacaaggccattagtcacaatggctcgttagtcacagtaaactgatggtccaccaaaatgactgaccagataactcggttaactagctcaagggcctagtttaccaaaccaagaaaatattttactggatcatcaaggagccttgcctcaccccttcccagaacacatatccaaaagatgtgtgcatttggtagtgctgaccacatcattccctaaaatgagaagaggtctcgctttcccaaaagcaagtaccccagcatccgcctccatctacaagcacaagatgtggtgccaggagccttgcagtgtgaatttctcatggaaagatgcacacgtgaaaggaacacaaggagtacaccctcttcctaggactgaagttcagattccttctaagaaaacattattacaatgtcaccagtctacttctcatgtctaaaaataaagcatcacatcacttcttaagatacatattacatatgattagaactttattctatttttcccatctcttagctggcattcctcaggagcaggaaaaaaaaaaaaaacaaaggcattttccacacaaaagtcccattgaagtatgtttaagcgtcagattaaaactaacaaaagacaggaaacaggggagtgaagaccttactcagtcttgaactca

SEQ ID NO: 35222 - DNA, 1730 bp, Bovine  19866880956303
  misc_feature (1)..(1): n is a, c, g, or t
nccggggattctccaggcaagaacactggagtgggttgccatttccttctccaatgcatgaaagtgaaaagtgaaagtgaagtcgctcagtcgtatccaactcttcgcgaccccatggactgtagcccaccaggctcctcccattcatgggatcttccaggcaagagtactggaatggggtgccatcgccttctccgaaagtcgctcagttgtgtccaactctttgcaaccccatggactataaagtccatggaattctccaggccagaatactggagtgggtagcctttcccttctccagaggattttcccaacccagggattgaacccaggtcttccacattgcaggcagattctttaccagctgagttacaagggaagccctgtctaaggctaaatgattctataaacctcaaacagaatcgcattgttgtaaaagattaaaataagaagataacaaagaattccagcttggccactttattcataagcaggtatctccaaactaacatttagactgagattgaatctgtaatctgttactaacactgtagtgtcatttgtcattaagggcaattatttcgaacaactaacttaagccattctcacatttaagttggggtcatctgatgtttgactaccatatctccaatacttagattagaacccaggatatataatgtttgatagaaacgtgttgaataaacagaggttgggacagtgtgatgttgtcaaggtacaaacatacacacaggttttaatgcttcaaagcatggaaaaccagtttgcattcattatattccagggacaaattttacttccagcctcctgaagtcacttttgggtaagggatatgggacaatgcattttccaatgtgacttcatagaccaagcttaattaggcagaaataactttctcaaacagtgtcaatccccctaacacttggctttacagctgtctgctgacatgacgctcacatggcaccttggtttgttacctgagacttgactgaattcgttttgatcctgaatgaaggacttcattccaggtatgaactttgtctccactatcttagatgatagactgtcaagtatttctatttctgccatttctgaaataccttttatcaaatatgttgacatggttggacagaggtttcatcagtcctgtgtcatcaagactgcttgcatgtggctcaactgcttgcaaaataacttttggaggactcactccagcaggtctagctgctctatctccatgtaagtaatatttgccatcacctggcatttcagattataagtgttatgtgactcccttggtgctgaaaggaggtttggaagcatctgtgtagatcctgttagtcatgtgtttctatggttatttataaatattatgaccagtcttattcaatatatgatgattacaaattattcattttaaattgccaggagctgttttctttcagaggtcatttagaagggttttcagattcagttcactctgacgaatgtaatttgccagactgagatattcatggagccaagattttggcaataagattgaaatttggaacacagcttaatttgaagaatgagaagagaatagataagtgcaaaaagaggaatctttggttgactatgtgtttgaagaaagtttttatttacaagcatgggaaaataactctaatgaaaaactcatcattgctttgtggatccagggaaagtctatt

SEQ ID NO: 35223 - DNA, 1206 bp, Bovine  19866881135126
  misc_feature (1)..(1): n is a, c, g, or t
ncatggcaataaaaaagcgctcatgacatgtactttagactcgtcatctagctccagttagattctcccctttagtccagctcccacctgcgggtttggtttcagtcctgctcctcagagttcacaaccatggtttctttcctggtcagcacagataattaaaataagacacctactcttttgcaacaaattgcataataagacatttcaagacaatggacagtatgcttttaccctgcatacactagaattttcattgtacaaaaacgcttgcttggacgttcttgccttttctttaataaatagcaaaattcaaaggtaagacatatttgcttttcttaatcagcatattcttaaccctttcctatttgtagctttacacaggaaccattcagagttgttttactgcttaacatcaaagctaagactatccagggagcaaagactatttattttcatagtttctatatttagagtcttggctttgtttatagttttctctcctccaccccacaaacacttgaaaattcccttttctcttttaatcctgtatcttccctctgtctctctcactggccagctttttaccaagctgtgcatttcctttttgaattctcttccagatgattcttgcctttcctctttgatttctctctggagaggacagaagttgccttttggaactgaagaagtgttccaaggacacaaattctactgttgtttgtctctctgggagaaggaacacattccaaagtgcaatttgagctcccaagaaagaatacttttcaccccccaaatcagtggatatgtttaatggctcatttaaaaagtgaacatcagttttattttaaagcaggttaggatgtggggacaaaattttgcttgttactgccttgattaatgtaacaacataatactaaatgacagaggtgcgtgcttaacagttcaaataataactaatgattaccttgggaaaaggcacgatgtgggcagtgcagaccaaaaagaacaccaggaaacagtataaactgaatctttattatgcaaagggtcttcctctgatgcatatctcttacatctaattttcactactgagtaaagtacaaggtcaacatcacagtcttaaaatgtcaaattcatagtaattaattattcaagccttgaaaatcagattggcttaattatctctaccacgtgtaggccttc

SEQ ID NO: 35224 - DNA, 763 bp, Bovine  19866881229416
  misc_feature (1)..(1): n is a, c, g, or t
ntcatttctcccctgttttgtaagtgggttgtaggatatgtaagcccatagcagtggcaacagtgttaagtcgctcagtcgcgtctgactctgtgggatcctgcaaactgcagcccgccaggctccgctgtccatgggattctccaggcaggaacaccgcagtggattgccattcctttctccagaggatcgtcctaacccagggaccgaactcaggtttcctgaactgcaggcgaattctttaccatctgagccaccagggaagatctacttaagcccatacacctacattaatattagttttatttctgtcctttgattccaaggctttcaagctctaattttacacttttaaggacaactttctttgaatacaagacactctgccctgcctctttttctattaatcaaacaattcataagccaagctctcttatgccccagctattttatatgctacttaaataatcttacgcagaaatgtctctaccttagatcaaatgagtccggaagtaataacaatgtaagaaacaaggactgaccacagtttaaggcaacagcatcattttaaaataatttaacctaattttcaagttttaattaagtttagaatatggttaattctctcaagggtggcaataaaacaacatgattttgtgattatactggggagggatgtagcaaaatcttcatgaaagctcaagaaatatacaacagatggccagaaatttcaatcatataacctgctattgaatgccttaaa

SEQ ID NO: 35225 - DNA, 1706 bp, Bovine  19866881292602
  misc_feature (1)..(1): n is a, c, g, or t
natgtgtcacacacaattttagttgctgtagacatttactaattcttccccatttaacagaggacggaatcaagtcttagagattaacttgttcaaggtcctcaggtagtcaatttacgactgtatgatgtatatgattggaatgctgactctattatttctatgctgcattagaaccagaaatacaggggaacataagaaattcacaaaataaaactgggcttctaggtatctaagagcatcagttacagcaagggttttccaataattggaggcaattctaaatttgattctcttctgctcagttctgtgctctaaactgtcttcctgtttccttcactgaggttttcataaagcaaggacctcatggttatgcattccccactctttctttcctccaggtgtctgggtatttcttctgataagaaaggaaggaaaagatccagctgctatcaagaagagagcaaccaagagcaccctgtcagtgactgtaattaataatgcatcactgtacacttgaagggtgctgggtagatcccaagcattctccccacacccacagagttccctgtcagaggtctctgggtctgccaggatgaccaaggcatagagacttgtgtgtttgatagaatatatctcactgataattaacattagtactaattagaatactcataccctctgcttaagaaggaaagtgagttgtgtgccttcatctgttagggtccagcaattcattagactttgtcctttcaattattccagggtaacaagtaaccaaatggtcaagattcacttttccccactacctccttaagtgaacagagggagttggttattctcccactcctagatgaaaacttaggcagactccatggatttttcagctacactttccaagggcacccaatcagtacctcagatcataaaaatgtcatgttgatttcatgtcaaggcttcacctcccatggtacaaggccagtgacaaaactggaatcttggaggaaggaaaggttcgtaatgctctccttccctgagcagcttggtcaggtactgccttcttgcctttccatcacggttcctgacaactgagaaacagtgaagacttgggggaggcaggacagctcttccctcactgctatggtagtaagctgaaattaacttctgtaagctgcacatgttcaaaacacacaatccacatctgtctgtctctctcattctcactttctctttcctgcttttgtggattcttcagagatcccgattgtaggttaggtgctctagatgtagagtctgagacagggattcttgtgcacaagatttttgagagagagctctcaaaagaaacctctaaacaagatgagtaagatgagacagaagaaagaggttggtaaagagcttgttttagctgaagtttattatccgcctggtccctggagagctctggagcacggctctaatgccttgaggcaaagatgctgagtttttacactgttgtatttttcagtcaatggccatgggcagcctccagattgatgggagccataaaccacaaggcacttctgggcaaggaggctcctgtcagccagggcggtccttcagagaataagagcaactatgaattgctagcagctggcacccacagtcgcctgccgatgcatgcagctcctcaggtacagatgaggccagagcaccatcacatgcta

SEQ ID NO: 35226 - DNA, 941 bp, Bovine  19866881397681
  misc_feature (1)..(1): n is a, c, g, or t
ngaagcggctctatgctgttggccccacagcacccacaggggttcatgattctatctttctgctctgctggcttagcgtatggtttctgatttcaaggtcatctcactgcccaagatgtctgttgaggctctggacaccaaacctatatttaggaagaaaaaggcaagggagaaagaccctccctcatggataaagagatccatgtaaaaatactaacatgtacacagcaactctaagatatctcactagtcacagaaccacacctagctgcaagggaagctaggaaaacatttttttaaccctagaggacaatgttctgatttaaaatcaaaacaatcagaatagatgtttggacggaaaatccgcagtttctgccattcctataagaatccaatagtcctctttttaattttttctcaataactagtatgtgaacacagttcaaaaatttgaaagtataagaaggtttacacagtggagactttcacacccacccctggctccatctgccagtttccacctaccacacaacacttttattcattttttatatttacttccagtttcttcatgcaagtacatgcaaatgagattatccctgccttccctctaggagctatttcaaaatcagtacataatacatgtcttcatttcttccctttgaaatttttcttttacaacctcatagtattgcatggctggatcgaccagggttgatttgttcagtcctcattttcaaactttaacttagtttgagctgttatctttttctgttacaatggactacagtgcagtttttctacactgtgcataagtgaatctgcaagaaaaattatagaagctagacttccagcacaaagggcatatttgtaattttgatggatatcaccaagggggttctccatatgtttcattatgattcactcctactagcaacatg

SEQ ID NO: 35227 - DNA, 1765 bp, Bovine  19866881423431
  misc_feature (1)..(1): n is a, c, g, or t
ntaaaagtttccctgttacagtaatcacacacggggtggggcgggggaactgtccttctttgagggtctaaaatcaaatgcagctgaaacggaccgcgtgactataaacgaaagacagagtgaattccacatctgcttggctcttcctgtgtaacttggaaaagtcactccacgtaacataatagccatataatagaatagatccacttagtaagatgagagacgtacagaatatattcagccaatggctatattttccctacattgttttccccacccgagaccaggttatttctgatccagtcctgaattttagagtgaactttaatatgcacccaagtttttctcactttctggggcccgtcctctgagcccagagaccccaccaccagctgccctgttcctccacacaagtctgagtggcaggcccacaggacccctcctccaagtgcaattcaccagcatcttctatgtagagacccgaggttcaggtctacagaaccccttctttaaatgtctagttttgattagtccaacactttcccttttcttctcttagccttatgagtgctagttgtttcctgcaattttaagttgagaaatagttttttttttttttcttttctctctgctgcattaatcattctttgtactgatttctcactgacaacaaaactggcatgatttctgttccttgaatagacactgaccaataacccttttgtcacttggaagcatatttcaaatcttccctgttgaaaatttggtaaatttctcatccagggtaatgagacatgaattaacacttagcaaactttcatctgtattctaaaatgaaattgagagatattgcttatggcaatatagaaaaaaaatccaaagaggcatctagcaaagatgctatttttgcaaaatatatgcttggattctacaacaaaagtatctttgaaaattcaattattacttaaactgactgggaagttacagttcaacaacttcaaaaatggggaacatactttgaccctgaaacagaaacatcagtatccataaaacagtaaaagaaaactggacatgtttgtaatcctggcttttacattgtctacaaagttacttcaacccattgtgttttttacatcttcttgcttctcagagtcaaaagaaaccattcaaatatttcattttcattcaacagcatgcctttctcaaagggcagccccagtttaattgggaaggaattctgtcaaaggaaagttaaatgagctggattaagatgcaaggattatgatttctcatctgttttgatagcttttgtttatctgtaacatttcccagatagcggactaggagagctggctcagttttgtttagttttcttaatgagatgtcctggcttgcttttcttattacagtatgtgttaccatggctactatatttttgaagatttaaggtttttctcaagcagatacctttattgagctttccccccagattacataaataatgctacatatagaaaagtaaagatcatctgaaatctcaccactctgcctcactattaatttacatacttttatgtaaaatctatgataaaaacttttaaaataccactttataaaattatttgtcattatcttgtaaagctaaccatatgcatagcctggcaattcaagccttaggtatatacatgatgggggaaattcagcagacatagattgagatgattgtaatagactcccaaaggagagtaagcagcacaattgtgca

SEQ ID NO: 35228 - DNA, 787 bp, Bovine  19866881468711
  misc_feature (1)..(1): n is a, c, g, or t
ngaattaacttaaaacctagttggaatgtgaaataaagtcatgaacgggtctctcacgagttctcagacacttaaatttcttgtgatagatgcagaaatacttttaagccgttgcttgcagtactaataatactctttcatagtgtcaccatcaacgggtgtaagacataggggaccaatttagagagttttacaaatgagccggtaatgggcatggagacattggagattgtgccaaaggtaatttgcaaaagtcttacattttgcctccagtaagttgtacttagttttactaaatagtgcttcagttttctataattgtgtttcctctctctaatacttggggaagaaagataaagtcaagttaggtatattctgagatgaatcttgagaaaaaaatattgattggattattgagttgattggttaatacttttgaaagatatgatgtgttatagcagtcttttttactaaacacaaaatagcatttcattctctgtgttagtaatttgttacagaattagcaacaccagtgtactttgatctctttcagtccagaagagcccaacactgtagccactaatatgctataaagtgggtcctttgttgatgctgacttggaaactgtggtaaaaatcctgcccaaggctctaagaatttggttacaaatctataaaactatttcacatttatgtcacttccttttgaaatgataagtaactatctgcaactatttgcttataaatcagatatggttttacaaaatactagactaacagatattaaa

SEQ ID NO: 35229 - DNA, 2656 bp, Bovine  19866881543313
  misc_feature (1)..(1): n is a, c, g, or t
naagctgaagttgaatggttctgtgaagacctataagacctcctagaactaacaccaaagaaatgatgtccttttcatcataggggactggaatgaaaaagtaggaagtcaagatatcatacctgaattagttgttaattgtagttgctcaattctatttggaatcagtccttatcctcaaaatataggacccaaatttacaaaccattgcaaatttggatgaagtccttgaaataaatgttaccaaaaatcagctatcttttacagatcaatcctataaactcagtggaaaatattttgtttttaaaaagaaatagcatacacagaaattctattattcttttcagtgtcccttatatatgtaaagggcttcactggtgtctcagacggtaaagaatctgcctgcagtgcgggagacctggttcagtccctgggctgggaagatcccctggataaggaaatggaacccactccagcattcttgctggaaaatccacaagacagtggagcttggcagtggggtcataaagagtcagacacgagtgagtgacttcactgtctttcttttgtatatgtatatgattggcaaaatattttttttcttaaaaatagaatctgatattaggaaattactattaattttgttgggtgtgataatagtgttatgactatattttataaagtctttattagttacagatagtaaattatttatgagtaaaatgatacgatgtctagaattcactttaaagtacagcagaaataaaatttggggggttagaaggaagatgcatgaaacaaaagtggcaccacatcaatcaaagctgaatctaagttcatttttgctattctctctacctttgtgcaggctggaaaatttgcaaagtgaaagagagtatcatggctgaagctctttcttatttctaacacaaatggccttcagactagagttagtaggaaggtgtctagcaagaatgtgtgggcaagtgaatgtggtggggtggcatacgtgagggatggcactggcctgacccttcttacctttgtgacttggggctaaaatcatttaacaccagttttctgtttaaatgcaggtaataatagagcctactgcagatggtggctttaagattaaatgagataaataaaatgccagtgttcaatccttctttgcgtttaaagcatgggatcacagtttatagaagattggtacatggtaatgggaaaaagagtttttgtccctagggtagtttccaatgatggcactatgaggcagctatggttatacaaaagtgcatggttcctaataggaaaagaaagtgaggtaacaaatagtccaatggtagaaagttcaaatacatggtaatgaacaaagaccttggtaaaaggtaaaattggtaatatagggcttaatattatgaagataatcaacgagggttgaggagattgtatttaggttgtaaactctgaaataatagggcatagaagtaacgcacaatggttttcacaagaggatggggaaactggtatggaaatattaaataagctacacagagctgtaaaaattagtccataaagtaataatagcacaggaattgaattacacaaacagatttgctaaatgtcttataggaacaagagggagaattattaaataggacacttcctggaacagatggtagaagaagccatagatgattcaaataagctgagttgtcccaagctagtgactagaaatgaacccataaggagccttgctaggcctctaagaaacagcaactcctggatgacctcttgggaaaatcaattaatttttttcagaactaataagtgagttcagtgaaagctgcatacaacagaaatagacacagatcaattctcttcttctataccagtaagaattagttttaaaatataatatggacaaacatctcaacaaaatctataaaactacctaaagaaagaaggagagaaacatgcaagacatatgaagaaagctagaggattttgtatggttatgtcaattttcccaaattaatctataaatccaatgcaataggattcaaaatgcaaccaagttcttttacctagcattctaaaaatttattttaaaaagctgatgcttaagtcaagctaacagaattaaaaaaaaaaaaaaaaaaaaaacccagtgatgtaggtcttgcctgagtattaaatctgctataaagttacagtaaagcagggaggtatttgtataagaacaagcaaatagatggatggatcaaagtaaagactcaagaaatgaaactatatgtatgtggatatttatatatgttaaaggtggtatagttaacaagataaggtagatttaggttgcattaacaaataacaaacctcccaaaattggaggtttgactcagaaagctcctttctatgtcatgtaaaatccacttctgtctaagatactctggggaaactgaacattacgcaggctctacacaatccaggctgcttcattctcacaactctgccatctcaatgcaaggccttctccgtgattacagcagggaaagggaaaagaaaagggctgcaaggggcttcaggcttccttagtccagaagtagcacatccggttcagctcagattcgcggccagaattaattagactgcctca

SEQ ID NO: 35230 - DNA, 930 bp, Bovine  19866881661456
  misc_feature (1)..(1): n is a, c, g, or t
ntgttacaatattaaggtcaaagaactcatatcattcctgtttcttttttagtgagaatatcaccagaaaaaaatttaatttataaggagaccgacaaagttagcacacatccaaacacatccaaaaacatagagtgccaaatgaaagttgaatatcagctaaacaacaaaattgttttagcataagtatatctcaaatgttgtatgggatatacttacaataaaattttttgttgttgttatttctacagaggacacctcttgtttgataatcaaccaaattttcttactctggacataccagtgtcctttcctggcccttaggattcacagttgtcccatattcatattataccgcttctcccttaccatgtttaatggatcaaggggtttataagttagcattctagtctctagcaatcgcagactgaagctggaatataattcttggtggcagagccaggtgatgggaatccagggaggcttgtagccaagtgacctaccgagttgaagttgcccatctgcagtgagaaagcaataaagccaacattctgggagaaccaaagggggtgaataaagcaaaacacatccttggtacttttaaaaccctggaaccaagtttcataagccccaactgcatttatgttcttcctgaggtttggcagttcaacacttcctatgatttaatgagacactaaaaacctctctgactgcttgagctaattcaacttgtgtttgttctttccaataaaacatcatgagttataaaatttcaatgaaacattgtttaaggtgcttaagcaaaaattaattatctcagaaagactaaagaaatattaattgctcaccatttttagggacaaacttgaataatggagatgtgccatacccacattacccaactgtgtggccaagacccattatgcaggg

SEQ ID NO: 35231 - DNA, 1140 bp, Bovine  19866880734383
  misc_feature (1)..(1): n is a, c, g, or t
nagaaatattagtggatctggaaaaagcccagagaagagcaattaaaataatcaaaggggtgcagcaactgatgttttacaaaagactaaaaggataaagaacctcttcagtctggaaaaacagctaagaagagtcaatagcagcatcaacaacaatcacaatggctaaaatttactgagtgcttcctgtgtgtgagattattttataaacaatttgtaagtatcatcttgctcaatcctgacaacaatcttatcaggtaagtactattattattcccactttacagatgaggaaacagaggcacagtgaagttaagtaacttgtccaatctgccagtatttaaacccaacctgtttctgggggtgtggccctaaactcacctcttccataagcacaccgaaattacaactatttgtgtggcaactattgatgagaaagaccagaaggctaatagaaaagatcttctacaactaaagatataaagaaggagccccaacgagacaggtaggaggagcagagatgcagtatagtcaagaccataccactgggtgggcaacccacaaacaaggataattacaactgcaaaggaagaagcaatgagtctgagccccacatcaggctccccagcctgggggttctgcacctagaagataagctctcagaatgtttgtctttgaaggctagtaggcttacttttgggagagcaagaaggctgtgggaaatagagatccactctgaaagggtgcatgaaaaatctcacatactctggcacccagggcagaagcagtaatgtgcgagaagtccgggtcagatccacctgctgatcttggagcgcttcccacagaaggaagaggtaactggagatcacccgagggacacagaccctggcagcagccattttgggcagcttgttctaccacgtgaacagtggtgctatcaagtgccttttggagccctccatctagcttattccaaagaatagcaaggagagataagaaagccttcctcagcaattaatgcaaagaaatagaggaaaacaacagaatggggaaagactagagatctcttcaagaaaattagagatatcagatttcatgcaaagatgggcttgataaaggacagaaatggtatggacctaa

SEQ ID NO: 35232 - DNA, 1248 bp, Bovine  19866880996790
  misc_feature (1)..(1): n is a, c, g, or t
ngtttgcccttgctgccccatttctctcactggtgctctccatccccacaagctaaacccgttaataaaatgactgctccatcagtctgctctggtaccccaggtacacgggcctttcagcccagccaagagcatccccatctctagctgttcagtaagtgtttgggtgtgagaaatgctataaaaattcagctgcaaagaaaatttcagctaggccctggagttgtgacaggctcattttcagtctctgtcttgccttttccattcctttataattgttcatcttgcttgttagtggctccagctctgtcattacctcatttgaaagcttcatgaatttcctctttcctagcagtttctgacttatctgaaaccttacatacaaagtagtgaagggaagatagtccttgaatgtcacaaagtggatctgaatttccgggttcttaatattcaaggcagttttattttttacttccctaaaactgtagttatgagtgttataatttacctttcttcttcccaatgccaagtagatggtagagcgaaagaatctgagtcccctctgccattgatgacacttagagctcaagagccatctttcgcaaaacagcccatctatatatctcagcgatggtttaacaaaacatgaaagagttgcatgtaactatggctgattcttgttgatgtatgacagaaaaccacaaaattctgtaaagcaattatccttcaattaaaattgtttttaaaaatgaatgaccaataaggacttaaaaagagcttcagagttgtcagatatatcaactgtcttgataacagattgtattttcccctcttgttttttagcctccacgaacatctcatcctattgtgaggttctcctgtatagattgtgagccaatggtaatagacaaacttccctttgacaaatatgaacttgaaccttcacccttaactcagtacatcctggaacgaaagtcgcccgatacttgctggcaggtacttcccctttgttgttagccaaatgtctggaaccactcagagatctgggaattgtttaaagaactttcaaaggttaatctgggaatagttgggctgagtctattaataatgtttctcacaaatgctatcaagtaagcaacatggctaagcaaataacttcaggctgaagttagcctaccatacacattgccatttaaggaacctgatgaaacctacatatttggaggactcccctgaagcctatccagg

SEQ ID NO: 35233 - DNA, 1353 bp, Bovine  19866881266949
  misc_feature (1)..(1): n is a, c, g, or t
naccctcaaggagctgtgagtctataacatcatatctaacattcatgttatcagaatcccagaaagataggagaaaagggataggaatgaaaaagtacctaaagaaataatagcttaaaatttccataatttggcaaaagacagaaactacacactgaaaaatttcagtgaaccccgaataagataaactcaaattcacaccaggatgcagcatggtcaaacttctaaaaactaaagacaaagacagatcttgaaaacatcaaaaaagaaatgattcactaactattagggggaaaacaatttgaatgacagtgaatttttcagttaaaaaaactggggccagaaaatgctacacccaatgaaaacagctttcaggaattaagaggaaatcaagacattctcagatgaaggaaaactaagagaatttgtcatcagccaactcactctaaaaaaaaaaaaaaaagaggctgaagaaaatttcctaaatagaaaggaaacaataaaagaaagatctttaaaatatcaagaaaagtgaaagaacacaagcaaaaatatgattaaaaacagcagactgtcctcgtcattatgtttgatgattcaagcaaaaataacaacatcatttaatatgattctaaatatacatggagttctgtgtttggttctacatatgaggagctgggaagtcaccactctatcctaaaagtcagtaattcttcttggatcgatgagacagtggatgacacaagacaaaacactgctccaaagacggaagagactaacggattaatacagggagatatggctttctggagcagagacttacaagcagaaactgctatgggaaccagtactggctttgttaagctggaattataattgacaaattgctggacactcagtgcagacaactctgagtattacaaactctaaggggacccagtctaggagttatgcagtattatgcaatttacctccaggagttaatgctaagtatcagagaaaaatccccttggccctctggaaggaaccactctgaaatatacaaaaacactctttccttcttagtaaggcttgccctcagaagaaaccagttaaacagagcataccttttggtgtattatcagggcctaagtgacctaggaaaggaaaatacccaactccagcccactctagccatcctgtcccatgtaaggaggagtaggtggggaactgaggaacacttgtgaagttcacagtccaaggcatgggttcagtaaaagactgaaatctaatcttagaactgtagaatgcttcccctctcctcacactgtgtagtttagtcgctaagtcctatcgactctcgcgaccccaggc

SEQ ID NO: 35234 - DNA, 747 bp, Bovine  19866881319501
  misc_feature (1)..(1): n is a, c, g, or t
ncgttcttttctgagtagcagtgtactggagccaaaaaatttactttttcacggcaaaggggaaaaggggccccagcacttcactccccaacctgaatgggcaagatccgaagccactggcctcatgcaccataacaggccaccagacaaaaaggaaagaaaaaggtcacgacaaaggcagcagcaatcaacataactttccaacaaagcaacttctcctgcctgggctcccccagaaacagtgctccctccttcctctccctcccctcccacaagacaaaattaattcacatcacaagaacttggtgctctggttaagtggcaggtaaatgtaagaaagagtaaatctgtcaccttgtatacctgaactgagacataaagctaacagaacacaagacatcactgtgaaattaactttctaaacaggtccagtctacatagtgcggccaataaaaagtaaaatgaagaatttgttcacaatctgccttgtacagggtatttatagtctttcaatgctatataaataaatagcatttatatagcttaaacattcagagacatgcactgggactttttaggtagtacgaatttcttcacaatcacatgtgcaaattttacagatcactaagtgagtaactagtaagcttaggctggaccgtgtctcgtattatctaacaaatttaaggggggctcagaatcatccataggtagaaccaggcgtgttccccgaatgaccagttcatggtc

SEQ ID NO: 35235 - DNA, 827 bp, Bovine  19866881514066
  misc_feature (1)..(1): n is a, c, g, or t
nctttttttctttttgctatttatagtgtaataagaaatcttctgagcgaattcatctaaaagaactctttattttaacaggttacttttgatccagaagtatttttcaacatattacttcctcctatcatattttatgcaggatatagcctgaaaagagtaagtgcttttgtatttcatatgctttgaacacccttacactccacgggctttactatcgctgccgctcagaaatggccagctcacccctcgcttctccctctcctgatccttttgagatgctgaatttaatgcctgtacgaagtctctcttagttatttcttttaatggataatgcatttaatattagtatagtacactagaatatgaaaccttttcttttaaaaataattggtgaatattctaacacagtaaaacttttttcctatcagagacatttctttcgaaaccttgggtcaatcctagcatacgcttttcttggaactgcaatttcttgttttgtaattgggtgagtatttgaagcttaaaacacttttagccttcaaattataattttaaaataatgcatatttgacttctgcaatattgtattcttgaatgtgtctaaggacttttgtagtaaaatgtattcatataggtaataagttctttgaattttccttaaggctaaggcattacgatatttaaatgacatgcagtaaatgcgggtttagtcacaaagtactaatagtagacccgtcttattcttattgtattctaacttctttcgcagttgatgttttttctaaagtagacatatgtttattgaacagatcaataatgtatgg

SEQ ID NO: 35236 - DNA, 1411 bp, Bovine  19866881707460
  misc_feature (1)..(1): n is a, c, g, or t
nacatgtccaaatgaagctgcacatttcccctagaaatctgtcccctgcctcactcactggcccagcttatccacctagttgccaagtcactttaagttcctcttagtttttcatctcccttgctcccagtctgctcagtcaccaaattcttttacaagataatactttctaaaaaatctccctctctccctatctctgctgtcttagattaggccctgcattcttagtgcctgaataacctcagtggccttcttatctgaccttcccgaacctctgtagtctagaccagtcatgctaaaatagaaatctgatgtcaagcccctgcttataggctttctatggcttcatttgctttcaggataaagtctaaactcccttccccaacatgcaaggtctttcgtgattcagctcctgccagtctttcacacctcaactcttgacacttgatatcccagccatcctgaactatttatgattccctgaatgggctatgttttctcactcttccgtgactggatatgtactgctagtcctcatacctgggaaaccattttctctgactttgttacttgcttagatgacacctctggaaagactttcctaatgtcccactccctttgccaagtggactgagagctacttgaaggagggaccttgttttcatttgtgaaccctgtgggcctacttagcataatagtccattcacatatattaaaagaaagactgaccagttagagtggacggagacaggaaggtaaaatgccattaaagcagagttaaggaaagttccagatgtttgagttcaatttgcagttgaggtatatctatacactgaagcattatttgaccataaaaagaaataaagcactgatatatgctacaacatggataaaccctgaaaacattatgttaaggaaaagaagccagacatgaaaggtcacatattgtaggattccatttatatgaaatatctggaataggcagatttatctagagaaaaagtagattagtggctgtcaggggatggcagttggggtgggggaaatggagagtgactgctaataggtctagggtttctttttggagcaatgaaaatgttttggaattggaaagtagtgatcagtatacaactttgtgaatatactagaagccactgaattgtacagtttaaaaggataaactttgtggtacttgagttatatcacaataaagtcatttttaaacatttttgatcaatctaggtttatagtacttagaacattgtgaataactgaatatcaatatgatgatccaggtaaaattctaataatacattgatatagtgtcaaagtcagttcttctgtccatgttttcattttgaaacatattttaaaattaaaatctgaacctttagtattagaagaactcaat

SEQ ID NO: 35237 - DNA, 797 bp, Bovine  19866881778744
  misc_feature (1)..(1): n is a, c, g, or t
nataagaacccctgttgtactgtggcctttgaaatcctccttattttgaaatagtaaacaggataaattacaaagcagtagacgtttttttctttaaaggagtaatttagttaacattttgctgaacaatattgtaaagttaaataaaattaaaaacattttgctgaacaccaagactcatagatgaaaaattatttttgatctataaagcttttatggcaatatttacagaatctttggaaaggaaaaagaaagtctggcccccctcttaaccatcatcacagctttttttttttaacctagcattgtaatcagtgtactatattacttttgaattctacctttcccatctgctttgttctatgaattattcccagtagccacatagtcttcatacttaaaatttttcgtggccgtgtaacttacccatggtattttagatgctccaggtagttctgtgggcagaggggaaaagttgaattttgtttttagtggaaatttcatctgtcagctttttatcttgcaatcttgtacactacattttatcctgaagtaaaaaacattcttctaagctggctttgatcttttttttatgtggacagctatgtgaagacactgtgattaacacttccaattgctaatcatgagctatcctcttccttacgcttttccaaagtcattcaggttttttctttttaatcttatatgatacctacatgtgctggggaacaattactgattttagtgatgtttttgtcattttgctgtctataactgaattgctaatgatataccat

SEQ ID NO: 35238 - DNA, 3980 bp, Bovine  19866880226539
  misc_feature (1)..(1): n is a, c, g, or t
ngaaaagactctgatgctgggatggattgggggcaggaggagaaggggacgacagaggatgagatggctggatggcatcaccgactcgatggacatgagtttgagtgaactccaggagttggtgacagacagggaggcctggcgtgctgcaattcatggggtcgcaaagagtcagacacgactgagcgactgaactgaactgatagttgtgaaaatatacatgtatatatacatgtatgtaggtgtgttggtgggtagagagagacagagtcaaagttctctatttctgcatcatctgaaacctttatccatcatcctaagatatgggtcctaaaatacccagtataatataacatagctaggttagtaggtagataggcacttttcactttcttcatgcattggagaaggaaatggcaacccactccagtgttcttgcctggagaaccccagggacaggggagcctggtgggctgccgtctatggggtcacacagagttggacacgactgaagagacttggcagcagcagcaggcagttatggagaaatcactaggaactagaactcagtgaccaaagtgggtacacataaaaataactggattcagaacagacagtgcaagctgaaattacagtactttgttttgtcctatattttacgtaaagtctgctatgtttaaatatagaaccagggactttcctggtagtccagtggttaagactccatgctcccactgtagggggtatgggttcaatccctggtcaaggaactaaaatcccgcatgcagtgcagcatggccaaaaaacttataaataacaaaaagactatgttcggtcaaattttaaatagtcctattttctgtatgtctgagtagcatgtttttctttgaattctttcatccaaagtaaaaaattaaacaaacaaacaaaaaacataaatcaaacatttcggccctttcctggtcctcctaccatggcctgactctattcagaaagtctatatttttccccatgacatctgaagtacaatatagaaattcatccctttagtgaactgggcctttgcccaagatttttattttgcatttaacaaaataacagcaaatttcaggtattagaaggatcgaaacaacctctttctattctgttgtccttagaacaccatcttttattcatagcttctcttgtggtgctaggaggcagattctgttgctatagtaacgccctgcatatccttggggatagcttacagttttactttttttttgaacaacaaagagccattgatactacatgttgccaaaggttacaaaagttgaattctaaaatgaaaatatttcttctatagaagtggtacaccatatgcgtcccacaaattcaaagaaatatgtacggatatgacctttgtgtgaacactgatgaatctagtataatactgtttggcttcaatggattattcacagcagaagtagttgaagtgtatgccttgttttctaagactactgtgggggataaggggtttactcccagtatctgttaagatccaggagcaggaaagaaaaaaaaaaaaaaatcaaaggtaccatcacttacattttgttactttgtaatcaccttcccttgcccacccccactaaaatgaactgctatatcaaaatccaattacactttgacagtaaatagatccttaaagagtggttgtgactgaatccttgttcctcgggatagatattaaatatatgagagtctcaagagctctgaaatctgtattcctagcttcattttaacttgattctcttcatctgtgaaaaaataatattccttagctagctgtttttttaaaactaggaaaaagtatttcttttcaagtatcttttcaggataagttatctcatccccctagaagtctgaagggatgctctgagaaccactggtgaaaagttagaggctccaaggaatcacttcctggggaaacagctacaagagcttataaagggtctggaggtaggaatatggatttttcttcttaacaggagagacagctacagactgaaaaaatgcagataagatgcatatacaaatacatatacaaggaatgatgtcaatctcctccactcactacagcctgggcaaattctcctcctagcaaactaagcaaaccccacaattcaaggccatttattcactcatttatcaatatttatttactaagtacatgctacattccaagccactcaaaggcttttcaaatgttactaaatgcctgattgtactcttgaagagttaatctctaattcaataaagtcttttttggtacagtttttatagctaccatatggagaaatctattaaaaataacagattcacaaggtaatcagagctagcaacataagctcaaagacagtgtttctaaataccatctcccaccaaaaggaacaaggtttccttagagaaatgactgattccagaaatgattgggataggaaaaacacaaggtagactagaatatcttattcaagaaaggaaggaagtgcttaaacatcgatagagtcatatggaaacatactggggctagtttgaagaacctcccactggccacatcttggacaatttgatcaccgtgaaaaatgacagaaacaggtcataatgcagttgatgaaaaataactcaatgaatccatcatgaaactcagaagaaggagaaaatatggtagaggtggagaaggaagaggaggagggaaggggtggggagaagaaagctcagttttacagaacactatctgttataattgaattgtctcccacccaaagtccatatgctgaagccctaagtcccaatgtgactgtatttgaagacgggacctgtaggaaggtaattaaggttaaatgaggtcacaagggtagagctttgatcctacaggactagtgttctgtaggaagaggagaggaagacacaccaaagggttctctccctccacaagtcacacgggagaggccaggggggacaccttgagaagacagctgcctacaagtcagagggaggattcaccagaaaccaaccctgacgagactttggtcttggacttccagcttccagaaccatgagaaaatacatttccgttgtttaagccaccaagcggtggtagtttgttgtggtagcctgaggcaactaatatgccaactattgaatgtcaagaaaatgatagaaatagaaaatctctattttcaacccacagtgaaaaaatcataacagatgccaaaaccaaagggcaaaaaactattggttttaaaatatcaccacacaggttaactgtacaacaggggctttaggcatgataccaacttaaccaaatgaccaaacttagcatcaccaatagtgggacaatctgatatgaacctcttgatggatccactaagaattatagaccagctatccagtatccttgccatgaatatttaatctgtatctaataatgagaaaacaatcaaataaattccagaaagggatttatacagcatttggtgtcctattcattcaactttcctgtggtttggaattcctcaaaatacacagtttaaaaacaagaaatgtaaatgtataaaaggttaaacgttttatggcacatagctcaccctaactgctactgaccaggcacctaccaagaccaacctgtacaacttaatggttagagagcatggatgctggtccccatagacctaccttccaagcttgctgctcagaccttccacaagtaacaggatcaccaagccttagttttctgcggtaaaatgagaccaccacctaagtgataagcagttgagaagatgaaatgaggcagataaactatctggcacacaggagacagtgattattattacccagaaggatgagggtaggaattggaggctatttagtctccattacatactgcatactctgtggtaacctctctcacttaccaatcagttactaataacaag

SEQ ID NO: 35239 - DNA, 1811 bp, Bovine  19866880263751
  misc_feature (1)..(1): n is a, c, g, or t
ncatgccaggcttccctgtccatcaccaactcctggagcttgctcaaactcatgtccattgcatcggtgatgccatccaaccatctcatcctctgtcatccgcttctcctgccttcaatctttcccagcatcagggtcttttcaaatgagttagttctttgtatcaggtggccaaagtattggagcttcagctttagcatcagtccttccaatgaatgttcaggactgatttcttgtaggatttactagtttgatctccttgcagtccaagggactctcaagagtcttctccgacaccacagtttaatgttgcagacatcaaactggaataaaggaaacttcaaagctatgggaaggttaggggcgtaaagagagatgaacttagatgaacttttctttatactgtgtcaatcctaattactgtttgaccagttggatccaatgaaacatggaaatgagatcaagcatgtgcgtatgacacgtgtaaactagactacttcctccttctctcttgctttcctttgcacaacagggcagtctgaagacctgggttctgagctcatatctggtcctcatgaggttagcgatctcatgttgaaggctagtgtggcagagtgctgagaactagaattcagtggtgcttcactgcaggcgtcgggctaaacactttacatgcactcgtttttgtcctcacaacagttctgtgatgtaaatggtattatcccctttttacagatgagggaactaagctagtgagagttagggaacttggcacaggttacacagaagagaaatattctgaagctcagatgaaggaatgtgtaagacaaatgtttctaaaattgtaaaatgctctacaaattttaactatcaatactattatatcatcctcagcaaaaaaggtaaacattttttctttccaagtgctgtttccagagaggcttctacttattctgcattaatatagcaacttcttccatctccaaaaaatgtaagattagtattaatacctgcaggtgttccaatggccttactgtcacaatggcagaaagagttgttttggcagagatgatgacagatacaggcggaaaacaataggaaatctactctcctcgccactctgttaggatttaataaaatccactgtgttaataacagtgaattttattgtatgtgtgggaatcattgggctgataatggccctgcatcataatgggtctcttgggaaaggtcactcttggctctgtgactttactgtcttgtctcttttcagtcacacaggcagcacacacacgagctatttgtcaacttcacaggcactcagctgcaaacagcagcaaccctcagattatcttgatggttggtgtgtcctgagagataagacagctgcctcactcctgaatgactggtgactcctctagaggctgtggccctttctttcatacagaagttatcagagcacccaccaatcagttcagtgttcccttgtggttgtaactgctattaatacaattaaccttcttatgggaatatgataccagatagcagggaaaaagacgcacaacttcattcccacgttctgactaggactttgtggtttattacatcttttctcaacccagtgttactaatggtatttctatttgactcttctcagaagtcaaatcatcaagtgatgccctttgttaattctcacgatcctaacgtgttatgatcctcttttatttagttggggagactgaaggaattctcagcaggccaatttagaaagcaccagaaaaacccctggactggagagatctgattacatg

SEQ ID NO: 35240 - DNA, 1113 bp, Bovine  19866880408576
  misc_feature (1)..(1): n is a, c, g, or t
ntggaccctattaaacttctcttttggctagctattttggacactgctctggcagggagtgggaaggcaccaccttgctgctgctgtgtaaacgcagattgccacttggtgtcagttcactgggactgggaaagaaatccaggctccccgtgtataggttccacggtcaccgtgggaggggatgggattgtttttagttagtagggatgaaattcctggctcccaacttggccttctctgatatcatccctgcagaggtgaaagtcagctgcctattccatctttgcaggcatgggtagggttggggccacaggtttcctgtagctggagtagggcatttattgttgtagatgttgtaaatgtaaaaattgtaaaagttttctgtctccctaggctgtcctttttctggtcctctgagtaaagtaagcaggcttttgttgggactttaaaaaaaaaaaaaaaaacctgttcccatgatcatttccagtttccagctacttcagctccaagtctgagaaagatgaagcaaaaaagaaaacccactggactcagcaccgagtcattcctagtcccaaggagcccagctggtctgaattattctctccaccttgcagagtgctcttatgcttattttatatataattgccaagggttttagttgtacttggtgagaggaatggggaaaagtacatctactccatctcctcaaaagcaggaaaatccattttttaaacttcaaatacaaatttctcctttacagcaaaagctcctcataattgggtaacactgtaagaaaggatgacttaatttggagatctgcaataagtaaagcacttgaaaatcagtgcctgtaacagtgcctgataaaatcagtgcctaattctctttcaaaactgtcctgtgtctagacacctgattttttatttctaaccttgctttcagtctctaattaaattaaaacataagctatcaatatgacccaggctttaagataaaatcatatcacgctttgagaggcttgtctcaacttctcatcttatttttacgtatctctgaaagttcgcctcccaagtttacagcacacccaaatactcgaggcaaacgaccgaggtc

SEQ ID NO: 35241 - DNA, 1182 bp, Bovine  19866880493621
  misc_feature (1)..(1): n is a, c, g, or t
ntgcgattcatggggtcacaaagagtcagatgtgacttagcaactgaactgaacttgataccaaacacagtgatgtcattgagtgtttttgggtgtagcccgtgatgaagcaaagtaatttgtatgtttgtatgcaagttatatccagataaaatattaatctctaatctttgttcccatgattgctgaagttaagagtttagattagaaaaaaatattggttgggaaaggaggtcttttaaaatgtagagaaagatcaaacattttaattataatcttcatattataaatattattaataaaacttcagtcaatcaacaatggcatattttattgtaacattgaagtaaaaaagaaacatggggaagttgtagcatttcccactgttagtttacaaataacaatatttaagcacaaactattaaaccaacataattaaggctcttgtacttcaagagtcagttagcaataatattgaaagtatctaaattactaaatggtagaggaacatactcctgtgtagtctagctgcactaaaatagaaatgtctaaattaaagttagtgcagtgttttctaaagaacaaaccagccttctgcaattggtttgaataagatgtctgaagtgtgaatgtataaagttgactgtcatatgtgatggcccctctggagggttctcctctgctaggctcatgcttctctcctaagtatagcttcttgaaggcttgtgtgagagctgttgagtggaagagtaaatttcctaatatttctcctacttcagggagtgagttttaaaaaaaaggcgggaagcggtgcttcaaaacacattcttttttgccccaatttcttttttttttttgaagattcaaaggtggacgggtgaaagttggatccatccagtctagtagttcttgagcagttgcaaatttccttctgtagaaaaaaatggcggtcttatagttggttcagatgtacacctcaagataattgaaactttcaccaggggttttagactttctataagaaaaaacaacaataattggaaattgttcattgtgaatacattagatttgtacagacaaaacattcatgaagtgcaattatacgccagtgttgctatattagtatgaatgttaatagcatgtttgtttttgaaatgggttatgcattctgataaatgtctg

SEQ ID NO: 35242 - DNA, 3656 bp, Bovine  19866880531521
  misc_feature (1)..(1): n is a, c, g, or t
ngattccttacgattggaagatatcaagccggtcaaaaaaattccaccactttaaaaaaggaatcctacctgctatgaaggagcaggaggaaggggtggcagaaccagtttggagagtcttgccataagttacagtgttccagcatggacttacaaagggcagagcttaaagtatataaaaaaggggtggaaagatgggatgttaccgtagatgtgagtttttttttctcagttaatagggtgagtacatcaagaaaagtccactcaggtgcctttttttttttctgtcaaaagcacctgcatggtcataaccatatagagagatgggagtcagatgaaaaaatatgattttcattacaatatgaacctaccccaaataaattcgttaacacatgatcaagtgagataaacactgcaaaagtgatctgcaacctgttatatgcaatcataatgttagcggttttattattcaattagtagtaacacagttcttaaagattaaccagttaatgtccaccagccatatcttgagctttagcatatatgcatttatataaaatatgtaacttgtactattccttgtatatacttttcattctgttttatttatcaggtttcatctagacctaaagttgtttctttacaacccccaatatcatctttacatgaaccataaacatacactgaatttctaaggacatgggctatggcttcttcaatgggatttcttttagaatactcagtatttgaaaaatctttcaactacagaaatttatttcaagagagctgatgctgctacacatcctattatgagtcctccaatgacatatcccaaacaattcatctcaagaaggaaatctgctaagctgctccaaattctaagcaatgcatagggacttaaccacatttttctgtttacaatctgttttgtgccagggattctgggcccacaccatctgcaacttccattaaaacacaaccaaacaaaaacacacagctcttcactacattaaaaaacaaaacaaaactatagttggcttctctgggaggaaccactcccactcagccacttgatgtttatcaggatatacttactagttgagctctatgaaaagtaagagtggggaagttccctgtaaccaaaacaaaaaatgttacagatgcctaagtgatccttagcaaaacttttttctcctgtccactacatgtttaggagtttagcaggttacacaacccaccaaataaaagacaactagtatatattctcctcaaatatggtaatgtgatgtaccaaaaaaggaaagcattaactttatttttgtctgggtaataaattcacatggctcaaactctaaaaaaaatcaaaggtactcaattaaaagtttctctctcatgctatgccccagccacctagctcctcaccccagaggcaaccaacattggccatttcttaggcaaccttctagagagttaagaacaaggaagtgtgtgtgattcccttacctcctttacacaaccggtggcctaacttacgggcttcccaggtggtgcagtggtaaagaatctgcctgcaatgcaagactcaagttcaatccctgggtcaagaagattctctggagtaggaaatggcaactcactccaagtattcttgcctggagaatcccatggacagaggagcctggtgggctacagtccacaggggtcataaagagttgaacacaacttgagcacatatggcctaacttataccacttgtagttagactcttaggcacttctcccctctgtgctatggacaggaaataggcttcttcttgtgtgtcttttttgatagaacaatagtagcttcctcaagtgctgtgctttgaaggagtttgacgccagcaatcttggaaggacagtattttgtgattatttttatgtctgttacacccatctatttctcttctatgtcttattgtatcttctacatgcctctaatataagaattaccacactttatacttgggaagggtgtctgagggtaggtaccctgtcctttcatgtacataatgcacgatatgcctacccagcacaatgcacagcatataattagcattcaataaatatatactgaaagaatcctgcagcagaattcccaatgcttagggagaacaagagagcttttcatattcctgagtcagcttcttcccctccatgcaaagacagacttcactgaccctggaactgtagatttgtaatgaacgtgtatttgaaacacatgtgacagtgtttccctgtccctgttagaatttacagcaatgccatctgttacttgacctgcttgagaaaaaatactcaggaccccatcatgggcctgatcaactagtttccaatcactgccatctaaagagaaaatggttgtataagcatgtgatttctgaaaccaaagtggggtgaagagggaggtcaggtgatggtgggagaaaacttgaacgaaaacagtatgagtgaaaaagaaagtttatgattgtttaaaaaaaatccagtgagtgagaaaaattaacaaagaaagaaaatttcaattgaacgttactcattaagacacccctgctaatcattctcaaatctcttgtattgcttatatttccacccaagtactgccatctatagtacatggaggaattatggttttcttaaaggggccaaataactgaaatgaaagcatggcatattatataggcttacatttctgtaccctttaaacatatgcattcatcaaagttatatgctatattttctctttatcacatgtaaaaaaaagcaataatactcaatgggctggttattaacttttaaaaattaatgttgtaaagctacagcttatggactaagtcttcaaataacacgttatgtatctatgaacaacaaagaaaacataatttataatttgaactataattttaagaaatgttttaaatatgccccaatttccatttatttcattttgctgtgagatacaaactgggactctctaagaagtaaaaagaatctcttatttttggtgggattcctcttttctgaccagtaggttagcctagggatagacaggacataagaggaagaatataaaaagcaaacagactaactcagatttacagacaaaagcagaaaaacctaaatgaagatatcccagaccacagatggctttcatgctcccaagaggactttataccaatgtgttatgttattataacagaacttttaaggtaaataagcagacttcattaaaactattttttagagtaaaaagaaaaagaaaatgtgattttggagacagataaacatactagtgggcttccttggtggctcagtggtaaagaatctgcctgccagtgcaggagacacaggtttgatccctgggtcaggaagattccctgcagcaggaaatggcaattcactccagtattcttgcctggagaattccatggacagaggagcctggtgggctgcagtccatggcatggtgttgcagagtcaagacatgacttagcaactaaaacaaaaagccaataatattaagaagacaatgagaaattttctgctttgtttaaccaactattctcaactgggtataaaatttcatatttcctctcaaattacatcacattaaggttg

SEQ ID NO: 35243 - DNA, 1593 bp, Bovine  19866880643655
  misc_feature (1)..(1): n is a, c, g, or t
ntatgcggcatgtgtgatcctagttccctgaccacgaacccaagccccctgcattggaagcacagaatcttgaccactggcttaccagagaagtccctacttttattttttaaatgcttggtttcaccaatgttttagtattttattcttaagccaattttctgttttaaagcataaaagttcaaatatttaatatctttggagacctcctactatcctcgtttcaacaagcggtagaactgggggaacaaataattttttttttttttttagggcaatggcatctgcaatcagctgataaagaggacagaacaatcataatttatgattacaaaattgaagaaagtaattgctcatgttattaaaagctagactatgtacttgtcactcttggaggctgtggtgattagtgctcgggactgggtaagctgtgatctaaggctttatgattaagctgtgattcagcaccacagggataaaaacagctccacgaccaagagctggcaagcaccagttgagggagggggaaggaggattgcaaagagcttcttaattaaattttaattattgctaattagaactactgttttttatatccccaacaaggaagacaagagctgatcttgcctttttattattctgctaattagtttcccaaggagaggtttgaaagggcagactctgctttgacagtatccaagttgtcagctgaactcagaactgcaggtggatcttgtcctcaacttgaggtttaaaatttctaggtagctctttttctgaatcttggattttattctggatacctcaggaaatgagctaaccccatccactaggtgaagaaattcatgaattagttttcctttagcttatcctatctaccttatcttcacacaagtcccaagatttctgcttaatgactaaaatatgtgtctgactctttgcgacccgatggactgtagcctgccaggctcctctgtctatggaattctccaggcaagaatactggagtgggttgtcattcccttttccaggggatcttcctgacccaaggatcaaacccaggtctcctgcattgcaggcagattctttaccatctgagccaccagggaagccctcttatagacagtgaatcctctacatactattaatgtcctcatgtaaactttatgcttttcgtgaactgctaaatgttagagatgatctctactgggtttgaagaataagcaaaagtacacataaaaggtgactgctagttttctgtagccatggacttggtgctttgcaataggtaacaacaacaacaaaacccaagtccctgccctcaagagctcccaagttctattaaataccatttaagatgaaatgctccaggtaacccccccttgagattgcaaaagagaaaccctaattgcaagcttgatataatcccagaaggttcccaagatccattagcattataaaccctctgcaaaacatgaatcttattttataagtgcatacatttcacaagtcttctcccaagataataaagagttctgagttagtacaactccctgtgttaattacaataaaatccatcaaagaaattacatt

SEQ ID NO: 35244 - DNA, 1054 bp, Bovine  19866880708897
  misc_feature (1)..(1): n is a, c, g, or t
ntctctgatgacctttctttgcatttcaagacgtgcctttctttgctttatgtacatcagctatgcaaataggacatgattggttttacttatgggaaccaacataattggccaaatgaccagagttctgcttttacaattcatatgaaaagaaaccacaaagtacattttttccattctgtttagagatgtagattattgacatagatgtggatttttcactgtgttcatctgtgttaaaaaaaaatattgaaacagtacccaaaaatcttgcccacaaaaaggccacaaaaaattgctgcatttctcagtttataatattcactaaaaaattgaattcttcaaactcagcacttctactacagtacatcaaggaatgcagaatactctttacataataaaaagagaaatatacctgaggaaagaggcagcaatgcaaaggtggaagggtccctggggcactagcaaaagatgtttacatttggagaaagttcatctttttcttgtcataaaaaacaaattaagattttgcatgaaatgttttgactttccctttagtgcaaaaccatttttccttgaataatatacctaatagacatgaagaactgctatcaagccttttctcctccagttacagcagcaagaaaattatcttacatcagttgctgacaactagtatccctctcgggggcacataatgagagaactgtcaggcaggatgagtgtccagtacagaaatatttaattaatgagctttcatcatgcctccaggtaattcttcacagaactaaggatacagacagaacactctctgagcagtccaaggaattataaaaaaaaaaaaattgctgttgagagaatttctgttttcatttttttgaaagccaagttaacctataaaattctatggacctatttttcatctgcttaaactttttgtatttcagaaatattacataacttttttatcatggtaaaatatgcacaacattaaatttagcattttaagtgtataactcagtgacacgacatttatattactgcacagccaccg

SEQ ID NO: 35245 - DNA, 1725 bp, Bovine  19866880710308
  misc_feature (1)..(1): n is a, c, g, or t
natagctttcacttgaatctattcccaaattaatatttttatctttggtgtttctacactttaaggccactttgtgcaatttaaaaagtattggcctctcttcccctagtcaccttcaaaattaacttctaaaacctcaggaacagtacggagatcgaagccctcagtatggcagcacaattggctgtagtatgtgttagggtacaactgaatcaggtattcctggtggtcttatgcactttaatttctgttatattgagacttaagaggatgaagaagagatctacttaataacacttagggcaggaatatctgcatttttccgtttgttttctcactgttttacctctgcagacatcttcctgtgcagatcactacttcaaagatgccaaatgttaattaaaatattgacttctgaaattcattatcagcaaagttatgaatgttgttctgtttctaattaaccttagcaagtgtacataatgtcataatctgatagtatttgacagtacttatgtatacgatgtttcataagcatttttaataagatttgtatttttaaatttagtatataataaaaagatgtgtttgagtgtcaaaaaaaatttaatttcacatgcttcttttttcaccttcaaatatgacagctagagaatttaaatttacatatataaattttatttccattgaacaatattaatctagaggatgtaagtgtttaattatctttaaaatccttctagatggaccattctgtgaattgagaagagcatgtaaacaatgtgtcaagatataaggtaggataaagacggagcatatcatcttggggttggtgcaaaagtaatccttgggttaagttataggaataggaacagtgtaactttgcatagttgcatgaaactacctgaggaaaaatataagtgtgaaaaattgttgtttctgtgaaaaatcagttcagtgctttaaagccaagtgttaaagcatgatatcaagatatggctagaagttttggagggaaccgtaaaaatctacaaggattctgtacttagtttgctttacagtgttatcaagagctatgaaaaacctagaatctgtaaataatacattatgaggtagtttatgcaggaaagaatggagaattctaactgtttttatatcaaaagataatttatctaagtagatctatatgtctgtttctgtgcaataccatgccattttgattattgaaaccttgtagtttagtctgaagtctggatgagtaatgcctccagctttattctttttcctcaggatttctttgacaattttgggtcttttatgattccatataaattttagaattatttgttctaattttgtgaaaaaatgtcatggataatttgatagggattacattaaatctgtagatttcttagggtggtatggccattttaacaatgttaaaacttccaatccaatggtgtaggatagctttccattttttgaatcatcttcagttttctttatcaatgttttatagtttttagcatacaggtcttcatctccttggttaagtttattcctaggattttttttttttttttttagcattttctttgtgatatttcatggttagtgtaaggaaatgcaacagattcctgtatgctaattttttattctgctaccttgctgaggagacttagggttctctagatagagattgggcttcccaggggcagtaccgaa

SEQ ID NO: 35246 - DNA, 1788 bp, Bovine  19866880740158
  misc_feature (1)..(1): n is a, c, g, or t
nctatataaatacagagtattagtacaaccagtttctttttggtggtgtggtttatcttttcaataatattttaccaaagaaatctacaaaaatctaggcttattctgaaaatcaatgaaaaagataaagtgcagtactccttaacattttctggttatttatttaaaaattgctgcaagaaatgctctggtgcaaacatctataaaatttgcatatgatattaagagttcatagagttccccaaagcttatccatgtggactccaggtcaagtgactcttaacataatgtttttcttttttatcctctccattgttacataaagatgagtggaaaaaaaaataacacttaaatagtaataagtaataaataaaatctatcaaataaaagcctgcaaaagttctttggtggcttaaaaaaacgcatttaaggaatacattcccttgagtaactttaccagtaaccgttgcaacatcagtacagaaagcttgttgattaagactgcttgtttccgagtcgatgtgtagtgtggttagactagccacctcttgctcttcagcactctgataatggccagaacctgaatccatgtcagcagaggatgcattcccagtatccgctccaaaaccaaaatctacaggaagacgacatgctagtgaacagacattctgattacataacaaaaatatttacgagacagacagagctactttatcaaaataattaaatatgaacatcccccctaaatctacttcatatttacataccgttcaggcaagtataaacaatgttaacactttgaagtttataattagaaacaaatttttaaagatcttcagagcctattattaacaaaaataatgataaaaggacagaaacacaatcatcactattcttatgcatgttttcttgtagatggaaatacagctaactgcttttcaagttttagaatctctagaacagtgatatgtatcataaaaatggcacatatgtggtaaaagtaatttttctcttaaaactcatttccagtccaagattaaagtagtatataatccatgagggcaagaaatataattctccaatgaatctcccagctcttcataaacttagttcccaagattttgactctcttcttttaaatgttggtatccttcactgactgccaagtagaatacagaattatagcagaaaagctatatggtagtaatacagcaccaagtaacatcactgatgtcactttaacatgaaatgattattcaagtaaagttctgggtaatgtaacattgaatgtaactgtactgaacatactgaagccttgcccctaactagatgttaagtgttagtcactcagtcgtgtctgactttttgcgatcccagggactagagcccacctggctcttctgtccatgggattctccaggcaaaaatactagagtgggtggccattcccttctccagatctcaacccagcaattgaacccgggtctcctgcattgcagacagatttttttactgtctgagacaccagagaagccccatgactagacagtggtccccccaaatgaccgcatgaaatagtccctctcataagcatgactgtcccttattctaacaccaagtccatcctaatttttctgtcttctatgtttctggtcttaagataccatttgttttatgaaagaaaagtttttttttttttttaatgtctttagttggcaaaacaaagtagtttcaacttgaagtattccccaaaaatccttacagtttcacgaaaataaatcaaaatac

SEQ ID NO: 35247 - DNA, 1741 bp, Bovine  19866880902212
  misc_feature (1)..(1): n is a, c, g, or t
nattttaaatttgcagctaaaaaaataattcctactataaaattcttaatttttatagaaaaattatgtaatctttattctttgttgagtccttttagaacattttgtgggaagaaactggagtgcatggtgaatataatctcttggcagaggttcttatgacctattatgggacacaaaccaaaaatacttcgcgtttgtcaagatgcacaaatatgcattacttatctgctacagtattacaatatatcataaagtttctgcggaaatgctttgtttttcatttagaagaatttgtaagtaaagtgtatgaagaagaaagctaacatttttttaaagtattctcttcaacttaatgataaagagttgtttcaactttaggagatagtttatatttgacatgtattgggagtttcagtgtatatcttcaggaatatagtgcaattttagtatatcacaaactgctcttgatttgaatttagtataaggtggctccttttggatctcatacaaagaaagtgatatcagtgaaatagcagaggtaccagcctctcttcatccctcacatagatccacaagaatattttgaattactgtcccccattttataaatgagaaaacttacttctcagagtctagagtaagaaaaccttaagtttttagatcttgcaccatttcagtaaatatatctgtgatcttggacaagtaactgttttctctggatctaaatcttctcattttcatcagttatagttctgttacttttaatctatgcattacaagtctaatgagtaccaatatcagactttttgactttgtccctttttcatggtatttttctgaacatgtcttttagtaaaatgccaagatgtttttgtagacatgacattttatcagtagtaaatgttttaatttgtatatatctctacaattaaatagtatttcatattgtaattttcaattttgtacatatttttgaaaatttatcatatacttatcacttcaggcactaaaaacaatgtaatgacatagaacactaagcctgcttctcaaacttgagaagtggtttcctctctttaggactcagtttgttcagtaggagagttaaataatctataatgtccattttgactctcaaatctgtaatttttaaaagaaatgtaagaagctgtaggtgcagtttttagggttccatggttacctaatggagtgggccagtgtttggcagaggagattggttcctagtaaattaatgctgtttgtgtcaaacatgaaaaagtagaatttttttagcagtgtattaattttatttgatagggtgaatagattttgcagggtaggggtaaatagattttaatagtgtaataaaataaagtaaaatacctcagtagaacagataactagtttcctgacaaagagaactttaggaagagaatagagatttccaagtgtagtaagtggtcaaataagcaaaatttgaagaaaaggtgatgtttcttgcctggtaagaaggaaacagaggaattatgagaccctatggagtttctgtagtgggatactaagatgagcttttttgtgttaagatctacttttttctgcctgaaactttattaagaaaaattgaatagcaagtttgaattgcttgatttattggcacagctctatctttaattgcacttccaaatgtttcatcacctcactgtttgttctatgcatgttaacattttaaaatgtattctgg

SEQ ID NO: 35248 - DNA, 893 bp, Bovine  19866880954008
  misc_feature (1)..(1): n is a, c, g, or t
naatctcaacttgaatgagaaaagacaactaacagatattaatacgaacatcaccaatgttggagttctctggaaaggatttaaaaccaacctgaaaaaaaaaagaaagaaagaaagcctcagcaaggaaattgatgatacaaagaaaaactaaatgtaaattttagaattgaaaaatgcgatagataaaatctatcgaagcttgctgatgggctcagtatcatatctgagatgagagcagaccaatcggttgagcctgatgtaaaatgagaagaatgggccagtttgaacaacagagacatgagcaggctggaggggacagacaggaacaggatcttggagctatatgttgtgatagcaagagatttagcacatgtccctagggtctgaccgaaagcgtcaggattttaaaagtagccagagaaacatagctgaaaattactcaaacttggtagtgggccctaagttacagattcaagaagctgagccaataccagaaagaagaaatccaaagaaactcacatcatcacgtcataatcaaacacttgaaatttaaacagcgaaggaaaaatagaatacagtgaataaggaagagcaccttacttacaagcattagtgcaatttaaattaaagcagctttttgtgagaaattatggaagccagaaggaagtggacaatgtttttcaagtggtttaagaaaaaaaagaactgtaacccagaattccacatcacacaaaagtattctacaggaatgaagactaaatccaggccctctcagatgaagaaaagctaagagatttttcaatagcagacttatcttcaaaggtggataaaggaagctcaccaaagagaaagcaaataatagaagaaatctagaaacatcaagaataaaa

SEQ ID NO: 35249 - DNA, 679 bp, Bovine  19866880988219
  misc_feature (1)..(1): n is a, c, g, or t
nctttctctgcaattaccgctggcatgagcctgggagaaaaccagttatgacctacctgcaaaatggggctccgggaaagccctgggacccacctcttgacccgcctttatctttcagcaaaaggagaaaagtgagtcctttccagggcttgttcagggctccatggtcctggactcaggcaggatgcatcccctgaagtgtaatgcattttaaaatactctttctgggaaatgaaaacatgattttgaagtagtctgtagtattgaaatgtaacactcttcttctgtgagaagcaagactagctttaggctcactggtgcagaagagtcctcaaggcaaagaggctcagaaacagcaggaatgggatcgtcagaaaggtatcgctcatcctacaaaaattggctctaattaaaaaatacgtcacattagcaagagtagctcagttggtaatgtggcagtgggagcaagctgtaaaaaggctccacagaaatatctgctctacagttttataatatgttgtttagagttatgatgaaagggattggatattgatggccagcggcttccaacacttctggccattctctgctcctttcactcccttctctgaagaataagaaccttagaaaaatttctcttccgttctccttttcatcctctgtcgactactgactgcaa

SEQ ID NO: 35250 - DNA, 826 bp, Bovine  19866880994274
  misc_feature (1)..(1): n is a, c, g, or t
naaggtgtgtttaatctgttgtggtgttggtttcagccccagtttcagactgagaacgatgatacttgggaaaaaattgggagtctgcctgcgggcaacattcaccccctgatgcagagattgctacagaaatctaaccgttggaagttttcaacatacaaaatcaggatttattaaaggaattaatatctctgaaggctcacaaagcaattctgttttcctgcaagatggatgaaaggcagagatttcaaaacatttgctagaaaacatcaatagccaatcctgctgatttaattttttcaatccctcaggcatcaaaagaagttgtgacttgtccacatttgcctcggaagcaaagcaatattgtaaattaaagatggctggagcttagctggctgcatttcatttttaattagttggcgcttcacaatatttttcaatgtttcttaagctcagaagctaaggaacttcctcctcacatttgttgggatgagagtgtggaacatacaggtgatattcacttacaacacccacgagaaaattctcagacttagctgtccatcccaaacatgaaaagaattggtatttagtcagatccattcctcctctttattcttgagcaagcagagatttctgattccttttaaccagttgggaacgcagacataacctccccagagatcagtgctggaaattaaagcaaattctgacaaactgtagcaaaagcaacagattttgctttgggcattttgttgaagtgtgggctaatttgtaggatggagatgtggaatggtgttttccctagataataaaaataaaaagtcat

SEQ ID NO: 35251 - DNA, 5357 bp, Bovine  19866881006194
  misc_feature (1)..(1): n is a, c, g, or t
ngtggatctgtgggctgcatgcaaacaggaggtgaagattatgacagagttgtgggtggcccagtttggccttgaaatagtgtcccagcttagagccaaacagcccggactgggagagcggttctcacatccttgctctctctttcttattcattgatcctaggaaacctgtcaggacattggttgactcactgtgatatcagaaaagtgaccatcactaaacaaacaaatgactacagccctcaacaagtaataaagcaacctttggaaaaggggaaatgccaattcctagagttactgcattatgaaactgaaatgtttggtttacaacacaaaattacaaagcatacaaagaaaagtacagctcattaaagggaaaaaaatttgactgacatctctgaggaagctcaaactttgaactcactgaacaaaaactttacaaatcaacttaaatacgctcaaaaactaaaggaaaccatagacaaagaactaaagaaaaccaaagaaatgaagtatgaatgaaatgagaatatcaattgaaaaattacaaaaggaaacaagttctggagatgtaaagtacagtagctgaaatgaaaaaattcactaaataggctcaacagcagatgttagcaggcaacagagagattcagtgaactcaaaaatagaacaactgagattatcaagtgtgatgagaaagaagagaattgcaaatccagagctaggcctatacatctagggatgactgaattttttgacaagggtaacaagaccattcaatggggaaaaatatctttccaacaaatgatgctgagacaacaagatatccatttgctaaaaaatgaatttggttcatttttaattcatttgctaaaaaatgaaaatgaaatttaaaaattcatattatatataaaaagtaactcaaaatggatcgattagctaaacataacagtaaaaatcataaagttctcagaaaaaacatgggggtaagctgtcatgacctagaatttagtaatggattcttagatatgacatcattaaaactgaaaccttttatgcatcaaaggacattacttaaaaagtaaaaggacaatctattgaatgaagggaaatattatgtatctgagaagagtctagtatccagaatatatttttaaaaaactcttacaagtcaacaacaaaaagacaaaaccccaattaaatgggcaaaagattagaagaaattttctccaaagaagaggtataaatggcaaacaagtacgtaaaaagttgctcaatattagtttatatcattcattggtggtgggtggtgatttagtcactaactcatgtccgactcttgcaaccccatggactgtagcctgccaggctcctctgtccacagaatttccctggcaagaatactggagtgggttaccatttccttctgtaggagatctttctgacccagggactgaactgacatctcgcatcagcaggtggattctttacctccgagccacctgggaaatcacttctttatatacacttcccaaattttgttcagttgtttcttttttaaaattggattattataattaggtttatttttaaaaagtaaagagatatatttttcatcttattatttgtagttgggaaaacaatccagaacacagaaatatagagcatattcttaaaataggatatttaacttattacattcattataattactgatatctgattcattgtaattactgataattttgcatcttaatttttttaaaccatgctttactatgttttctttttcctaccttttgtttaattcatttagcttgattataaagttatgtattctatttctttttttttttttttttttgggatttgttcaataccttatttttgaaagcttttattctttttctgagctgttctaggttccaagattgaaagaaagttacagagatttctcacataccctgtgtccccacacacatcacacccttccatctgtcattatttttgtcctaaattttacttctgtgcatgtttgtgttgtgcattaaagtataaggacatgtttagtatcatacagagtatttatttttttgttgcctaaaatatactccatactctgcttattgatgccttcccttccctgaactcctggaaaccagtcatctttttactgtgtccatagttatgtctttttcagaatgtctgtagttggaataatgtactatgcagccttttcagactggcttctttcactgagtaatatgcatttctttattcaacatatttattagttacgtggatttttatgtaccagatactgaaatacaaggtagagtacattagatatatttcctgctctcatagaattgaggagagagatattctaaacaatacaaatataaatatataattataaattatataatttataatgtccaggacattcaatctattaaacgtacaggacactatgaggttcataagtaagaagacttatattgaagcataaggaaagctctctttaaggaaactacattttagctgacacctaaagaatgaggaagagtttgattgactagggaggaaggtgttctagggaggggagaatatgcatgaaaaccctaaggtaagagggaaggcctgtgtggctaaagcacagagaactggggagagcggccggagatgaggttggagaggcagacaggagccaaatcatgttgagctatattgattgtggtaatgatttttaaagtatatatttaggttgataagaattttatggagaagaatggttaatgctacttttgtatttaggtgttagatcattagatcacattacatatagattaggttcccaggtgggctagtaattaagaacccgcctgccaatgcaggagacataagagacgcgggtttgatccctggattgggaagatcccctggaggaggacatggcaacccactctagtatccttgcctggagaatcccatggacagaggagcctggtgggctatacagtccatggggtcacagagtcggacacaactgaagtaacttagcatgcatagattgggttggagagggacaagaatggattcagtgagactagtcaggaagttactgctttagtacagaagagatgtcatgggactttgcactagagtagtgacagctgacatgaagtgggaagactcatgtgtatttttgaagtagatgcgaggtttcttggttgtaagcaatagcaaagggctcgctgattgaacaaaggatgaaatttcctgaaagagttatgaagtttctgggaaggctgaataatcaacttaaaaagtggataggagagtgggcagctagaaacatagttgtgttcattcattctatagaactggggcctacaactgagcttcttggcttttgaagcaagagatgtgtgtgtttggaaattctccaggcactagaagtaaattcagccactggaacataaatttaacaaatgacagaccgaaggcggctaggtttctgaccccacgtgaatttttgtttctaactatcatcattagtgtttatcagagaacattaacttatttccagttataactgtgatgccttaaaatacattgatttctaatgtcacttgctgttgagcctcttaaaaaacaacactaaaccattaggcaaacattattagataacctggacccattagagcatggcatttgttgttctctttttgccagacattgtttttttggaagtactgatgcttaagttggttggatttcacccaaataacaattacaatgtgattatgcaaagtagtaactgtcttctaattataactctaaagctaaagaaatctattagcaaactagttataactagggaaaaaaagaaaattttggccccaaatattcctagacctaacagcagtttattagaatactccagattgttagtttgctgttgggaaaaaaattgaggcatacggccctgtttgttttgcagggttttaaaatatagtgatgtcagatatatcacttgctgggtaaaatgaagtcatcttctccttatagaatgcctctctgggaattgtatcatttaaaaagaacttcagaagcttgttaacctttaagttcaaagtcagggaaggacctgaactacaagcaatatcttatgtgtacatggaaaattgtgaactaatttggaccgtcattctcagtggtgttccccacattttcttctttgtctttcatgtcctgtgtatgactgatagaaaagtattttatgtctaacctggaatgaagtgagagataaggcaagattgctatcatcgtttctgaatcaccagacgcctagcagtttctggagcaaatgtttaatgtttaaatgtattaaaaacatttctggtcacaagctctgtaaccagtatgaaactactgaaaagaaggaatctgttacaggtctcgaagaatctcattgaacattgaatatgtccaattttaacaacatatcttgggagggcaatataaatgtacctacctatgttggagaaagactaatgctatataattgttaagaaccaaagcaatctctacaaagtagcttttaagaccagcttttccaggaaaccttttatccacttgcatcccttcctatcctttcagtaattcaggtcagcaaataactgttgttcctgttttcttgctgcagtctgtctgtttcttacacaacagccaaaatgatcttcccaaagcacaaattcagtaatgtggatagaggacagagacaggaagttgctaggaacccacataattgacatcaggacttaaagaaacacattgtgccatcaggacaccatcaagtcacatcttgccggggatttaaagtcaacaaataaatcaagattaagtagaaacaaagttattatttacaatgtctttgatcacctgtgagaccagcaccctccattaaagacttgagatcagaaaccgattgaaaaaaagacaattattctctcccttcctacacaaaattttattgaaccgaatggtgggacttctgtctgttgtgttattttttttaggttctctcttcctgccaaatgcttatagttgaatttctgtgatctaaatgcacatatgctacaactcgattctcataatagcctatgaaatgatgaaagttgttaataaggtgagtcaggaaccagtagttctaaaacagtggttctctttcctgtactgactctgataacattgactggcaatattttcttagtgataacttagaaaagtttgtcttttgtgatataagtttggctcagattatgtatgtgtaagagacaactttacacactttt

SEQ ID NO: 35252 - DNA, 1108 bp, Bovine  19866881051138
  misc_feature (1)..(1): n is a, c, g, or t
nctgataatctgaggatgtgcccatggagagacatatgtctctatcaaatgacagcagagtggaaaacaaaaaatgaggttagacagcagtgcccaggacggctagctgctgctccaatgagcctttcccctctctccctgggacagcccccttgtgtgggcgagctgctgcccagcggacagtggggggagtactggccacgtgaccaagttctggccaaggagaggttgaagacacttctgaaaaggctctcaggagggaggggggtgagcggtcatcacactccccggctcagctgccctccagtctgcaaggaggaccagcccccgccccgcacagcccccaagctggggcccttgccccattcctgcccgctcaccccatcatgccagaacatctggactcactgctcacactcaaggattacaagggccagacactaactgaacacacgtttcaggatctgactcttttctatggcacttggatttatctacgggtatgtggctcaacagtctgggtgggctacataattatggcaggatttgccttattgcatttgctgatgtttccttcacggcccatttatcgccgacaccccgtcaaggggttacctgttcaagactccggcacacaagacaagaaaccaggggaaaaagaaaattaagaggcatgctaaaaataattgataggggttttcacggttcagctttactacttcacctgcttgtttcatgtgaatgagctaaacagttttcttacctaaaatacgagctaaaaaccacctacgctcagctatatacagattctgttctccttgtgttttacttctcaattaggttttgatttataaaacttttagactttctttttttttggataagaatatttttattgtattattaaataccatcttttttccactgttacaaatttgtagatactacatgaatgatgatacataatttatattttatagtttgccgatatgatgtatttacacatgcagttagtaccaatgtcatgctaaatttccttaggagatgctcgttcaaaacaaaaaacgtgagcaaaatgtgagcagcttatctactgtaggaaaatatt

SEQ ID NO: 35253 - DNA, 727 bp, Bovine  19866881232622
  misc_feature (1)..(1): n is a, c, g, or t
nccaaccaggaggacacccagacacaagcttagcatgggataagagtctttacgtcttccggtgaaggcaaagccatttggttggcacttcgtaggaatatctttccaccaggtcgtcatcataaggtatgtgccacgagtctccagttgtttgcaccacggtgtcatagctgagaatatgctgttgaattaaaaagggaaccacacattgagaacaacactataggaatatctggccatttccctttcttttctgacgatttcttagtttgcttcagagatgtattctttgtcttactttaacaatggattttcaaagagcagccagctctgtgaagatgaatcctggtggtaggaacggtgggggttggagggtaaaacaggagttaggattaacagatacatattactacatataaaagagaagacttccttggtggtgcagtagataaagaatctgcttgccagtacagggaacatgggtttgattcctcatctgggaagattccacatgccaaggaacaactaagcccatgcacaacaactgcagagctgtgctctagagcccttgagccccaactactgaagcctgcacgctctagagcccaagagccaaactaatgagcccctgtgccccaactactgaagcctgtgcatctagagtactgtgctccacaacaagagtagcccccactctccacaattaagaaaaaacctgtgtgcagca

SEQ ID NO: 35254 - DNA, 1211 bp, Bovine  19866881242099
  misc_feature (1)..(1): n is a, c, g, or t
ncttcttgcctggaaaatcccaatgaccagtggagcctggtgggctactgtccatggggtcacaaagagtcggacatgactgagcaactcccccacttcacaggattgcctttgcaggtggtggacactttttcctggggcttatcggaaggactgactttatttccctagattgatgtatggttctaaaaacagagaaatggacataggaccttaaaaatcctttttagacatgttattcaatttaagccaatgaatatgcagtgagtacacagttgttttagatgctatggatgatagcaaatgtgaaagatgtgggttctcatagtcacaggagtttataatattctatccaccaaaacatacaaagaaaaaaatcaaggcaatagcaataacaaagagaaaaacacagtctagaatgtattcaagcagaaactacaggtacaaatttataaattttgtaaaaaatcagagaagaactgaaataaagggaaagtttgcatttgagttgcttaatttacttgatgagaaatataacttaagagaattaaaatttcactgttccagaattaagaattacagaaaaatctgtgagtaccattttgcctttttatagagatggtaaaaattgagtgtattttcaaatactaaattgcataatatgtcttgaggctaaacaagttgagtgtttttacgacaggctagaaagaaacccttcctctttccagggtcctctcattacacgtgcattcacaaaaagggaaataaaaactacctggcccataatatggacattatttataatctaatagccaaataattatttttctaccaaggacttcttgaatttcagcaacacactaagcacaaaactagaaggaaagcttcatgcagtggtattgattaggacttcccaaaacatttagctcatgtcacggttacttaaaatgtccacattgtcagctgcttaacatacatatgattaaaaaaaatggcattgtatcctgagctacatgctttcttgccccatttatttgtctaatctcttttctttttattgaagtatagttaattaacaatgttgtgttaattttagcccaatgatttagttatatgtgtgtgtgtatatacaaacctattctttttcagactcttttccttataggttattgagtatagttccctatgctctacagttggttatttatttt

SEQ ID NO: 35255 - DNA, 1860 bp, Bovine  19866881243848
  misc_feature (1)..(1): n is a, c, g, or t
ntctaattcataattctctcttttacccccgagttttcaggacaaattttctacatacaactaccttatttatgttaggggtactttggggaaaagaagaaagagggcagtgaccagagatggagagagaggacagcaaatgcacagacaggatcctacaagagagcaggctgcagaagaccacgtcctggagcacagatacctccaggaattcacagaaatactggagagaggcacagtggatttcccacttcacatggaatagggtctgaagacattttaagtagatattttttttaaaaaaggttgactgcaggaaggtgagtgaccttggaaacacattacatatatctatattatatgcataaatagccatttggaagggaatagaaaggcctcatatataattatgagcatgaactttgcagccagactaagtttgaatctcaaccccatataactatgtatctctgtgctagttcctaatgcctccaagactccattttcctctccgtaaataaaaagaaagtacctacctcatagggttgtcatgaggattaaatatggtacagttgttggcatatggtaattgctatgcaagggctttaagcaaaatcaatagatatatatcaaattgtgaacagtgactatttctagggaataggattacggggggtttacttacatttaatatttatttctgaattgtttaaattttctacaatgataatgtgttatttataaaatcatgaaaacatcattttaaaattcctgtttaggaaaagaagcaaagtatctgcgagaatcttcacagtacacatcaggaacacattgttttctacaacaaatggtagcataagctatttattgtcaagttttctgttaaaataaaatctctatattttaaaaaacttcaaatcgggacatgtgtccagctcaagattcaacttatccatcatcagaagacaagtgagactaatgaacacatttgtttggattctgcttctatttctagagtctattaccttcgtaggagtcattagtgtctgcttgtaagagataatatgcttgaatcatacaaatcttgtatttcataagcagaaactcagattcatacattattggtgaagaattaaaattattatagatatgtaatattcttcttaaaaatacattatgtagtcgacaaatagaattgcagataggactgtctttccatctggacacaatagcaacacatgtatcagatataaaatgctcacatgtgaggatacagtaagtcccctacatacaaacaagttccagtccaagagtgcattcataagtccaatttgttcgtaagtccaacaaagttagtccagatacccaactaacaccatcagctctatagtactgtactgtaataggtttataatacttttcacaaagataatatataagaaacaacacaaaaaataaaacatttttaatcttagagtagagtaccttgaaaagtatagtagtacagtataataactggcatccagggctggcatctagtgagcaggcaagaagagctactggctggaggagggagagggggtgggaggtgctatagctgaaggattatcagcaataggagatggagggcaagctgcaattccactcacacctgacgctgatgtgacacacatttgcatctttgaaagttcataacttgaaggctcatatgtagggaacttactgtatttacaaatcgccatatagctccaactacatttctgacttttttatacaggttaaacttggttcaaaggtatttgttacttttgccctatgtaaggatcatactcagagattcctaggatttaaagaaacaca

SEQ ID NO: 35256 - DNA, 1494 bp, Bovine  19866881310126
  misc_feature (1)..(1): n is a, c, g, or t
ngggagcctctggcactgttctctatattccctccatagttctttttcctgtcttggcacgtttccttgcacgtatttatgctcagactgacaggaaacctcctccagtcttctaggatcttactgggtatggctctttcatctttggaacttttgtcatgtggactcgagttaccttggtttccttggactgtcagctcattttcttagcttggtttccactggttctgcctagattcccttttccctcagcgtggcctgtaaactcttaagtcagtaaactggagctgtcaaaggtatacttcatttgtttgccatctgtcaggaatgactttccctatctgatgtctgtacctgcttgaaacatacaaaccaaagaacagaaaaacccctgaaacataaacaattttcagaacattggacatcaggtgctgataataagttctcctaaatgagtgagactgaaaattggattcatagtcattcaacttggcccctactttttaacacttttatatttagagaagaaatttatggtcagttgactattgattatatctgtgaaaaatatttaattgttctctaatctgaatatatcaatgttttcaaaaagaaagttggattaaaatatcttcaatcaggaaaatgagaaactagtgttcattagatataaaaagtaatgtataaagacagaaacaagtattgtttatgttcattaagtaaataacttgaaagcagtttagattaacatggaacagctatgcctggaaatctgaaaatgtataggaatcactgtgaactgtgaactgtaaactgcatataaaaataaactaagttgatatttgaatatgtttttaggattcgatatgcaaagttagtaagtaatcctatatacatgtcattagactttttattgttcttttttttaaattttattttatttttaaactttacaatattgtattagttttgccaaatattgaaatgaatccgccacaggtatacctgtgttccccatcctgcaccctcttccctcctccctccccataccaaactctttatattctttagtttgactcttgaactattttatctttgtatatttacaaagaagtgatatactgagtagattatttacataaacaatgttactgattaatttgcttagtaaaccaaactgttgcataatataccaattttttttttgtatttttgcattaacacttcttttattaaggattttattccatccaaagaattttgcatggcttataggactgaataaaatgtagactagaacaattagtgataaacagctgaatagccattacttaaaggtaacatcatcaggttccagagatgagctggttatagctgtaaggcattgaacttgattcttagatttcctggcagccaaagtaaaaagagaagcatgttgagttacaagtttacagtgtcttagaaaagaaagcatacttttttttttagttaaaa

SEQ ID NO: 35257 - DNA, 1686 bp, Bovine  19866881442583
  misc_feature (1)..(1): n is a, c, g, or t
nccacatcatggggcacaggttcaatccctagtggggaaactaagatcccatacgtggcacagtgtggccaaactttttttaaataaagaagtgatataaatccatattcagttcagttgctcagtcgtgtccaactctttgcaaccccatgaatcgcagcacgcccggactccctgtccatcaccaactcccgaaatccatatgagtcatccacaaaaataaagaatattgtaatgaagtttaactcacgcataaaaaaaattttttttaagattaacaaaagaaaagcatacaaatttatttagcatacttttcatgtgatgtgggaaccttcaaaaggaagacccaaagaaatggttaaacctgagcatttttatattaggtttgatgaagagcagaaagtcatgaaaaagcagcagagggcaaagggcatgaagcaagtagatagggaagcttagcaataattgttcattcagaatcctctctggtccctagattttaagacataaggatgctcctttcctccagatataatgagggcatctctaatatgaaattttttatctacttcaggggaaggtcagaaggtccttcttgcacatgctggtttctcaaattccttcagtttaaaatactcaatatgacaaaataccatatttggcagcagcatgtcctgaaccccatctgttaacctaaaatgtgacacagttatgctttactttatcaaaatttataattacacctaatgtggctcttttttcagttgatgaaaactgtaaaggtgacttttcctaaaccagaagtttgggtgaggcttcacagcagaataatcatataaacagcagaaatgtaaccataatattgcaatatttgataatttggacttctacaattcagaaaatattttcatatatttcctagagaaactgaatcagaaagcagaccatttgaactctaaaagaaatggaaaagtgtgagatcagaaatcagaatcagtgagcatcagaatatgagaataagaacatgttagcacatacatctagccagtggccgatgctgaagaagaaattcaaataaaaagtaccgaggcattggttggaatgctgagtatgccccttcccacaatcctccagccacagtggcccctctggctgtagatcttagctgcaaccctagtaatatgactcatccaagtaccatttccctgcccttggctgtgcccttacagaccttgaactgctggaaaagtaccatgtgtcatcaataaagtataaagggaaagacattcacaaagcatagtaagatataattactaatgatggtcttgtttcttcaaaggaaccaggttgagaccacttccaaaaactattcaatttcccacttaatagccaggtaaccatgggcaagtcatttaacctctcaaagttcaagttttccttgtctgtcaaacagagatgataaagtacttattttataggattgttatgaggattcaataacagaatgtatgtcaaatgcttaactcagttcttcatacacagtatcattgctaaatggaaattattattatattattaatataataaacccaaaccccagcagtttcttatatggaaaagtaaagatatggaacccaaactaacccttatacccattaattgatgtatgagaaagatttaaaattt

SEQ ID NO: 35258 - DNA, 1546 bp, Bovine  19866881464451
  misc_feature (1)..(1): n is a, c, g, or t
naaattgtcactaaatttcttccagaattctacttactaacctaggtctgcatgaaacactaacattggttctgggataaaaataactaataatagaacccttggttgaagttagttacaccttgttgtattgacctttttgtttctcagcatgaaaaagtagtcctcctgaactgaaatggtgtgtctgtattttgtaatgtgttgcattgttactggatatccttactcatcaaatagttattgttgtgtgccttacactgtactaggcacctgaaatacaaagacttttttaatgatgttcaggggaagcaggaaaaaagaatacagtatacttggaattcattataacaagccttcaaattctctttatattatataagttttctttgtattaaataagtttaataggcacagtactcctcttctggcctaattggtttgaaaaaaataacaataattctcaattgaggtttagtctgtgaaattaaagtttccgttcctgtcacccacttaattggccattataaaaataattttacaaagaaacttggagccctttcaattaataatataaaatacctaacaaagagaaaattatattagactgggttcaatcttttgaaagattaaaaagtcttttaatgtttgctttggtggattgacactatctgaaattactcagcttggcattaagaatgatggtaaaagaaagatactaaaaataaattaatgaacaacaaagtaaaaactagttaagtatacctggacatttcatttttaataatagagaatatctgataaaatatcagacattattgaaatagacatgaacacttttgtgtatcatatagttgaaccataagtttcacaagtgaaaatattgattagaccatgttcagactaacttttccccttaaatgtatacaggctgtcagtttttatgttgtagttgtttactagctggagtccttcatattcctgttcttaatgtttttcttatattttatgtattatcctgcacatttgaccagatacataatatgggaagtaagtagtattctcacattctgagacattaggtaaaggatgatacagcagccaagtcaaggctctttggttaatttggaggtgagggggttgtgcctggtcttagtcgcagcttgcaggatctagttccccaaccagggatcggatgaaccctggcccccacattagaagaagcccagaggtcccagccactggaccaccagcaaagtccctggttaatttttttttcagttgtctttgcttttaggaaacactagaaacatgaccttgaattttttttacaaggtctttttacctgtaaataacttttccaatattactgaatacatttttatgcttttttatagacttgaatagttatgaaagttaaaatttttatcagagtagttttaaggtggtttttttttttcctttaatgtggaccatttttaaagtctgtattgaatttgttataatattgtttctgttttgtgttaggtttttggacccaaggcat

SEQ ID NO: 35259 - DNA, 1175 bp, Bovine  19866881560742
  misc_feature (1)..(1): n is a, c, g, or t
ntggcttgtgtagatttgtaaaatgaaaatttatattttaatgtataaagaattcggaaaatttgaaagatatttgatatttgaattattgaaagataataccatttttatagcaaatattaatttcaaagttattcattaaccaaaagcaaacatacgcaagaaggaaacattaattgatttttttactttaagggaacagatgctgcttgtgttgctcagagtcacggaatctgtactgaagatgccatcacaagcttttctgcagttccaggggaaaaaaaacatgactttggcaggtcgacttgcaggaccacttttccaggcaataaaaataaataaataaatagataaataggtggatagatacgtattttttcttaagattcattgagccctgaacttgtttcttggggaaaaaagctttaaatcagaaatcatattaaaggagcttttgtagagccaaataaaagttgtatatctagtagtatgtttgccatacatacaaactaacagcctagcagaatagatgagataccagtcaggcctatgaaaaaaagtgttaaactgatgacatttactttatttcttgtggggtacactttcatatgattgcaaaaagatgccagaaggctttgtggtaatgatttgattgtttgcgttatgagtttccaagtctctggcgttgttagaaaaacaaaacttcttttaagttgttctgtagttttaaaaaaagtaaatcaagattctttcccaccacgatataccgttagactttatcctcttcacgtcttcatttgaagtatcagtagtagttgatgatataggaattacatgttgtgttttccaacccaaggatagagtactgactttacatgtgtaatagattatttggagaacaaaaagcaaaataatgtttttttaaagacaaaacattaaatataaacacatggataaaatggctcttaatgtcaaggataaaaactatctcagatctaagtcttggccatttagtgtagcttttcaatttaatatttttttcccagatggtgctagtttacctaaaattctgtgttgatagtgaataagtctttcaaatcagctacatttattatttaaattccttttgaccattagtcttttattccacccccccatcattagaaccaacccca

SEQ ID NO: 35260 - DNA, 754 bp, Bovine  19866881656968
  misc_feature (1)..(1): n is a, c, g, or t
natcataaataccaggcatcaatacctgccctccaaagattcacaagaaacacagtaagaagcatgttattacttgacactaattttgctaatcaacataaagtatgatctgtaaaaataggtcaccaccatataatcaaggaagaggagaaggaaagctgctagtctacaaaagtgctccttttcgctttcaagcccaatagcttaatttggggtaaaataagattgtaaagtaaggccatcagttataaataagctgatgaagccgtctatacatactcacgtatatatgtttaaatttcagttctgatttaacatgaatgtgctattacaaaccatttataggaaacattttatcaggcttatttacaaatacatgatcagagaaaagatcttgaaaatcaaaaaaactgcagataaatgtagccattgctaacacagttcactaaaggtaagacagatttacataaaaaccaaaggaaaaagtttagtaagaaacccctaccatatacacctattggtcattggatcaaaaaggcaaataaatgtaatgatcatgactaaacttttattactgtctcttttaataacatatcaacatgaggtttacttagagtactacctataaatacagtctctcatgattcaatgagaatattaagttattgaatacatttttttattcccatggcacatcatacttggtaacactaataaggtagatttagataacactttatcagattacgaatgt

SEQ ID NO: 35261 - DNA, 1317 bp, Bovine  19866880344604
  misc_feature (1)..(1): n is a, c, g, or t
nttgtagctgttattatgaatctgaccttttcagtgctttggtatgtatattaagaaatcacatgtcatgtcttcttttagttcaagggtaggacacccacaaagatttaaaacgataagctgagattcgtaaaatttcttgacaaaggcaaagaatgatgctgacagtatataatagcttgggtatttattgacctttacattatattactagatacgacatagtgtactttgaactgacttggtaaagaattactttgagtttctaccttaattcaagtctttaaaaacttgtgtggactagttacaagcccaagatttgctatgttgaagtcttagggcataaaattgtttgtaagattaagtgagtattatggaaaaaaagtcccaaactttagggtcagggagaaatttttcatatatcaattttaaaactgtgtattgtataatatggacaagtcacttagctttgataaagcatagcttcctcacaaatgatatgagaaaaaatgtctagcttgtaagatggttataaagattaatggtggcatatgaacagtgatttccattaatttcccttaataaacagtttaaaattaattaattttactttaagttaggaaatgattagatcttgtataggaagtcaccacatcagtttcatgaataaactaatgattgaattcttagaatgcctgctgctactgctgctaagtcacttcagtcatgtccaactctgtgcgaacccatagatggcagcccaccaggctcccccatccctgggattctccaggcaagaacactggagtgggttgccatttccttctccaatgcatgaaagtgaaaagtgaaagtgaagtcgctgagtcgtgtccgaatcttcttgaccccatggactgcagcctaccaggctcctccatccatggggttttccagggaagagtactggagtggggtgccattgccttctccgaaaaaaagatgtttagaaattaaattatgtttgatttaacacactttttcaacttttcataaaagataaagaattaaaaaggcaataaaatgaaagtcttcctgattaatgtttcctgtcaacaactgctaaaaataaaacttcagatgcctgacattatactgagtatttcatagttacacatgctgtcttccagagctcttggtacatctgatcagttttagtatgttagcccataaatatctttcagttaaggatgaacataatatctcattttattgatagggaattgatagccaaagaagttaaataacttcctgaagttgaacatacatatatatata

SEQ ID NO: 35262 - DNA, 1546 bp, Bovine  19866880435739
  misc_feature (1)..(1): n is a, c, g, or t
naattacaaaggactgtataagtccatgagatcgcaaaaagagtaggacaggactgagtgactttcgcctttgctgataaggttaggatatgtgcagggactttaaacttgtctcatgtaatcttgttgatgagtttctctggatcctttagcctagcctcatgtggtgctctctggcatgatgactgctgttcatttgctgggttttagttttatcaagggtttcaagacattgttaagtgtatcccttgagaaccctgccccaaggctgaactactgttttttggctgttcctcccttgagtttgcatctcctccttcccggattagcgactgttccactgattgaatttgcactttggaattcagggaagttcatagaatctagagtttgtcccctataagaaccaggggacacagaagtctccttgactaggagccccatatgatcctgtttagtttcattaacaccgtggggtcttactgattcaccctagcataaaggagactaagccttcagcagtacgggaacacaaactatcagagccaaaatttttattcaaaattatcttattctccaatcaggagcagtggggagggggggacactacagagactttctcacagtggtttcaaaaatataacagagctatgtgagctcagacagactgcacaaaccagggaaagtaacacaggagaggaggaggtggtaaattcctaaactcagaagaatctcccaagcctggaattctgtgattcgcaggcatgttccactctgagctggacccatgtcctgattgagcccataaaatcttctccagcaggatgctctgagctatattccagcaaatctagggcatggtaccatctgtttctatataaggggcatggagcatcttctagtatcagactaaaggttgaagaatgaaagagtaaatatcttgttatggtccaggtcctaagaaatagggaaagtcaggagccagggtgagtcttttgggagagtcataagcaaggcatgtgggacagcaagcctgcctttgtggcacgcatcactgcattttcctgtctctgcagtgggtgagcagacctttagaggagatacttaaaggtctatggaagtgtctgaaagatttgatgactaatcccaccccctccaccccatatctaggaccttgcaagtgatctcaaattttctgtacaaatataataaaatgatgtttttgtttacaatacattagtttttatccaaggtttacaaaatattaaaacttttccctttgttaatgaagcaacaagaaaatacaacctgtgcccaagaaactctttacaactccaactctcaaactttctcatttttaacagtcatggctatctaaattcaaagacttttgccaatgcagagaatactaagtacagttgcctctggatctgaactgaaacagaattaaaattcttaaaattatatttcattccacacttcaaaaggaaacttttgaagtcaacataactcacacatcaaaacctccaatgaaagacctcattgg

SEQ ID NO: 35263 - DNA, 1139 bp, Bovine  19866880666516
  misc_feature (1)..(1): n is a, c, g, or t
nctggcatattgagtgcagcactttcacagaatcatctttcaggatttgaagtagctcaactggaattccatcacctcccactagctttgttcgtagtgatgcttcctaaggctcacttgacttcacattccaggatgtctggctctaggtgagtgatcacatcattgtgattatctgggtcatgaagatcttttttgtacagttcttctgtgtattcttgtcacctcttcttaatatctcctgcttctgttagatccataccatttctgtcctttattgagcccatctttgcatgaaatgttcccttggtatctaattttcttgaagagatctctagtctttcccattctattgttttcctctatttctttgcactgattactgaggaaggttttcttatctctccttgctattcataggaattctgcattcaaatgggtatatcttcccttttctcctttgcttttcgcttatcttcttttcacagctatttgtaaggcctcctcagacagccatatttcttttttgcatttcttttccatggcgatggtcttgatccctgtctcctgtacaatgtcacaaacctctatctatagttcatcaagcactctgtcagatctagtcccttaaatctatgtcacttcctctgtataatcctaagagattcgatttagttcatacctgaatggtctagtggttttccctactttcttcaatttaagtctgaacttggcataaggagttcatgatctcagccacagtcagctcccaaaaagcattatttgcctctaaaattttcttctctctctctctctcttttactttctttctctttctgcttctctctgcagctgtaaactgttacttcagacttttactattctacttcctatgcacaaacaacacctccagagttaattcattgacaaggtttcctgggaattcactgaagacaaagatcacattaacatctacagcacaaacacacacagtgtgatccctgtggtgtcagattacctcataaacaccgacaggcaggacttgtcctctgttcttatcttttttcctttaacattgactgccctcaccacctgcaaaaagaacagcttaaaaagattaattattaattttttaaaaa

SEQ ID NO: 35264 - DNA, 811 bp, Bovine  19866880786921
  misc_feature (1)..(1): n is a, c, g, or t
ntcgtgtctgactctgtgcgaccccatagacggcagcccaacaggcttccctgtccctgggattctccaggcaagaacactggaatgggttgcccatttccttctccaatgcatgaaagtgaaaagtgaacgtgaagtcgctcagtcgtgtctgacccctcgtgaacccatggactgcagccttccaggctcctccctccatgggattttccaggcaagagtactggagtgggataccattgccttctccaaacttggtatctactctctactaattgtgtgattcggagcaattaagtctatgactaaagatggaagaatgtttatttctttgtaggtagggtcttcaatttgacctttatcacaatcaaacaacaagatagccagggtccaaaacacttcaaagtctcaccctgctgccagttttaaaggctttcggaatgtttgtttctttcatactttaatgtttgtgtatttataacaaagagcttattatagtgcataatttcataattatccattgattcatacagctccttgctaaattcagttccaggtgtattccttatgtttttcatccaagtttcagatttgcctttgagataatttatcgttggtttaaagacaagagaaaaagaaaatgagagacattgcacctttctgaatcctttgggcacaataaacagtgcaattaaatcagcaattctaagaactctgaagttgttttaagaacaattttcctcaggtctataaaaatgccatcccttgtaaagcttctgaaatcaactagttgtatcttatagccagtgag

SEQ ID NO: 35265 - DNA, 978 bp, Bovine  19866880845783
  misc_feature (1)..(1): n is a, c, g, or t
nccaccagggaagcccaagaatagtggagtgggtagcctttcccttctccaggggatttccctacccaggaattgaaccggggtctcctgcactgcaggcagattcttcactgagttatcagggaagccccaatccttagaaataattgcactgtttcaggaaaaggtaaacttctcatcaattaaatcagagaatattcccagactctgcagttttgcctccagccttcattaggggccccttgttattacatgcttttagataaactacaagttgttagttcatctacagatctttatgcattgtgattacagcttcagtattgcatacgtgttcctgctgagtttttagatgtctttccacgtggaaactccagtagagatgtttctgtatagcagatgcttttaagcatcatgggggttgtaacagagagtgacctaagtttttgagcttaactggggttctcattcagtgaaatatgttcttcgtaccttcctttgagagataaggggctggtcaggattatttgaaagaagaggagtctattttactttccatgaaataagttcatcttggtagatgaaaactcttccaaagaaaatgactgccgggagattttctggaaaccattgatttgctctatttgtgtcgcctttcaagttgcctcctgctgtttggatgatttcacacactcttttcaatctggtaacagggatctgcatattcgtgattctcaggtctcaacccaagatatttatcacaggacgaaactagatgaaattggaacaaaactgatacaaaaactaactcaaatgttcatatctgttacatttttaatctcattcatcaaaaatattcaggtaatatgctattaaaatatcttgatgtgcaactgtctcatttcattgggtcattagcaataagaaaatgtttgttaaatgaatcaaaaacattcttatcatcctggataggaacag

SEQ ID NO: 35266 - DNA, 1747 bp, Bovine  19866881272975
  misc_feature (1)..(1): n is a, c, g, or t
nactcctagctgtcttaagtcatttaaggacacagcctgtccataaagggtgcctgtgcccaacgtggacctcccctacggttagtctgtcgccacgatgcaccttgggctcatgtgccatggttggaaaagtctctgtgtttattttgtagcatatctgtgagctctcttgggcagcactaggacaggtctgggctgggtttagaggtcagcttgaatctttttcaactgggctggctaccccctgttgctcatgcctaacttccctacctaacaataatagtagaacatagtcagatttactgttaagtgctttttaaatctatatagtattaagtagtccttgaataattcaatataaagtattctacaagagttaagtactatcaagtacctactatcatgacatataagacctgattcctatccttattacagaaaagtaggcatgtgcatacataactcacataaagtattaaatgtgatatcacagaggtactgtaaagtcgtatgattctttacagtagatagcatgtgctttcatttgaagtattaataaaaaagttcatggatcaaagatggctttatggagggagaaagattgaactggaagttgaagggtagaataaatttacacctgggaaatagaagaatgagctgcagaagagtttttttttaataaaggaaagcatgtgatcaaaacatagaagctagaaacttatttggcagaaatttagagttttctggagtacagtgataatatttctggaaagataaaagaagattgaaacatggatgccctaatgaagattactgatggcctctacactattgaattgacctgagttttacacaactttcctgtgtataaacagacttacatgacacccatctctacatgtctgaagtctgacttgcgggatgataaagtaggtgcacagaaaaccatgcgatgagcaggctagcacctgttctaagaaacacacacttcactgataaattcatgcttttattgtcacaaaactgttggagactaatacttccctactttagatttaacttcccattaacaaattctgttctctaccgtgtaattgtataactcttattgatttaacagtgctttaaaaattagcattgtttcatagcaaagctggcagaaatacaaaaggtcttgtatccttgatgaccagaaactgtgtattgtctcattcctaaaagacaaacagtgggaagtacttccagctgtcatgaaataattatgtttttggaggtactgttgtcaaggtgaggttgtctagaactattctgctaggttctcattttgagtgaatcgctttaataaccatcattatggaagcaaatataattacaaataatgattgttttggaagtacaaattgagcagaatcagctaatggccagtttctattcaaccttgcagtttgcatttctcattttatgacaaaatattactggaaagagaatgaaaagcaaacactgcatttctacatttttatattttaagtaaaaagtaaaaattgtagaccggccgaatgagatttttaactaatagctgtccagaagcaaagatgtaccctaagagaattatcacattaagtatggagtgaatgacaatttttgaaatgttgacatatacaactgtctggattataattgcttaacatttcatgttacaactaaaaataattgaggaaaataaagttaagatttttactaactagtc

SEQ ID NO: 35267 - DNA, 2492 bp, Bovine  19866880345281
  misc_feature (1)..(1): n is a, c, g, or t
ntggtttaatgactgccttctcgtgactataatttgagttccatggtggtgaggattttgccttttttttattcaatgcagtatgcctacagcttagctcaatgctgacacaaagcaagaactcaataaatactagttgaatcaatgtatggtctgccctcccatctcccctggccccactgagcatcccctctgccagtttcagagaacacacagtggtcacgtactgtgtgtcagccactgctcacggtgccccaagcaaactccacttgctcttctggtgaggggctcacctgttcctcagttgacagtccacccctcctggccccctgaaccccctcctgcatcctcagaagccctttgtagatcaccttctcaggcttcccagcccatcaccctaatgatggatcccaccctcagaaccccattccaccctccccatctccctgaccttccactggaagcttctccccttctatgacccccttctatgctcactccctggatgtccccctcagtttgttctccctcaccaactactcaattttctcgcatccttagacagcccctaccacactctcctcccctccctgacagcctgactcagttctctcttcctacctgacctcccccaacaggcaactgaccccactgtttgcccccaacacacaccttcctctctgattctcactgcacagttctttctcctcaatttctcacctgagcgctctctagctccctgttcaccctgagctctttgtctccccgaacccacggcctcagttctttctgcctccttggcagagctctcaaccctgagcactggctgcagggaggtgtttaggctgccgggcaaggcttggccatctcccaggtgcactgccccgcttgcgaggcgggtgccatagctcacctctctgtcatttctagctcctcagaccctagcacgatgccatgcacgcatctgtgaaagaaatgaaaaacggttcctgtccacgtgtctgcctcccacgtaactgactgctggtctgctcagtatggcttcccctgggcaatgagaaatctcgtggccactggcaccaacaagaaaaataaacggctctgcctctacccagaaccacagtaatcttccaaaaacggaaaccagattgtgtcactctccagctcaaaaaattagatggctcactgctggctttaggataaagtctgcgcttgttagcagatcaccaaaagcctccttgagccaatccctgtgacccctcagaccctctccccatcctgcctcctcctcagcttatgccccagccacaagaacatgtcacacccacctagccctggctctttgtttacactgatctctcggcttggaatcctgtctccctttgtaaggacctctgatcgtgtttcaaaacctggcttagccattgcagctcctaagcagtaagtctttcctgtttggtcccctctcccctcttcacgtgcccattccctcctctgcgtctcaccatgcccagcaccaccgcattccaatggaacatctaagactgtgtcttactccacactccatgaccaaagagagtgtgctgtgcgtctgcagagggggcccctggttaggatggaggggtaagaggaactaagaagtaggcagctcagaactaattgggaatacacgctgagacaggcttgtgtggtcccgtgggccggggaaggagaatcagggagggtggtggagaatgctgaagggtccctgagaaggaagtagtatggggtcccaggcaagcaaggcctgagatctaggaaaaaagggggaccggctgggcttaaactgacatccttgctcaaaggctgttcctctgagtttcaggagatgaaagaccccatgactgtgccacgctcagagcattacagggatgacgggcccttctctaaaacaggagtgtgtggagctaggtttctcagtattcgggaccaatctccttggcatctagaggtgtggtctgagaagggcacatgccctgtgaggctgtaacactgaggagtcagggtgacttcaggacacccctgcccatctgctcacaggggcagaaagcactggaggagggaagcgggtgttctgctgtgagtgccgaagctgagtgcctgtcccaagaaagtgcagtcaccttcattccatttcttaaggtcaaagaatgacccgttgctcagtatcttcaagagggggcaaaacccaacctctcccctcctactggtactactcacacctgggacctctccaaggatggaaggagccacttggattctggctcaaagcagggagcaggcaggctcctcaggggagaaactaagagtggccactaagcctgaaggggctgacaggagaccacaggggtaggggatgaatcctgctcaaggtcaatggttttttagcctgactgcttactgtatgccaggcactgtgttaggcatgggggagacagagataataataaaga

SEQ ID NO: 35268 - DNA, 1702 bp, Bovine  19866880364503
  misc_feature (1)..(1): n is a, c, g, or t
nctataatgacagaagcgaatgagtctgctgaaagacataggaacagaaagcacctctgagtacatcagagatcacaaaagatagcattggtttctgaaccatgggactctgcaggggaatgttctcctagacaatgctcagttgggtgtagaaatgacttctgacccttggtgcttgatttgcagggagagcttctgtggtgatcactcttcaagaatcaatagaggcttcaccctgcatccagccactctgcttccaaactttggtcccatcctacctttctgacctcattctaccatttccacctaaccagcatttgccctcttacctgtgttgtacttttttattcccacaaggttttttcccttctgtgttaacctgaatttcccttccctttcctctctgcttactcaaattttaaccttaaaatattttcttaaaacatatcactttgtaatggcccgtgttcataacaatacatttccttcctgaacacctattagctaaactatatttaacttgattatatttaatcacattaaacttatctggctattactttgaacatttcacatgaaatttgcctaatatcctgacactcatggaaatggagcagcaaatggcaatccagaaggagtctgaaaaatatattccttcattctgacccaaattaaaactttccctaaaggctgtgaggagtggagcagttggtgaaattgagaggggttcatattcattgcttgctcttccccaaaatgattccataaaagttgtatttaaatctccttatccttaagagcacccaacgaaaagtatcctgagtacaggaaatgaatacacacctctctggctctgctaatatagccctccttttcatcccacttgttccttcactctcaaaaaattcagatttccctttggctaagaaaatttaggcaaagggctttctttgccttcactcctcccaccactcaggtaagatttatttccttctgaagctgtggactgtcagctcttaggattagggaaggaatgagtgatttaaaatctggaagagaatatggaggaaagagaccatagagagaataagggaagaatttggggtatggtatactattaatagatggacctactgataatggcattcagatggtcccagtgaggagggcatctgaaggaatgaaagccccagtttatgagtccatccccctgcctctatgcagatgcacttgctcagaccataatgggctgtggagaggatgcaatgggactccagttgggcatagggaagggaccagggccagattcaaacaagtaagggcctcagaggagttaataatttgacatccttccagccccgtatattttagatactcattttacctctattcagaggagaggctgagctttcccaggataagcacagagatgaagggccactggtagcattgctctgcctctattctgaagcatcagccccaaatttatataaacaaaagacccatcagaaaggctcaagagggagggaatatatatatatatatatatatatatatatatatatatatatactttttcatgttgtcgtacagcagaaattaacacaacattgtaaagcaattatccttcaattaaaaaaataaataaaagtaaaagagccccactagaaaacaaattcattttccttagaaggaaatttac

SEQ ID NO: 35269 - DNA, 1370 bp, Bovine  19866880424076
  misc_feature (1)..(1): n is a, c, g, or t
ntagattgctttggatagtatggacatttttaacaacattaacccttctaatcaaggaacacaggatatctttccattcctttttatcattttcaaattcttttatcagtgtttatagttttcagaatataggtctttcaccttcttggttaagtttattccctggtattttattcttttcagtatgatcataaatgggactgttccctgaaatttttttctgataattcattattagtgtatagaaaagcaactgatttctgcaaattagtcacagaattctgcatattaacatgcaacagtctaactgagtgtcttttcttcccacagccatggacacagcagagtctaggcccaatgaacccctgtttagaggcaaaaataggcaagatctccaagagatgctcggagaagtaggactggcagttgaatactagttgtcaaagctgcaggaacacctgggtgtgacttctgcccatgccttacaacactagaagaaaaagacctccagaaactgaaatgccaggtgcaacattcctgggagaaaagggccctggagaaactgcttaacctgtcacactcaaatactctttcagagttacaggagtcttgggtggaatcattaaagaaaaggaagatggaggcagaacaggcactgcaggaacaaagagaaatgctgtcagaacagaggcaacaacaggaagaggcagtgaggaaaaaggaagcagtgctgaggcaaacaatggagatccccaaagaattctggccatcacctgaaaaccccccaggagaagtcatggaagatatgcagagacaactcaaggtcatgaagggggcactttctcacaggaaaaatcttccagatagagaactggtgagacatgcttctggaggactagccctacagggaatttacaaaaccagtgaccaaaggtgtcttatagggaagaaagaggagctactctgcatccccacggagtttgtactccttggccctactcagggtacatggacagaaatgaaggaatttacatcttctcaagaagaatccatgttcactcagactgtagagaagctgggcttcagtgtaactgccttagcaaagggtgggaggttggggaattagcctggaagctggtatggatcatagcatgcattcagaatccaagaaaatacaacagtcacattctacacactcttatttctgctcaaccaagttcagctatatcccactggcctccttccactttcccattgaccagctccaactttccaatgctgctctccaggaattaaaatgcattgaagaccttttgggtaagtcagaagacccagacaaactacactttgttgaggcatagggttgaagc

SEQ ID NO: 35270 - DNA, 3231 bp, Bovine  19866880441562
  misc_feature (1)..(1): n is a, c, g, or t
ncagcacactggctttccttagttgtgatgaacaggggccactctctaggggtggtgtgcaggcttctcattgcagtgacttcttttttatttgcactgagaaaccaaaaaaattgtgttagtcattttattgcaatattcactgtattgcaagggtctagaaacaaactcgagatatctttgaggtatgcctgtacatgcccggtactagtttaggtagagaaaatgtaatggttcagggacttccctggtggtccagtggttaagactctacccttccaatgtctggtcgaggaactaagatcctacatggcacagccaaaaaacatttaaaaaatttttgaaaaatatatgatggtacataagacaagcaaatcaaaactagcaaagaaaaaatgcataaacaagcagaagcaaaagcatatacaaataaaataatttcaagttttattaagtaacataaaggaaacccgcgagattctgaaatagctagatgaggtggacaagaaaggcttcattgaaaagatagcatttaagcaagaatcagctacaaatattatgaaaccccagtacagttttatttattctgtgataggtaaacaaagcactttccccttaggatagaaactatgaagaaagtctgattactagtaggtctctctgaaagagacacctcctccagcccttccatcccaggtgatttttgcaaagcctgtgggggtgggggcaagggcggaacttggactttcagcaatggtgaaatattattgacctgtcaagggcaaagataaagagacttgggaatgcccccaacaggtccctgatggagcttggaagaaactgttctctgagtagttctaagtttgtttgtatgtgtgtgtggttattaagtatatgtaagtgttagtgtttttaagagtctcagagctgggcttggcacagttcacaaaaatgttactttcctcttctctcctcctgcgttgttcaggcaagtccaaccacggtcaggtggtcctcaatcaatctaaccccttcttaccctttatgggtacccagacgcatcaacaaggtgaagagtcatgttgaacatcaatggcctgggccagtcaccgctcaaaagtcaccaaagtgctttgctgtccacctgaaactatcaaacgttgttaattggctatactccaatataaaataaaaagtttaaaaaaaagtcactgaagggggatggggcctcctgccgggaagagttagtcttggattcagatttctgttcagaccctgaccttatttgcactgatgtaatcagccaatattggcatagtcctgagagatcttgttcccagcaggcttggagtgggggtagtgctgttgccttctctatatagggggttcagccaggtgcccagcgctgtcctggggcctctccagctcaccatggctcgggcattgagagtgccagttgcactgtggctgttgggcttgtgctggtctttggctaaagcccaccctctgtgagtaaagttgaggctggagaaggaggaccggggttgggattagagtgggatagggccagcttttaggtctggggtaagtctggggtcttgggacttccctggtggctcagacagtaaagcatctgcctaaaatgcagaagacctgggtttgatccctgggttggaaagatcctgtggagaaggaaatggcaacccactccagtagccttgcctggaaaatcccatggacagaggagcctggtaggctacagtccatggggttgcaaagagtcagacgcaactgagcgactttacttcacttcttcaagtctagggtcaggagctaaggaagaggggttagctgctgtggagccagacagctctgtgtcttctctctagggctagagctcctgagcttgggcacggagttgaaggtgggaatgtggccaagccggatccagaagtgacgggtgaggccctgactctctgtgtctctctctctgcttctgcattgtatcctcttactgatctttcacctgctgcctccctgcctcctccccagaacgctgctcggatggctggggctttgatgctaccaccctggatgagcatgggaacatgctgtttttaaaaggtaggaggggctgggactggggcatttgggacctcagacttggttgccttcaccaggatgtatcctggtggtcttaggaattatttaagagcatcacccatggcttctttgtaactatctcagtaggccaaaagtttgctctgggtccttcagtgactgtgtgttttgcaggggagtttgtgtggaagggtcatgcctgggcccggcagttgatctcagagaggtggaaggatgcccccagtcccgtggatgctgcattccgctatgatcgtaacagtgtccttctgatcaaggtacgactggacccaggtcagggccaggccagaaatgctggagtcaacatgagaaaccctcccctaggtggcccttgccaacaggttccaggtttcctcctcctgggccttcctttcctgagcaaggtcaggctaggggggtgtgtgtgtgtatgcatgcggacctgacaggcgccacatccagtggctcttcttcagtcctaatctgcctccacacctctctgctactcctcaagctgttgaccatcctttccttcctagaaattcctccttggcttccatgaccccgcatctggtcttcttcctatggttgccaggttgttcgccgcacagcggtacctggctgaggggtgagtggaggatgaaatccaggcccactgtgctcatcaggtcccatgtcctggcccagcttgtgtctggtccttctgggcaccttctcctgactcacacaaagatgctgcatggctgggtggccctcactgctgggtttgttttccctcctgcctttttttcttgctcttctcagcttctcatcctgggccactccctgaatgttccgtggggatccttcccagcctttccattcaccctccctgggtgatctcaactactgccacagctctgagactctccacgttgtggacaccagatatggctctttccccagagctccagacatttctttgcaatttcctggctgacatcttcaatttagatgttctgtagacacctcaaatacagcaccccccaaacagaacacagtatcttctgtacaaatccctctcctcccaagtcccctatttcagcaaaggca

SEQ ID NO: 35271 - DNA, 933 bp, Bovine  19866880456835
  misc_feature (1)..(1): n is a, c, g, or t
ntcagagctacaatatgcccccacatttaagggcacagaggaaaacttcatgggtacggacattatccagtagtgaacaatggggaatcagcatcgcaggaagttcattttcagatgaagtaagaggaaactggggaagggaggagttaggaaacttaaaatgcagaacttggctgaagaacttagtacaatatgttgactcagttgagacatttatagatgcctatttttcccatgttctctactgggtggcccaagagttgattaggcatctcccctatcctctaggaattcatcagctagtgatgggtgttgaacaatgtaactgtgccattgctaaaacgaagggtgtactgtgagaaactggaccactggaaaagtcactaacttagcttgcggaattcagtgaatacttcttagaggaggcaacagatcagcttctggctacatcttggaaaatgtacaggtattttctgtctgtaggtaggttagaaatatttcaggaaattgaaatatgaaatgtgtgggaaatcagttagacacaagtttacattcttgattgtcattatgaacacctaagtccctggagtggaaggagcctgtttcttcagctttggtatattcagcagtgtagctcagagctgagccacagagctgattatgacaaagataacatgtagtgacccctcctcatcttaaaaacatatattgaattcaggttcaattgtaggaacagagttatccagaagggtgaatcccagttcctggctttgggtgctcagttgagtgaaggagtcagtcaagcagacaggcaactatagtagtgtgagaatgctttgacagccatacctcaggactcttactgcactcaagaatggacttattcccatatggaaggcgatgtgaagttggcctcaaaatactgactttgag

SEQ ID NO: 35272 - DNA, 1782 bp, Bovine  19866880537879
  misc_feature (1)..(1): n is a, c, g, or t
ntagcaggggaatgatttcttcagatttgcgttttgaaaaggtcactggttgccgtgtggagattggaaagagcaaaactgaatggcagtgaagggctgtcagtactactgttcaaagggagctggtgctgagggggtactgagaatctccatgatgagtaacccgtccagtaggacttcaatccagaacggtctcccagacagtagacctcctttaagcctctgccaatgtgagggctactgcacttgctcaggctctttctgtccttcagtcagcctgtgacatgaaatctgcctgctttattccctcctcttcaacccctcgacccattgctgtaatccccaccactggcctctgtctgcagcttgtccctttcagtgtttttttttttttctttcagttctttacactacaactggaggcatctttaatacacacatgtgtgatcatgtcactcttattttcaaaaatcttcctactttttataaaaaggtattagccagaggtagaaacctgagattgagggttggaactcctggtcactagccttggtcctgtagcttgtggccttacagtgtttttctgggaaccccatcacctcatctatacaatgaagaaagtgaggtgggtggtttctctgctctccagcctcccaaaggttgagatggcaattttgaaagttcttcaggccctggcagtcttcgtgataagctaggtagttgattgggaataatccagatgcctctaaccagcatctgaatgaggtccccatctctcttctactccctaggccccatccattctcgccccttcattcatcccttgttttcccccagggctccaaccgccgccagctcttggccacattacgggccctggaggtagcatctcttccccagcagtcccctagccttcctggcagttactctgaggaggaggaggaggaggtcgtggaaacaaagaagaaacgcccaaaaaagggcttgtttgctggtgcgtctaatgaagtagaggagaaaaggaagaagaaacgtcacaaacggggcccacctagcagtgactccaaggaagaggaagtggaaagggagaagtgccacaaaggggctcttcttggcagtgacttggctgaagaagagaaaaaaaagaggaaatgccagaaacagatcccttcaaatcttgcccagcccctggacagtgttgaccaaacaggtagtatatggggatgatgagggctgggggtgtgggggatcagctgatcctacatataacagagttcctctgccaccagtaggtttggggttagggaataagtactttcacatagaccacagtttctctcttagggacgggggtatggccagggtgatgtgctaagcctctgaattcagggcatcttgctccccagtatgcctttctgtctctctttcttcaggttctaaagcttggaattctagtgctacaagtgatcccaccaagccaacctgtgagaccccttcctctaatcctccctataccttgagtcgcaagcaatggcggaaccggcagaagaacaagcgtagacagaagaacaagtttcggccatctcagccaccagagcaggccccagccccggccccagcctctgcagaggaggcagaggtgccttctgcccccagtccagacaaccatggagcccgggcagaggctcttcgagctcgcatggcccagcgtctggacggtgcccggttccgctacctcaatgaacagctgtactcagggcccagcagtgctgcgcagcgcct

SEQ ID NO: 35273 - DNA, 1985 bp, Bovine  19866880603556
  misc_feature (1)..(1): n is a, c, g, or t
nttgccctctgggctccaataccagaagcctatggggaagctccttcctcacctggtaaggaagcagtagcttctgcagacacagtaagccaaagacggaaatccctgtggacagcagccacattcccatttgcttgttgagcaaaaagcagttctaactccaggtccgagacctctaggggtcagacatggggctgagatcaatttctggatagggatcagacttgaggctaaggggtcatacaaaggggatgaggggatagaccatgagacccaagttcaagctcaggcccaagttcaggataaagtcctagaagccatctctagacagcaaacccacccttggctccatccaacagtcccagcaagggctgcaacagctcttttggccagtgaggcataagatgacagttctccagcaccagccattcccccctgagcatagccttgtggagagagctgatcacgatggagactgggtcccaggtttcagagcccagagctatcaccttcagatgcttctttccctggagacaaacaacaaaatggcagagtaactcaaagagatcctaggatgacccagaggacccagagtaatgccacagatgacccaaagtccctgagtaatccagaaagagaatgctctgggggagcgggggggtaccacccaccccagccctaagagccccgtcactctgtggcccagaggcgtgggctcaaacctgtttatgtctggcagccagcttctggataacggtcaggtgatgcagggtggcagtgggatgaccaggtggtggtaacaagatcagtatgggctgagtagcctgagtgtgttcaatggggatggtgtgggcactcaggttttcatccaggggccggcccaggaggctggtggtgaaggttgccagggtgctgaccaggcactcaggtcgcagcacacgccacaggatcagcttctggaggaggctcagtgggtgagcccccggccctggtgcagggcccagcacactggatgatagcgacaggtaagcctgccaaacactggcatggcccgccagggatgcacacagcccagcgaatgggggcagcacctctaacatctcacattcgtgccaggttctcagccctagccaggccggtcgagccacacgtgggactggtttttcacagcctgtgctgggagagactgccagtccaggccagagggccagcctctccagctccggcgccttccttgccactcgcaacagagccaaagcacccaagacacccaccaagggtactcgggtcaggcccagtgtagccatggttgtacctagtagctggtgggtcagctgtctcttcagctgcagcagacggcaggttacttcctcccgctggtgaatctcaccctttatgctgtgcagagcccgtttggtggcagccagacaatcctctggactcaaacggaaaagtggtagtaagttctgcagtgagctaagagcctttatgatggtcatgccatgccagaccacacgccgatagggtgcccacagtgccacctccttcagcttcagctcttctaggtcctctaaatgggcatgcagctgacacagctccgcctgggccctcaccacgtctcgcaggaacttggctggtttctgacgccgtgggccctggagcagtagcatcgtcagcagccgctcctacaaacagttacttattgcatggacctggtccttctccacgtagatccccgctcagtgacattcatctccacccccatactgggccccatcccaacccacagactgaatctccaagcacctcaacagcccctgcagcttcccaggagtccaggaatctgacggtcaggtcccaccagtgggtctcaagctcaggacgctccgtgcataagatttcccgcagcatccgttcttctaggatttctgtattcacacccaggtccagcacattcagccccttcagcaattcacagcctagca

SEQ ID NO: 35274 - DNA, 1307 bp, Bovine  19866880718443
  misc_feature (1)..(1): n is a, c, g, or t
naatgggggctcacgagtaatgctgcagatcccaatcggaatcgcaggatcgggccaaaatggcagtgattgagtacaaagggaactgtctcccacccctgcccctgccacgcagagacagcaaccttacactcctaaaccagctgcttcgggggctgcggcaggaccaggaagcaagcacccgcagctcccacccagctcaaacaccagaagtttaactgaagccaaagggcatgtggcccccatcagtgcccatgatcacaggccttgggagctctattaagctctaagaactggagcttgagttgtaaaatggactgtctgattggagtctggagcccagaactttctgagacccagatacccttttctttgcacaataggtaaaaattcattgtatgtatgtaaactgattgttttcccccctttggatttctggagaatgagaactgagatagtaaattcatggcatgtttctggctcttaatctgggttgtgttgaattaacacagtttggtttttcttcatgcctgattatatggggcatgtattctgtaattccaaactagcccccataggtgattgagttttgttatctagcatagagactgagcccctgggatttcttaaagattacttcctgacaagggtaggagggtgaacatctagaagtgaactttctgtaataatctggtaccctaggaaccttcaaggttccattcctctgtttctggacaggatcacatgttaccctcaagtgctcccctcaaatcctgaatggacttcagaggagaggaccatcaacctggccaggagagtggaagcatttagcagaggatgttgactgcaggataagctccttccttttggggtgggaatggaggggtgaaggagagggtagaagtggaagaaagattaggaagttaaatccgtgggaatttcctggaagttttcattgttgtcaaatctgggcctctctgggaactcggaagagggaaatccggcttcagaatggtcaggggatgtgagaagtaggaagttcctttatgtgcactaggaactgtgaagccagactgggcccagccaggctgcccatccctcacactcagaggcttcacttggtgatagtcacgggaagtcttagagctatcatccctgcatgaatacgggatagggcctagcagatcccagattgctagtacagtgggaaaaagagatttttatcttagggcagaccttcagagggtatttggcccaccaaacccatacacctgtttgagataataaggttgcaggtggagggctca

SEQ ID NO: 35275 - DNA, 1072 bp, Bovine  19866880741367
  misc_feature (1)..(1): n is a, c, g, or t
nctttgtaaggagtggcatctgcatctcaaccttaatgataaccttatgtagggaaaaaaatgaacttcagtagacctatgtattgtctatgtccactcttcccattatctgattctgacactcttgaagctgtcttgctccttgaagttgtagacaatagcaatgcaaaacacctcccttaccccaaaccccagcccacaaaaaactcagcttgggttccatatgcacatgcattttaatgttcctaatccatgaagctgcctgttctttgggttctcattaataagctaaaaaaactcctgttaatacatatttatatgtgtattagaatcatactttttcaactttggaaatggccttttaacagttttgggggtcctccattaaaatgcataatgcattcatctgacagagccaggtaaacctcatcaccaaagatgtggttatgctcaggcacatctctccttgactctcagaggggaatccaaagtgacaaggcatctttgctatttttctgatttaattttcctttctacaaattttgtgttttggttttggttcatttatagccaatactcattagtggcagcggtgactgaaaatttggtctttgaccatttggtgatctctgtaaatggactaatgagttatagagatccatgctctgctgggtgaaagatgatagagaatttggactgctagtcatttttgtttgcctattttgagcccaactctattgagccctttgccctttgagaaggagaatgactccttcataccaagcttggtgagattttactcatgacctgtgacagaaattttagaaagtaagctataagccttctttatctgtgtgtctgtagtttttagaaaaacctttatccctcattctgaaagtgtaatattttcacacttgctgagggtattaataaatttgattataaagtctcatgttaattgagttcttttcagattggctgatagagataagtgaaagtaaaagtcactcaatcgtgtccaacctctttgcgaccccatggactatacggtccaagaattctccaggccaga

SEQ ID NO: 35276 - DNA, 1161 bp, Bovine  19866880777871
  misc_feature (1)..(1): n is a, c, g, or t
natgcccagctccaaggcctcccaccttcataaaccaagcaggcctagagggtatgagtctgaaagtacctaatctctgcagaaagcagacattgccatctggggatgttaggtcacaaaatagaacctctcaatttcctggaggaaccagcttcccaatctactgtgctctgtgtctctccacagccatctcctgggtggaggcatttagccagcaaactgtagtgtgagacacgcttcccacaggaagggaagaagagaaaagaggaacgaggctacgtcttaaaccagacttctcagagatccagggagaccaacaactgggccttgggctcgtgtgggtaggtagatacctgaagtgggaaactgagatgggctgaggggcgaatagatagcaagtgggcctgagctccactttccatgtagtcactctggggagatgacttgcagggtgcccttatactcgtgtgacatgagacagtcacagcagagcagaaaccagggcgtgagaaagaggatcaaagttaatgttcccaagaccccacagctcccagacggcagtggacacaggaaacagtggagagttgatagccagcaggcgtggatggtgttcctgggttgaggggcgaggggcccttcagcagaagctatgggggtggccagcctaggacaaagactggatgaagggttcactaaaacgccaggacatgtggtgtcaacaggagccagtgcagagccaggtcagcaagggcagaccctttgggttcctaccagctgagagaacaccggccagctactccagctcaggacgcagctgcagcggaagcagcaaggtcagaaggagggcagagacctcatggaagtcaacagaagccagccaagaagagcacacggccctgaagccccctccaatgccaggtgccaccctgggaggaaagtgagctgaggacgcttgagaaacagaacaacccagaaccgtagtatgaattttgaattgaccaattaccccaaatagactgaattagaccaaaagtcctactttaaatggaaaaaaaaatgtgttcactttcaattggaatacagttgtccttaggggaattggttctaggacttctgaggatatcaaaccccacacatgctcagttcccttataaaatggca

SEQ ID NO: 35277 - DNA, 712 bp, Bovine  19866880817003
  misc_feature (1)..(1): n is a, c, g, or t
ntggaccctggcagtcctgaattctgtgatacacacttcatatactatgcattttcctttttgcatgacccgggaaatcaggcacctcttctgtgagatcccacccttgctgaaattggcctgtgcagatacctccaggtatgagttcatggtgtatgtgtcaggttccgtctttctcatgccctcccttgctgctgtccttgcctcctatacgtttgtcctagctgctgtcctgcacatgtcctcaggagagggaaggcagaaagccctcttcacgtgttcttctcatctgactgtggtgggaatgtactatggagctgccatgtttatgtatgtccagcccagctcccaccacagtccccaacaggacaacatcctctctgtattttatattgtcatcactccagcactgaaccctctcatctgtagtctgagaaacaaggaggtaatgggggccttcaggagagtattagggaggttttctcttatctaggatggtggctgccagtgtgatattgaagccctataactcccagatggtgcttcatatccactcctggttttatgtggttcttctacattatgaaaattctgaaaatctgccacattagaactaagtcctcatttggtcttagagacacaactttgtctctatcagctctgtattttgatagttaagaagcattcatttctctgatcaatatcccaggat

SEQ ID NO: 35278 - DNA, 1678 bp, Bovine  19866880845519
  misc_feature (1)..(1): n is a, c, g, or t
naagcctttctatttaactattctgtcaaggaagatgattcaattccctgagtattcatggcctaaggtttgcttgggttccaagctcactctacaacttccttcctatttgaccttaggaaagtttctcaactttcttgcctcatctgcaaaatgtgtaaataacaatgggtcttgctgcacagggttgttctgggaattaaatgagttaatatttgtgaactgtctagagcagtaccttgcccatagtatgtactatggaaaaattaatttgaattgatgatcctactgaaagtgaaagtgaagtagctcagtcgtgtcggactctttgcgaccccagctcctccgtctatgggattcttcaggcaagagtactggggtgggttgccatttccttctccaggagatcttcttgacccagagattgaacctgggtctcccgcattccaggcacgctttaacctctgagccaccagggaagcccaatcctactaattgcgatattaaaattttgtcccagaacaactgggctccaaagcctgtgtgctttcaataccgttgataactttctgctatttaaagctggctcacttcctaggcattttctcacccagaccaattaacctttggaagcccactctcagctcctgggtcctaagggcatacaccatagggttaagggctgggggaatgacactatgcagcacattgagaagaacagggatgatgggaatctgtcttcctgccagatgggtgacagacactacaataacagcagtgtagaaaaagagaatgagggtgagatgagagctgcaggtactcagcgccttagatgttgcttcagcagagttcaacctcagcactgagcgaataatcaacatgtaggaagcaaagaccagacccatgtcactcccaaccacaaaccaagccaaggccaaatggtaaaatctattaatagtgatgtcatcacaggccagactggtgacccccaagttagagcacaggcagtggtcaatctcattcctggagcagtagtgtctctgggcagccagtacaggcactgggatggtcagcaggccattcctgagcatcatagacagtgtgactttgatcacaaaagtctcagtgactatggaagagtactgaaggggatagcaaatggctacatacctatccacagccatgcagaggaagatgcctgactccatgcccatgaaacagttgatggcatacaactgagcaaagcactcagtgagacttatggtcttggcattaaaccagaaaatggccaggattttgggcatgatggtagtagccaggccaatgtccaccacagccaagataccaaggaggtaatacatgggctggtgtaaggtagactcatgatggatggtgatcaagatgaggagattggcaccaagagctaagaggtagagtagagccaggggcagggagagccagtgttgccacctgtgaatgcctggaaaccccattagaacaaattcagacacttgaaaccttgagccattggttatacttagggtagtatccatgtcatgggatgtcttcttctcaacatttatctgtgaattaagggaaagcaagaacagactgtggttagcccagctgagggtcaaaattcatgtagaggaatataagattcaccaacgactcagtt

SEQ ID NO: 35279 - DNA, 1422 bp, Bovine  19866880913799
  misc_feature (1)..(1): n is a, c, g, or t
ntgtgtgtgacatggcccaggtaagcccctctctccttccatagaatgcactctgctcaccctgcatccttgtgtctactcctagcattcagtgctggcttcctccttcccataatgtgtgcttagtacaacattcttactctccacaggtgcctctggaggatgaatctatagatgtggctgtgttctgcctttcactgatgggaaccaacatcagagacttcctggaggaggcaaatcgagtgctgaagccagggtaggtgctcccaggacacagatgcatgactgtgcacatggcgcgtgtcagtgtacttacccagaactttccgtccttctcaggggtctcctgaaagtggctgaggtcagcagccgctttgaagatgttcggacttttctgggggctgtcaccaaactgggcttcaaggtcatctccaaggtgaggaccccaggaaatctgtcctgtttttgtcacatgtgtggcccttcaggctaataatggtgttcaggaaggaggtcattgtcagacacagatgtttgctccttgaaggcttgagtagtgggagagagctgggaagctttctgagcaggggtggggcctggacagaggtgatttgaagagctggggtgaggacttagagctcactgggtcttttctgtacctaggatctgaccaacagccacttcttcttgtttgattttgaaaagaccgggccccctcgggtagggcccacgactcagctctcaggcctgaagcttcagccttgtctctacaagcgcaggtgacctttggagccccccttgaacgaggaggcaaatcttgaactccaaactcagtactctgaagactgtatccagccagactgtgacctggggcctggtaccacccttactccatctcaagaagaaaatgtaatgaaactcttggctcaaccctgatgtaaagaaggcttcttggttctaggaagcataaagtcgttagggctagctacagagtaaggagttcattgtgagaacacaggagtatgtgggaattacggatcccctcagtgtcatggaaactacatggtttggaattcaaggcatctctgggtttggtgtctgtttccatctctcagaagccatatgagctttctgtctgagcatctccactctctgttctaattttcctgttggtacatcagatccctctgctcacccaaagcttctacaaagctttagtctgctcgggcctttaaggccgcaggcaggcattgcttcttggctctagggcagcttagctctagagcaagtgcagcagccctcacatcagcagaggcaacttggctgttgtccaccaacatcatctggacgtctcggtcaagatggtttgattgtccctgtactgagtactttttccccctgattgtcatctccatcttcgga

SEQ ID NO: 35280 - DNA, 659 bp, Bovine  19866880951460
  misc_feature (1)..(1): n is a, c, g, or t
ntcctccgtctcactcccgctgttgctcaggtcctcccactgagccagctccccttcagattccacttcaggcaccttctcttcctcctcctcttcctcataacccttgcccaggctctggggtgctggcccacagcagaagacattctgagctacctctaggagcagtctggcacagaaggagcgttccttgaggctgtccagccggtcacaaaacgttctctgtgcctcatgcaaccagaggcgcacgatgttgcgcgtggccatcatgatcatcaggcgggtgccacgtaagccggacacgcggcgcaggtgctcttgatggttgagacagtccacaaaaccccgggagcccaccctgacgggcagcagctgcaggctgcccagaagctggctcacagaatgcatggagaagcggtagtgtgggcggaggggtgagggcataaagcagttgcccactgcctcccaggcctccaatgaggcccgaaccagggctcttgctagaacactctcccgctccacagaggggaagcgctcgagccaggcctgtatgctgggcatgtgcctgctcagcagtgtggcctgggtcacactgcccagggccagcactgtgaagagccgagagaggcgcgggcagagcagctgctcgcagaagccgg

SEQ ID NO: 35281 - DNA, 1695 bp, Bovine  19866881002220
  misc_feature (1)..(1): n is a, c, g, or t
nctggatttatctgcccgtttcctgatgtgtgagactgatttctgtcaatctcgtgtccctgttctagaaagcttctctctgagaatgagtcccagactcccatggcagctttcagaacaggagctctttttcctccccctgggggtgctcaatgcagtctggataccctggctctgtagtttggggacttaagatggtgaaagagagggaagctaaggttaatgggcttgttacaaatacaacacatgctcttttttctcctacaattttccctatttctcccccaaacaatctgagcttcctcatcagttccttatgtttttcatatttctgagtaatcccagggtcacatttactataatatgctataaaataaacagctatgtttgccttgattttaaaggttaagttcggaaagtgacatcacctcaagcacactattccatagtctcagacaatctaaattgtctcccctctttggcacatggagactgtagggctggtccagtgaactaaggcacacactttagctcttctaataaggctgtttatagctttgggggctgcaaatcaatgtggacatacggtgtatggaaaaaaataatgaggtacattattgatatcacaccgatgctcttgttttagtatttcatattcaaaataggtacacagaacagtgactgggtacttaaatcatcagtcaaacattatacctaaagcataggtataagaattattaagagcatgcatacctgaataatgatatattgcaatgagaaaggtatttgaatttctggggagatacatattcaggtttgatatcctgaataatattcttatctagtgatctttgaatatttagctgttaatgtgatgcttgttctccattcagatggttcttttcaagatacttaaaagattcagaaacagagatcaagaaataaaattagctaccagtgggaaaggaatcaccatattggactcatattggtcattctgtggggcctctgatgttacaaaatgttgcaaccatcttaacaaaaattcacctagaatctacttggttctaggcaactaaagaaacaacacagaatggagcactggaactccactctgggaagcggcttcatattgatggggattctgaatgacagtttgtctcctgagctgatctgtgctacaatcacagccctgtacacgctggccctcaccagcaattgccttctgctcctggccatcacaatggatgcccgactccatgtgcccatgtacctcctgcttgggcagctctctctcatggacctcctcttcacgtctgttgtcactcccaaggccttcatggattttctgctcagtgaaaacaccatctcctttgtgggctgtgcccttcagatgtttctggcactgaccctgggtggtgcagaggacctcctactggccttcatggcctatgacaggtatgtggccatttgtcatcctctgaactacatggtcctcatgaggccgagggtctgctggctcatggtggccacatcctggattttggcatcccttagtgccattgtatatactgtgtacaccatgcactatcccttttgcaaagcccgtgagatcagccacctgctctgtgagatcccacctctggttgaagttggcctgtgcagatacttccatatatgaactcacggtgtatg

SEQ ID NO: 35282 - DNA, 1700 bp, Bovine  19866881006240
  misc_feature (1)..(1): n is a, c, g, or t
ntgccaattcctattggttactttcttcaaaacccccatcagatccattccttgtatgtctcaattatatgtccctggaactcactatcctactttccagttgcagagatgctcatgaaagatgagtcaatttacttttaacccttcaaagcataaaatataacaagatggagccaggctgccagagtttgaatccttgctctaccatatgaccccatcatattggtattattcctgtccttggcgacagtggagttgttcatattgccaaagccagcttccaagattatcttccagctgcaaatccacctgacagcttgttttctttaatccttaaaaaacaaaaggcaaagtgcacactcttcttggtccttcttctgctagagcagatgcagtaagactcctcagacagaaactgtttatctggtgggcattctgcttatcagggacatggcgttcccctgcctttgcacatgctttcatccactgggtgtgcccctgggagccttaaccacctagtgcagtcggctccagtgccccctgccctgaggacgcctttcccagtctctgcagacttccttcctcttcactgagccaggttgagggctggctggagagcatttattgcactgatacgtgattgtccatttatatatttgtctctactgccatattgtgagcctctctgggtgagaacctttctgtctcactcatcacccttgtctgctggtgcccagcacgggccccagtgaactgcagctaatgacaccaggcaggggtccagtacgtgttcagtgactgagggaaccagttcatgctctggcttccccttcaagctgctctcactccagcctcccctggatgctccctgggcactgcagcccctcacgcctcactctctcctgtcttcagaatccaagctggtaaacatcaggaaggacattcttgaacaggtacagaacgagtgccagagccgcagtcagcagctgataacggagctcacaggtttcatgaaggccttccaaaccatcaactcagacatccactccattgcatggtgctcccagaaggtgggcgctcccaatccttcctccccggcttatccagggccatcccgctcacgtgctaagcacactcccttccggtctctgctgagctcccagtggggcttgatgcccttaaactgcattcacctgtgtgacctgccctggccagttctcatcctgttcacatggccctcagtatccttatgatatggggaggccctgatgtgatgagagagggacagtcctgctttcagagacagagttctgctctctgtatgcttaagtagagatccattgccctgtcctcagggcaatgactcgatgggggaggagctgtgctgtcttcagggagacctcggtcagatgggggtctgatcctgggctgccctgatctcggtgggttaaaaggcaactgctgggacctggagcctctagcaggagggagtgcccctcaggatgggtgcagagagatgcacagggctatgagggtgctggtctcatgctgtcatccctgcagctgaatgaggccaatgagcggtacgctgagctggaggagcaaatggaatacacgcggtcactctatgagctcatccgcaaccactttggcctcttcagtgctgagaatgaggcactggacatctcggtagaaggcat

SEQ ID NO: 35283 - DNA, 491 bp, Bovine  19866881085020
  misc_feature (1)..(1): n is a, c, g, or t
nagggtgtggttctgggggacacagctgtcctaggtgcggtgttcctggaaggtttggcgggaaagccctgaagacggtggagggttcccagggaaacacgggcattctaattccctggggcctgaggggagaggaggctggggggagggaggcagtaacgggtacctggaggctggatgggcaagaagagcccctcctctctgaggccacttcattggaagccgagggtggtgaggcaccttgccaaagtgactctcgcatcaggcacacagtcaccttggtgtagccacgcccacttccagccctcctcgcctggttgcccagcagcctgggtctggggactgactgcctgtccctcagtgctgcctcttggaccagtcaggattcctggtttccctggtaacgggaagcacgtcagcagtctgggcgctcccagccggtcctggtgctgcggttaccgaggagacgctgcagcctatctgggccctgg

SEQ ID NO: 35284 - DNA, 4198 bp, Bovine  19866881157049
  misc_feature (1)..(1): n is a, c, g, or t
ntcacacctgtcacatataccatgaattcatatctggaagtatctgcacaggccaacttcaatagaggtgggatctcacagagcaggtggctgatctcctgggacatgcagaaagggaagtgcatggtgtacaaggtatgtcctagagcactcagggaagccaggacccacgatgtggccaccatgagccagcagaccctcggcctcatgaggaccatgtagttcagaggatgacaaatggccccatacctgtcataggccatgaaggccagtaggaggtcctctgcaccacccagggtcagtgccagaaacatctgaagggcacagcccacaaaggagatggtgttttcactgagcagaaaatccatgaaggccttgggagtgacaacagatgtgaagaggaggtccatgaaagagagctgcctgagcaggaggtacatgggcacatggagccgggcatccattgtgatggccaggagcagaaggcaattgctggcaagggccagcatgtacaggactgtgattgtagcacagagcagctcaggagacaaactgtcattcagaatccccatcaatatgaagccacttcccagggtgaagttccagtgctccattctgtgttgtttctttagttatgtagaaccagagggtgtagacaaaagtctttctaagggagattaccctagttttgtattgtctcacatcactatggaattaccaataagaattccatgagatgatatcttttcctcttgatagctaggtttgccttctgtcttctgaatttatgaatattttcattaaattattataaagtatcatataaattagaaacaagcatgttggttatagcctgtcatctttaaataagataaccaagagaatgaacccaagcaaatatctttgtaaatagataaaatcatagctatcttcccaacaaaaaaatgctctgcacattggcttttaattcagttgcttttctgctttaaatttccttgggattccaattctgttttttctgctcccctagacatgacatctggcttcattttccagtctcattgttccgaacagttttctcaacagggaacctcttggctcttggaccacttggtctcttgtgttcttgaactgtcctcacatccttgatgagcatactgctactttacagaagggaagaggaattctgtgcatgactgaatcattgggatagtatagattttggacgtacatattaaggaacagtacaaaaaatgtttgcctattttcaggtaatgataagatgtttgctcaggaggaatgaggatagaaacgaaggtgatgcatgagacttgaaaagatatggcaaggtatttgtgtttaggatacatgatagaaggggtgagttataaaagagggggatttatagaaaaggtccaaagccatcccatcacttgaaagtcaaattaagatcttgaataaaaaaaaaaagagatcctctatctcatagtattagctgtatgagtaaagatgctggttctgctgagccctgaatctatgtggaagtttgagcaggagaccaagtggtgtgtgaaaccgggctacttcatttcctctacatggtttcagacctttcatagttggatggaggactcaggaggcactctggaaaagaagagaataatccaccaaatgtttcatcttcctttgcatcatctgctcttacccttctgtcttcagtttatgtcaccaacgttgtcaacttagggttgggacctttcagtagttggatgataaaatcctaaaattggaaggcttttccaactgatctagttcctttcattcactccataaatatttactaagcacttacaaatataccaggcactatatttgatgctagggaaattgcacggatgtgaaatgcccattacataaacacctacacacatctactggcaatgaaatacgaaggaaagtataacatactatgagtctatctaagtgaagtatcagggaaggaaactttatataatcacttatatgtcacttatgcaagctacaggctgcagatgaatataaggggctaaggaaaaaggggtcagagtgcaataacagagagaggagacagcactataaaggtcagaacattgaagcagtacaaatgcaagtatcctccttgcacttacgccacagtgacgtctaggcaagaagtcaaccagaaaatcatcttcttgtaaaactgtttcatcattctttaggggctgagatctttctctggtctcacaaaaccaagtatatacattgaaactgagaaatagtgactggaagaacttctttgcccattggcagcaacaaaaacacaaattcaaagacaattcttagtactgttcctagtatatatatgacttgaaatactttccttgaattaaaaagatgaatgggtatattaataaagggaagaaaataattaactggttatatttatccagatttatgctccaggaatttggacaggacataaaagaaaaagcaagacttgtagagtggtgatacttaggactcaagatcttttctatctgccttcctccccttgatttcagagccctgccctccctccttccatcctctagtttgtctccactacggtcatctgaagataaatgccagaaaacatatagtgtgcctacacaggataagccccatttctggaaaactgctgatgatacctcagaccaagggaagataatagaaaccgagattaacagaggggcattgttgtactttataggaaatggtcagacaaagccagtgaagaagatggagtcaaaaatttggaatcacatctttatgttattactctgtatcactgttagcatactttaaaatattcactgacttcaattagctttttctgtagcattggactttaatatcaagcaggcatatatggaacaggcacttcaactgattttagattatcctcttttgagatcccagtcttttatgggtacacatcagaccatctgaggccaggataatctaggtctagagataatactgagacttttaccaggatgccagcatcaggaagtataggaacccaggtcttaccagtggaacagatcaattgtgggtatatgtaaggatggaatggacgagttataatggctgaaggactgagaatctaagaggcaaagcagtgaggtcttgaccatatatctcaagacttccagattccacttaattttcttgaaacaaagaaagagcccttacctcagatggggaggggttcagctgcctaagtacacctactgccctgtaattcatttgagggatgaaggtgttcaaggagatgaagaaagaggtgatggttcttctggcaggggaggatgtaggcatatgtacagctgtgactgaaatcagaggtcaaagacacctccagtcacattgccagtcctctctggaggtggaaattgatgccaatgagcagatgagaacctaagcaggatcctggggaagcaaggagctaaatctctatgcacaagtgaaattctccttgtgagaaagccttaagagccttggcatcattctaactgaattcttgagtccaggtactcagattttcaggtattcctatcttactgggagccacaaaaaaagatgagaaggaatttgactaaaaaggtataaaaggagctgcccaatggagattctacaccagcctcactgtccctggggtgacagtgagctggggccctgtcctgggcgaggcatcatggtctcatcccctcagctaacatgacctcccctgaaaatgctgctccaggaaacaaaattttaatgaatctctcaggcatgtctcctggcctccaactccagcaaagtttacccactaaatgagctctgaggcctgagggctatgctgccctcacatggatttaccaaggccatttccaaaatcctactaaatagacagtatcagtgaatgacctaagaagcaagggcccctggttagctttctttccaaattacaaagtgtatcttgtgggttctgtaaatgctgccactccccgtctcccaatttgtgcctctagcctgggccattatcagccagagagaaatgaatttttgcagtgcttctgttcatatcaggccttccttccttgagctttaattagcattaaagcactgattcattggacctttctatactttt

SEQ ID NO: 35285 - DNA, 762 bp, Bovine  19866881167769
  misc_feature (1)..(1): n is a, c, g, or t
naccttggcttgttgtcctagccgtgccttccccgcaggtctcacagggccccagaagcacgaatgtattcctagacgccttctctgtttaacctcccgggtgagccttcctatggcccttttagccctcaagtaaggccctgacctggggtctccaggaccctgtagcctacctgtgaaagcccacatctgaagccacatgtaaccttccagtgggagccagtccccagtgtacgctctgctccccacagcataagccccaggctctggaaggctggtccttcccttggtttctatcctctgcccaacatccctacatgctctggttcttgcctgtctgtcttctcagctcattgcctctttgtttaatcatgccaagggaaggaccttcgatgtgggcagggagtgtgtgggcaggagctcagcagagaggcatatctgcacatcacagaaatgcagagaaaagaaggccttgaaaggtgaggggaggaggcaacccacacagtcacaggggagagattaagccactgggccagcaggctccccaaggagtaaatgactggtttccctcctagctcttgatcccagctgcatgtgtgtcagggtcagggctgtggaggcagagtgtgttcctgaccacgtgcgtgaacactgggctccccagggaaagtgttgatgttttgtggaccttcaggctacctggaataagccctaccttatcaagcaggttatttggctgtgcattcgacactatgtgctttt

SEQ ID NO: 35286 - DNA, 721 bp, Bovine  19866881176503
  misc_feature (1)..(1): n is a, c, g, or t
ncactgatctaggattggagggctctgtaaatgctggcatctcccctggggaacaggagccacatgggtgtgcagaatctccatctctgcccttgcagaacagctttgaaactttaaagagtcccctctcacctcctcacaccacaagacacatttctcaatatccaatcttgattctctcaaccccttgatcacctggcccagctcctgcaccctgctttctcatcttctcagtaaccctcaccctctgcacagactgtgcagctcactgaataagactgaaccctctggcaaatgtcaccatcaacagctagcaccttcaagtcttggttcctgctctgaggtcccctgcgaccctctgatccattcccgtccacagcaccactccactgtgtgttggggggcttacccacctgcaggaagcaggttcctggctgagtgccctcaggcagcgaggcgttgtagaaagtcctctggaactgcggctcgttatcattcacatcttgcaagaccatgctcactgtggcagaggaggagagagagggcaagcccccatccgtggccaccacgattagctgtggctgaggttccaactcatagtccagcaaagcagctgtagtgacaatgcctgaggtggggtctatggagaaccagcgggtgtgggcgcctggggccaggctgtaggtgacctaccattggtgcccggtcaggatcccgggcc

SEQ ID NO: 35287 - DNA, 954 bp, Bovine  19866881220808
  misc_feature (1)..(1): n is a, c, g, or t
ncacaaagtcggacacaactgaagtgacttagcatagcaatgtagaccaaaggacaacagaggatgagatggttggatggcatcattgactcaatggatatgagtttgagcaagctccgggagatggtaaaggacagaaagcctggtatgctgcagtccatggggtcagaaagaatcagacatgacctagcaacagaacaaaaacaatgtagaccaaaatggaacaaatttgacaagtgtttaagaagtgcagccagtgggaggtgttgtctgattagatacagggagtgaaagatgagcctgggttgactcccaggatcttagcttagatgactaagtggatggtggtgccattcaccatgatgagaaacacagaaagaggactagtttacagggaggttcagccttggcctggttgagtttactgtaacactgggacatccaggcagagggaatcagtagacagcttggggagaaggcaggttagagagggagggaggccaccaacattcagatggctaaggggattacagtgccaagagcaggacccagcaaatactgaatgaggagagcaaagaggaacgggcagagagacagaaggagagacggtgtcagggtagccgagtggagcaattccagaagcagggaatgagtagtcatcagtgtcaaaagcagctgagtcagggaaggcaaggatgggaaaatgttgccaactgaagagtgaatgggaggtttggaagtttgagtaaaaaggagattgaggggttggatggcagctgggaaggacagagggacaaagcagagttcttatctgtaatgggaggcttgagcatgtataaattgatgagccagcagaggagggaggcaagagactagaagacatgggacaaggtctggggatgggagagtggctcaggttggcttgaagaggaggagcagatggatagagggagg

SEQ ID NO: 35288 - DNA, 1894 bp, Bovine  19866881261257
  misc_feature (1)..(1): n is a, c, g, or t
nactgactggatacgtctctgaattccccataaactcagacctcgcccccagtctaatgttctctttgataactcccacctctgacagctactgctgtcaggccagagaatgaaattccccgttagttgaagtttctttggaatgaagaagaatgacatcgagcagggggaaaacattagtggaggcaagtcctacccaagtagctgaaccgaccgcagtcctgcgcatgccccattcagctgtgttcctggtgcaccccagtgctcccctttccagtccccaaccccctcaaccccccgccccaccgtgggaacctgactccctacaccggctgctacacctgcgctgagaacaaacagggagcttcagtgcgtcgggtgagggtgggcgctgcctggagaccacagagaaagtcagccgcctcctcccgggttaagcctgcgctgggctgggaggcgaaccataccccaccttcaccccacctcactcctgtttatcccggggagttctcgccgctaccccggccgcccctcgatccccaaatcattcttcctccaggcagcccttttccccagcggggcgggaatgctgccccattccacatcgttgccggctgggggagggttccttgggcgctttgcgtggaagcctgggtgttgggcctgatgtaggaggtgagggtgcggggaacagatgcaggggctacccctgccccgaggcaaagagctgcagggaacgaccagcgatggtgtcacggtcactgcggccactgcggcatagttgggtaccgtggcgcttcccgcgggctaaggtgtctgcgctgcagccggtgatcccagcgttctcggtggccacctcctggttccccgacccaccaggaaaagatgctaaaccctgcggcagccgcgccttaccctgtccctcttaacgctgccttcttacccagcctcccttctccccgctacctctccatccactactaacctctccccaaacctcgccaacacacacagatacacacgctcccgagaattccccggaaccgggacgctggtgaaggggagtggacgggaaggaaatctctaagagaagaagggagaaatctagggggtggggtgcggacagccccccgggcgggaagcaagacagcccccgggcgaggggcggaggggcgctggtaagccaggagctggagaggggggcggagagtcacctggctggacagaggcggtcccgagcttgggagggaggcgagcagaggcggggcgcgcagaggaggagcggagggacaggggccaaggctgggggcgggaaccaggcggggcgcgagcctcagccggaatcgcggcgggagcaggtggagccgcagcgggagctcgcccgggcgagcactgggaggcggcggctgagccgtggcaatggagctgctaaagccaaaccggagcgtgctgggatccggacccgggccgggggcttccctgtgccgctcggggggccccctcctcaacggcagcggcaccggcaacctcagctgtgagcccccacgcatccgcggagccgggacacgaggtgggtgcctccctaagccccctccgcgagctccttctcactgcaccccacaacactcacagaggcccccatagccttctcaaagggatagcccacactatcccttcatagtactccctccgtccccagacagctcccctgacacatctgtcctccacagctcataaaactccatcccagcttcacactacctgatcagagtcccttcacaccctagccccctcgccacccccagagctcttggtcacccccaaaacgcatcaccttcaccaacacacagcccactgctagacagagacagtgggaaagcaaggacctcctctg

SEQ ID NO: 35289 - DNA, 710 bp, Bovine  19866881269589
  misc_feature (1)..(1): n is a, c, g, or t
ngtggtggggactgggagaagcaagatctgtccctgtgattgatccttttctttcctcctgcagtggaattcccagcacctaagaatgaattggtgcaaaagttccaagtctattacctggggaatgtgcctgttgctaaacctgttggtatgtgtgtccttttccacccaggcaccaccaccttgatctcaaagcccttcccccaccctctacctcccagtacctcttttaccagaccttcctcttgcttgatgtcaccctgctcttcagagtgcatcccaccttctgtacctctgtcccagcttcactctgggtcctagcttccctgagtgtgaaccaggcatatagggagacccattcttgaaaagctttggttaggttgggaggtaggtcttcgatgactaaaacgctggagcagccaggagctgtgtttggtattacagcaccaactatggactgtgatcatctagaaagggagcagtgagcatatttgtcaatatgctttgtgttggtaaagtacttccttacatgtcatttaattcttgaggatcctgtgaattttggattatgatgatacccattttatagttaaggaaactgagagtagagactattaggttccctctgatatttgtaatactttcacagtacctgttattggtcattcacttagcaaataactatgaggcctaccatgtaccaggtcctg

SEQ ID NO: 35290 - DNA, 881 bp, Bovine  19866881317315
  misc_feature (1)..(1): n is a, c, g, or t
ncctcggcctcccccgccgccttctcctctccctcatccgggccctgctcttgggtgctgatgatcaggccaggtcctcgcggccctctgttggccgcattgtgggcggagagctccagctcagagtacaggtgcatcaggcctttggggcccaggggtgccatctcgggttcctggctggcctcctcagccagggtcaaggtcacattgcggttctggtcgcggtgggctgtggcggcccgccggagttggttctggccctcctttagccatttggcgttggcagggcctggctcgggcccaccaccctcgcccatggcgctgcgcagatccttgggtcccacggccgtggcctgcagcttggcgttgagcagctggttgtgggcagcgtgcaggggcaggggcaggctcaatgcggggcctccgtggctgttggcattaatggccgactggctcagggatgatggaacagacatggcctcagcaaatcctgcaagcggggagaggagaccatgctgagcctccaggtcagcatagcaacacccctgcttcagccccaggcctgtgccctgcacctcctcacctccctgcactcagtaggccagcacataccactgtgtcctgtgagctgttgtcccaggagagtaactgggctccgctctgtccaccatcaccaccacacccactcaacaaccacctgcagtggccaggcccaggccaggtccaccccatccccaacccccagccccgagctgccagggatagcacagccagcccctgatttgccctcgctcccaatggcagagactccataacaatggctctctgtgcatccccacccccaagtcatccaactggggcttactgtaccaggagtgcgg

SEQ ID NO: 35291 - DNA, 1656 bp, Bovine  19866881317500
  misc_feature (1)..(1): n is a, c, g, or t
ngaacttcgggctatacttacaaaactattgtcatcaaaacagtaatagagaacctggaaataaacgcatgcaattctggtcaattaatctacaatagaggaggcaaaaacttacaatggagaaaagacagtatcttaataaatgtacagtttacaagtaagagaataaaataactggacagctacacgtatgagaacaaaatttagaacattctctaacaccatatacaacagtaaactcaataacacctctgccttttccaccccagttcagcaagttctatcagaggcaaggaagttagcctcaaaatatcaacaattttatgacacacatcggggacaataaagctttagatcttcagtcaaaagggcttgtttatattttgcccccaatttaggtatgtttgctcactcaggcagcatagacaaatgaaaatctcaatgggaggggctggctactaactacaccaatgtggatagatcagaatgtatggtctattcagagagaggttgactagtgtgagggaacagggcttaagttatgactcactaacatcagatgcccaaccgaagcttcttattcagatgaatgagttagaacaaaaagttaagagtttcagtctaaatgaggaccctatactttaagtaatgattgagaagaataatcgtcccctgcctcaagtctcctttttttccccctttgcttatgaacattactatttgttctttcccattgtaccacgtcttgtacaatattcagattgtgataacctcccttaaaatttccttttctctcttctccttttccttttattctgtaatgcttttatttctctttctttcctttttgcttgaatttcttcttttatggcttcaaaattccagatttaagtgcaacctaagtgcttatcgctgctctagggtgcaatattttactctcgagaactgtgcttagcaaaatgctccacttgatacacacaactctttctccacagaacattcagcactgcttgcacacaaccccataaacagcagcctacaaactctttgtgtgctattgttctctgggggcttagggtgtgtttgggtgcatgaagatagtattggttatataaaaaaatctgtgcctttgatcttttaacataaaatatacaaaggtaaatagataagcagaattgtctaatatttctatagatacttatttttccaaaggaactgggggaaaataccagactaatactaaacttcttttctgttgactgagatgcctttgacttctgagctcaaacatagaaatggtaaactcaaaaatctctaattatcctacaaaataattaaaccatctctatgcaatcttgttcaatttttagcattctataaaattgctttggaaatagcttaaagttactttgaaagacaaggtagatgcatggtgtttttcatttcaaaaagaacaaataaatttgttattcatggattctgagagacagaactcagggaaagagtgagataagattctagttataattttggcttaacttttccagctcattaaaacataaaaccatactgttggcagagtcttgtgaaaaggtcgtgtggaatgctcactgaattttgtgttctcctagttgtactgttttgttgttatatttt

SEQ ID NO: 35292 - DNA, 752 bp, Bovine  19866881320200
  misc_feature (1)..(1): n is a, c, g, or t
nacggtgatggaagtgcatcttgagacagttcgccgcctcctgctgttcttgcccctgaggccaccaccatcctgtctcacgcctctaaaggggtcccgcagacttctgcacagttcgcctgtcctagttgacgccacctccctccaaccggctccctactttcccacgcctgcctagcctttcccctctgggctgcggaggctgagggtggcgcgggtctccctgatgtaactgagatggggggctcaggctcctgagagagggctgccagggccagttctgtgtccttcacttgcaggaggaagctgaaatcccagccaaggccttccagaaagcgccggagcccttaggcccggtggaacttggcccacagctacccgaagccgaagctgaagagagctcagacgaggaggagcccgtggagtccagggcacggaggctgaggcgtaccgggttggagaaggtacagagcctgcgaagggccctttcaggccgcaaaggccatgccgcgccaacacccacgcctgttaagccacctcgccttgggccgggcccggagtgctgagggccagcgggaagcccagcctgctctggagtccaagctggagccagaacctccgcaagacaccgagggaggatcccgggagacctggggctgccgaagcggcggctgtgctccaagtagagagtacggcctgatgggcccgtgctgcctgcctcccctgtgcctaatgctagtccccaaataaat

SEQ ID NO: 35293 - DNA, 974 bp, Bovine  19866881541753
  misc_feature (1)..(1): n is a, c, g, or t
ntcctacgtccttttctcattctctacttggtcttcctaggaatgcactagaatagtcctgtcgaagaatggtgttgaggaagtccttgctagacctagcaattgacttttgagatccagtgcatataatatgggagaaggcaatggcaccccactccagtgttcttgcctggagaatcccagggacgggggagcctggtgggctgaggtctatgtggtcgcagagtcggacatgactaaagtgacttagcagcagcagcagcatataatatgtaggaagattttactcatggattttccaaatgataacaaccaatctgaagaaagagggtttattgtatcaactacaagaaaaattacaatatcaaagcaatatttacatatagtagtagaaaaggtcatctttgctcgaaaagtgtctttgctgctaataaggttgcaagctctattcttccctataggtgacttggttaggtgatacagatgttcaccaggctgatctattaaaccaaacagcataaagtcagtactcctggtaaatgactctggatggatttgcttctaatcagtttttcctggtaagtccaaggtagtaatttgaaaaatgtgctgcctcagagggacccacgttggtcaaaaccacacagagtatctgaaatggctcataagctactggttgttctggaaaccatcagaaggtggatgagatacaacatagagaggatagatgaagggtacaggttaacaccccaccaatcaggaggctttgcagaactaggagagcagggattcaggaaaagtgtgtgtggagcaaactgcactgtatgtacatctttttttttttttttttaacagcttggttacagctcatagttttattcagtaaacaaaggatagtacaccccccaggcgtgagggtggagatcccaaaggagaggcctgtatgtacatcttaactacacttaactgtatgt

SEQ ID NO: 35294 - DNA, 1993 bp, Bovine  19866881546539
  misc_feature (1)..(1): n is a, c, g, or t
nttcccttgatctctttaacttctcctttctgaatctggttagtcagctgattctgcaagtccagcacatgacttctgagctcccaggtccagctcctgtacacagtctccagtttattcatagccatgacctcccgagtgttcttgaacctgaaaatgaagttctcattcactaaggccttccataaatcctgtaccctgactttaagttctgatatctttcaaaatacttcctctggattcttctttggcatgcttaagaatcctgcttttcagctcctgaacattgtggctatagcagggattaggaggggccattgggggagacccttcccagaggtgagcaaagtaatagatgtggttcttgacatcaaacttaatgacatcactgaagtgacacacccctgagcactgttcatgtttggctgctgcgattgtcatttcatccaatatctcttgcagccacctttgcctttccatactttgatctgtatctataatttcttctatgttgtgatgaacaaataggcatcttggtgagatattcagttgtttcatcctgagaaaggcatggagagctatttgcagaatatcttgtatttctgaaagatcctttcccaaaatattgattagagttaagtttccaagtccaataacgaaggttgccaactcattttcctcattttgggctttgttcatgagctctgagacttgcagtccttctgtgtccacaacaagcataaaatcaaaagcccagctgttctctgagcatctcgtctactttcagaagatgcatgtaggcaccccaagtatgtcttccagcactaaggctcaactgcagcccaaacattgcattcagcagagtagactttcctgagttctgcaagccaaggacagaaagaacaaacacacgtttgcctccaagtttttctgaggccttgtcaaaaacagctgccacccacctcaggggcacatatgaagcatccccatccatcagttcaatgggagccccggatatcatcaggtcagcagccatttggggaaaggaaagaaacagtgtatttgtttgggaggaagcttcttccaaagcttcatagatctgacccagctctcttaagaggtgctcaattcccagggtggaatcactgatttctttggaaacagcttctagctcagcctcccagcatctgagggagtctctctttgactgcttctgcttttctgttcgtacttgagccaacaaagaactgtgcctctggtggagcttctctaactctgttgtggttagttggtccattgacatactcagcacctgcagaaagtagagctctgtgtgggtctccaggtgggactgcaggctttcaagcagggacttcatcaggtcgttaaggttaatgactttgtgatactgttcacagcgtatcttgagcttttccttctcaatttcattcttgtattgttcaatgctcttgtttcctttttcttgcagctgatggagttctttatccttcttacaccagtcacgccatagacctccttggagaggtagtaacttcccctttatctcagataattttacttttctcaagatgtccataaggatgtttgcttttttccctgcttcttggcaatctctttggtcctcatcaataataaactcatacttccttgccatgttggcccagttactcagactataaggagatccagatttcttcaacagctctgctaatgtagctgtaattttatcagctaattctatcttatttagattcttaattccaattctcactttgtgagcataattcttatccataatattttctacattttcaaacaaacagatgagaggtttgggtgaattccaaaattcaagtagaagggagctattcattatgtcaaaatcagaagttgccaggaggataacagtgaccgaggagacctcctgcaggaaccttacctgcctctcatgtatttcagcatttccatggag

SEQ ID NO: 35295 - DNA, 1544 bp, Bovine  19866881700414
  misc_feature (1)..(1): n is a, c, g, or t
ncaaggacacaaggctgaagggagagcgtatggagagcagagggttctttggcaacctagcgacagatttctgcatctgcttcagggcctgtgccacgtcatctgggcccagcggctcctgacagcccctgcagagagccagccacttgtccagcagctcctggcgtcgcactggtgggaagggacccaggtagttgatggcagctgaacacaagagggtatctccgagcaccgtggaggagtgacccttcaacttctggtgtggaagggaagaccagacagtgtgtgggctggcggggagggttcaggtagaaggtctggtggggagggagcaaggcagggtgtgggggaaagcgtggcaaggagggcagagtgggacagagggaggcggtgagggcatggggaggggcagagggagtggtctgcagtgcagaaatgagctttagggggcaatctagaaggagctggttacctggagttccgtagtccaggaatgcataggtgtgagcagggcagcctcaaccggccacttgtgatgtttgcccactgagcctgccccagattctcgaccacacgcttgtgggaagtttgggcattttccagattcttagacagggccaaactgtgctctagaatctcctgggcctggaactcatactggcccaggcgggcctgctcccgagccagtgttgcctccacctgccgcagtagcaggcccgtgggcagtcctcggcgctgtgccagcccatagcacagaacggcccagagccaggctgccaggcttgctataggtatgctcactgcccgcaagtctgcatcgctcatgcctggagctttcagagccaggtttaacttgattatctctgcgtctgtcatcttctccttggggaagaacaccagctcctgggggagtttgtgttaagaggggtggaggaagacatggatgctctgaccttgtcccaacagcctcgctctgccaagttgccgctttatgcctgcatttctcctcctccgtggagccccacatttcttacctgataaaaatcctcagagcatagcagctgcttggcactggcccagcctgtttcacggtggaagaggtcgcacagagcatcagtcacctggaccacagactctggtggtgctcgatagcttcttatctcctcaaagtcagccacctgcagctggctcaggggccccagaaatgccttgcccatctaaacaaggagagacgtgcagttgcagtgagctcccagaatgtcctttcttccttcaaggtatttccaggagggaccatcttctcctagggtctccaagggaccacaccccaagccatcctattacctttgccccaggagactccatgacaagccaacccatcctctcctctgggcatcctaggagaggttgttcccttccaagaggggatcagtgcagggcaggtggtaggaagagcgcacctgctctaggaaagcctcatactgagcccgcagggcatcccgctgcttggtcaggttctcaatgaggttctcctgctgccgaca

SEQ ID NO: 35296 - DNA, 1562 bp, Bovine  19866881739207
  misc_feature (1)..(1): n is a, c, g, or t
nttccataagtttttggtgaaagagttctaattaagctgaaccccccatagaaaaaaaaagaaaataatataaatatcaaaataaaatacatacatagacacgtaaagccaaacaaaagctagtgaaaatgttataaaaaaaatatgaaaacttttagtggccattgataatttataaaatttataaattttttaacacttaaaatgcttttaaagagttctccaatttggaaatttatatgtactatattaagaaaaagcacagaactctaggttatgtgaaacttcaactgtatgaaaagattgcagacaaaaatgctgaaaattaaatgttgttaactgttaaacatcattacatttgttgagattttgatttatagttacttgcatttaaagttattttttagcttttttgttttctaaaagtgaaactatactatttttcttcatcaatttcatgggaaatatacatttattgtaatctataaatggcatggtcattcattcttcatacagatggtgaaggatagagccttgatcttactcttaatgccatcaaatgaagcaaacacagagatgtggaaaggaaatattgacacctaaatatttgacaaggtaaggtagtattcacagataaagaatctaagatattaatggattccaaaagcttaatgtccatgtacaatttttggtgcaaacacttgagtatattactcaacaattcaagaatgaacaaaatcaagaatgtcagaacaaggaagatcaaatattgaaggaccaataataagacatgaaatcacttaaacaaaaaagcctaaatgtgtgcagtacatgccttccgtatttcctacaaatatcacacaaaaatctggaagtaggtggaagtttcttggtcattttctctctttatatattttattaataaatttgatgatttaaaaatattcctttaacagactcacagatatagaaaacagaccagtggttcccagtggtggagtgggggccaatgtagggatttgagaggtacaaaccactggtgtgagataggctcaaggatgtattgtacaacatggggaacacagccaatagtttgtaataactgtaagtggaaagtaacctttgaaaattgtatttaaaataaaattttaaattaataaaaattttaaaataaaaatattgctttaagtatacctctaacattactttcataataaaaacaggaacaaatggtattcctaaagggtactgaacttttggatatgatttgatgaaaagggtgctgaaattaaatgcaaaaggttaaaattttgctgaagctttatcacttattagtgttttcaatatatgattcttatctagactaatcatttcagtgctgtatcctctatgcatgtgtgaatagcaacagctgtttgatgaagatgaaatgagatgagttttgtcagaaacaatttgtcagcttcaggtgctgtttagagaaaaacaaggttctcattgtgccttattctctttcttaagatctctaagaacagggaaaacacttctgcccttaaacttta

SEQ ID NO: 35297 - DNA, 2084 bp, Bovine  19866880403667
  misc_feature (1)..(1): n is a, c, g, or t
ntcctctgagttttacagttagtttcagcccaggtattaaaatatgatctgctgttgggaaccaaaaggctacaaagcccttactggagttgcacttaatcctttctcctttccccgctctcttccccaccctccccccaacccctttgtggaacaagaaaagctgtgacttacttaaaactgctgttagcatgaaaacattccagaggagtagggctggatgcatggggagagggcagcagctcgacttcagaccataaaaaggtaagtggggacttcgtttgccaatatgggaagataatgctggtgaatgggtggtgccaggaaggtatcaccaggataaggttttatgggtcattggaaagaaaagtgggctaacagcatcctttttgaggtgatagaagcagagtagaagaaagcctgaaagacaataaagagaaaaaaaaaaatgttaaggaaaaaagctaaaagtagtaggaggggaagtgggagctttgagattcagggtaatttcctggcagaactctagcaaatgcctgtgcaaaaccacagtaatctgatgatgctgtcatcctcgtcttttcctgaagccaaaaggctgctccccaggcttagggaagagggaaactgaaggcattgatttgcctgttcagtagcttaaacacatacaaatcagcctgagttagttattccagcttattttgtgggctgttgctcaggcacttgagtatcaccagtggtgggatattgggtaatttgttgcagtatagtattccactggtagtaaatgtaaagatatctttcacaaattttctcttccctttgccttttaagcgcatatagttgttagaccacacatttgacagctgatacaaagtgtcagacatggctaaagtgaattagcacacacacacagaggacccataaaacaaaggcagctttcctctgttcattctatgcctaaaacagaaacttcttccatgccagtttccaagagctctacaaaccctgctgacaatttggatccttggcttaaaacaatgttgagagttgcctttgactttcttctgtgctaaatatgtgattcctgaacaaaacgaaggtcagcactgtggactctgatgaagacacatgtcatgagatgtgagagtataagcagatcactgttcagtccgtgccttctctttctttcattgtcttttaagatttattgagtatattaatatacaaaaattgcagaaacttagtgtacacattttgatagggatatatggatgtactcatggccgcatcggggctttcccagtggtgcagtgataaagaacctgcctgccaacgcaggagacgttaggagacatgagtttaatccctgggtcgcaaagatcccctggagaaagaaatggaacccactccagtattcttgcctggagaatcccacagacagagtccacgggcgggctacagtccatgggctcgcagagtcggatgtaactgaggacatatccaatgcgtgacagcattaccacaattaaggtaataaactcgtcccgcacttccaggagatttattttgtcctcttgctcttattcatggtaagaatacttggcatgaattctaccttcttaataaaattttttaattgatagttgattaaaaatgctatattaatttcagatctacaacacagtgagttggtattttcatagattatatactcaatataaagttattgtaaaatattggctatattccactgttctctgaaaggaactagtcatcagagcagtgaagatcacagcattggcctttccatgcagagaagcccactgggctgggggtccattgtttatatctgtagatccactccgcacttttcccccattctgttccctgggaggctgcactctggctaacatcactctagctcacttgtcctctatcttccattagatttggccaatgagagggactggcaagaaatcaaagagtgagaaggatgagtactttcaaaagtgaatttcctcccacacagcctcttccaccctccctcctttcctccaaggatcagcttgcagtgactgcag

SEQ ID NO: 35298 - DNA, 912 bp, Bovine  19866880761690
  misc_feature (1)..(1): n is a, c, g, or t
ntaaatacattaaatgcaaatgattcaaacccccaatttaaaatacatagattgttgatctatgacagtacaacccttatgctactgaaccctttacaatagatttttatttatataagaacagtctctctaacatgctgttcttcttcaaaatgggcataactttcattgtactcttgttattttatatatattgatatattttagaattttagaagcagtggtttcttgcatcttgatattacatcctacaaccttgtggtactctgtaattttaacttcactaatttgtcagtagatcctcatgggttttgcatgtgtctcatctatgaatacttgcagttctatttctttctttcttttgtttataacttgttcttcttggcttactaggatgactatgttctctaaataatattaaaagtagcatcagcagcaggtatccttgtctgatcgctgaatttaaaggaaaacatttcttatattttacaattaactaacatgctattaatatttgataccctctatcaagaaaggaactttaccatacttgttattaatttaaccaaggggtaaaacagaattttcatcttctttgtgatgcttctctctccacagtcttgtaaatagattgatttttctctaagatattatcagcccaaaatactaaccttatttggaggaggagaacagtgctgtctgatgccgtaatgagcaatattgcataggaacctggaatgttaggtctatgaatcaaggcaaattggaagtggtcaaacaagagacagcaagagtcaacatcaacattttaggaatcagtgagccaaaatggactgcaactggaataggtgaatttaactcagatgaccattattcctaggactgtaggcaagaatcccttagaagaaatgg

SEQ ID NO: 35299 - DNA, 1479 bp, Bovine  19866880881373
  misc_feature (1)..(1): n is a, c, g, or t
nataagaatagcagcagtggattgacacttcggctcttccagaacagctgtccagggatattccagccttaaagtgttatccgttaaagccagaattgatatttccaccccaccggggaacagttcagcccttaatctcttgcaaggagcagtcgacttgagaaccaacagcagctgagggcctggccaaggccaggtaacctgtgagtgagtgaacactgaggaattgagaggtttctcactgtctctgtctttctcactagtctttctttccaacttccctgtaggtatggtaaatccaaatgcataggtctcagaaacggtaacacattttctctgggcaccaagcaatcttagcatgctaagatgcttttaaccacccactgttgcttcttcaccagagcttctggcatcaatcaagaaaagagaccacctcatatgccctcctcaatcttgttatgtgccgtccaaacacacctatgggaggagaaatactcgcaggcacatgatgtgaattatgtctttacacgcctgatctactgactattcctgagccctcgtgcaatatgaaagagaacacaatgcaagtcaaacctgaattgattttagccagatttttccatgaacaggggcttataaatcactatatgtgtcaaactctgcccttttccctgatttggtaatcactctcttagtaacttgggagatctaaactagatatgttatagctaccatgggcttgactgggttatttatttaattcagctgagaatcagtgatgttaggttctattaattcactgacaaactatattgaagtgaatgcttcagagccaacttctttttgagatgtgcagtaaaaagtagttctccatttctggtttcacttttttgttgtcctaactatccacataagaaaacaaaaccgctcaaatgctctcaagtttcacagacatatttttctttgtatgtttactcagaaaagagtccaagcctacagtttcattttcatattttacattaacagccagaggaagattccaagccaatccaaaaatcctagttattctgaattgaagctacaattatgaaaacttgttataaccataaactatgtctggcttttaaactctctccattgcacagatataatttaaccacactttgtgttaaaagagttttaatgatttttaaaagagggtttgtctcttcttcccttttattccaactgacttgttcaagttctgtggtgctgagacctggagttaagtgaaatattgatactatattattcataatggactttgaaaaattcaagtgcaagaagagaataaaagctctcccagtgtttgcctattgaaggaagaggagaaacgaataagcagtcaaagctttatgattcaaaacaatggcatgtagtaaattcctcataaacaggtaaattctcaaggatcaccttttaaccccacaactagaggtt

SEQ ID NO: 35300 - DNA, 1312 bp, Bovine  19866880901361
  misc_feature (1)..(1): n is a, c, g, or t
nactggaatgggttgccatactgtcctccaggggatgttcccaactcaggaatcgaacccacatctcctgcattggcagatggattctttagcattgagctaccagggaagcccatatatataactgaatcactttactggacagcagaaattaacacattataaatcaactatatgtcaataaaaatatcgataagaaaataattaaaaattctgtcaaaattacttatttgcctatctattttcctactagatttaaaactccaccagaaaaaacaaactgttaaaaaacctcaaccaatgtttgatccatcatttccttcccagcatttaatataagcagtaagtgattcaatgaatcttgaaagccacagacaatcccacaataaccaagcactggaccagaggcccaaaacagctcagaccaacacccatggaaactcatgactcaccggaatacagtccttctgccttacggaaactaactgcttctgttccgacccacttgatatgcaagtcgacaactggaaaggaaaatgtgagtttgtcagtatggcaagatacttctgaaccaaaagcaaaactccaggataagagtgagaggcgataaaataagctatatattcatagtagagtcaaattttatgcacagcaatataaatgtttcacaggggagggagttggggcaggtggagaaaacgtagttttcattaatgtcctatagtgatctcctattgccttcaaccccctagtcctgctgattcagtggaataaatctgttaataaaaagaatgttttaagaaattattaaaacctcagtctcttgcaatctaaagcaaatgcatttgtaattagtccaaagtttgaacacgctattagaccatttcatttttctcaagcagtcttccttcctcctcctctgtctcagtgtaacatccaagacatcatgttgctcagggtctctggtcacacagctttcctctcaatcaccagggaatgatgttgatgatctcatgcaaggtaactgctctgatctggccctggctactctgaattgtgttgcattctacattgtggcactccatattcttgcctgggaaatcccatgggcagaggagcctggagggctacagtccaggggtgtggcaaaaagtcagacacgactgagcacagcaccaccactacgttgtggctaatcttacatatcctttggttaagtaatggttttgtactgtgtttctattctgatgctaaccaccgtagttagcactagattctacagaattaaggacacagtccccaacaagactac

SEQ ID NO: 35301 - DNA, 3055 bp, Bovine  19866880987307
  misc_feature (1)..(1): n is a, c, g, or t
ntaggtagataataatgtatcagtattagttcactggatgtgataaatgtaccatgtgtcagatatttaataaaatagcaaaaatgggagttgggtatatgaaaactttctgtactatctttacaattttcctataaatctaaaattattctagggcttccctggtggctcagtggtaaagaatctgcctgccaatgtaggagacacaggttcgatccccgatccaggaagatcccacaagctatgaagcacctaagcccgtccaccacatctactgagcctgctagagcctgtgtgccacaactgctgaaacccacgtggcctagagcctgcgccccacaacaagagaagccactgcaatgagaaacccgcatactgcaactggagagtggcccccactcggtgcaactagagaaaagcccttatggcagtgaacacccaacacagtcaaaaataaatattaaaaataaataaaactattctaaagttaaaagtatattaaataatattcccagtctccatgctaatcctacagaatcacactatcatgagtggaattcaaccacctttgtacttaacaagacccccaagtttggaaagtactagtttaggcctaatctgagatccctgctacatttgagaggcaagaccctataggccacctccttggctgccacaaagaaagttgcagactcttccacacacagggatattctcaatacccaaagtaaacgttcagcttctagaacaatgctggcgattccttttttgtgtgtattttattagcatcaaatgcctttggatagaaattacgagttcagtgttttgcccccagattgaatttgaacctctgccataatgatgctaatagagttacccctaataaaatatctaggcggcagtttagtgcttctgtgattagtaaagcaagcatttggagatttaatttttcttacttcttggctcctactcttacctgcataatctcttggaataaaagagtaataaaaccaatatttataaaggttttccatgactctgtgaaaatttttcaacaggcttgaaagagcgaaataattactttctgtaatggattgctgacgtgagcatacagaaatgcagtcattcattagttgaattcagatatatcaggatcaaattatattgcaaactgtagcaacaccaacaacaatagaagaggaaggcggcgtggtgaaatggaaaggaaattaaaccaggggtcagaggcctaagtagtagacggtggtgctgttctggccagttgtgtggttttggagaagcgatctggactcaatttcacatcaacaaaatgagcagtttggaatggacaacttttaagacccttctgaactctgaaattttgagtatggactctcaaaaccaagagttagtctaatgcctaataacatagtattaaaacctgcatttataaactcaaaactattcataactgataattcagaaaccaatcacaaaatataggtgtcaaacttcagccatcttaatccttgagatttatatcccacacaagaaagagacacagccaatatcaaagccgatttaaagatgcctttcaattcattttgccactgttacggatgctgccatgtgagacagtgaaaacgcccagaatgaaagctgacaacaaggagagaaaagaaaagccccataaaacagatgttttaaacatgagccgggtgttgatgtttatttataccttgctttatagcttgacattgttacaatttcaaaataggagttcaccctgtagacaaagggcaacagaagcaaatagaccaatcacaaaagaaataaaagtggtaaagaagcatatggaataatgctcactctaacaaacagacatgcaaattaaatcaacaaggaggtaccgttatttttctttgccatttttttcttggtacattcctgaatgatgatgatatgctgaaactatattttcatacatcattgctggaaaaagcataaattggtacaaactttttggaaaatatttaatgatgtatataaaatagaatttagggattcctgttctaattctgtaattccactaagaacacaggagaaagcaatgcatatgaagacatttattgtagagaaaaattgcaaaaaaccactacatatccaaaaatagatgaaagattgtaaaattgctttagtcagtgtctgactctgcaaccccatgaaccacagcatgccaggcctctctatccatcaccaactcccggagttcacccaaactcatgttcattggagtcagtgatgccatccaaccatttcatcctctgtcatccccttctcctcccgccctcaatctttcccagcatcagggtcttttccaacgagtcagctcttcacaagaggtagccaaagaattgaagtttcagcttcaacatcactccttccaatgaacacccaggattgatctcatttagaatgaactggttggatctccttgcagtccaagggactctcaagagtcttctccaacaccacagttcaaaagcatcaattcttcggcgctcagctttcttcacagtccaactctcacatccacacacaaccactggaaaaaccacagccttgactagacggacctttgttgacaaagcaatgtctgtgttttttaatatgctgtctaggttggtcataactttccttccaatgagcaagtcttttaatttcatggctgcagtcaccatctgcagtgatttgggagcccaaaaaaataaagtcagcaactgtttccactgtttccccatctatttgtcgtgaaaagatgggaccagatgccatggtcttcgttttctgaatgttgagctttaagccaactttttcactctcctctttcactttcatcaagaggctgtttagttcttcactttctgccataagggtggtgtcatatgcatatctgaggttattgatatttctcccggcaatcttgattccagcttgtgcttcttccagcccagcgtttctcatgatgtactctgcatagaagttaaataaacag

SEQ ID NO: 35302 - DNA, 1368 bp, Bovine  19866881036040
  misc_feature (1)..(1): n is a, c, g, or t
naatttgatttttgaacattttcctctgaatttaagccttttgggtaatgcaattggaaaacaacatttctttacagtaaaaatgtgtttggcagcccctctatatacaaagttcaactttagggcaaagaaaaagagacgctcattatgtaatcaggtcaaattattggttactgggaagagttcctggtttagccttcatctattatatgaagtagatattagatcttttattctgccagtgccattttaatcacagcagttctttattctaaatagtttaaccttggacgacctttccccagggcttcttatttatttagatattgttatgcaacacacacacactagcatcagtgaaggcagggtgatcccttcttaactttcacaggagggattgtacaatacataaaggagctggttaaagaagtggttttctaaattcctgggtaaagaggggcagaggtgagagttgaagacctagagcagagatccctccaagttgcagtttaagtgatggagaaatggatttggagattttgttctttctctctcttctctttctttctctacttaactcaatctcaggacacacttttagtcttttcacttaaagcaaaaggctcatgtttgctgggtataacttgcaaatgactttgaaaacttttgaatcaaatgaaaaaaatcaggaatttcatgtaaaaatcatgattttcaacttctgatgaaatattagagaatctggctacccttggtccagagtccatcaagacaactactgccaagttttaggcaataaccaaagtcctccactgaaccacagtttcaaccttgtttgcctcccttgtcatattaaaagttgggttattttaggcctttgggattgtgctttatacagctatgatttcttgcactctcatttgttcatcgaacaaatatttactgagaatcactgttccaggacctgaggataccacagtaagcaagcaaatgtggtccatgccctccttgtgcttatatcctagtgaggagagatatgaaaccacaaataaaatatatcatgtcaggtgaaaagcgttataaagataaataaagcatggtgtctcagacattactatctacctggacacaggatgatacttcttgcccacttgcactttagttggttcggccaatgagctctgagtggaagtgatctatgtcacctctgggtggaagtgcttattttctggccttgatgttcatctgtctctggcaagtgtggtggctcacattgataaagacttggtggggaggactgcctgtgagggttgcctagactggcagaggatttttgttaagtgataatgtttgtcttaagccactggt

SEQ ID NO: 35303 - DNA, 1718 bp, Bovine  19866881088612
  misc_feature (1)..(1): n is a, c, g, or t
natagcaaaaagtataatgttgaaaaagaaagcagttaagtgatgagagtaatgagtccttggggaggatgatgtcatttggtgtaaggtgattgtgaaaggcctctcagaagtgttatttgatcagaggtctagaggaagtgagagagtaacccccaaggctatcctggagaagagtgttccaggcatagaacagccagtgcaaagttcctgaggtgggatgtgaaagggtatcaaagaaatacacctgcaggagcagagtgagcagggtaagtggtaggagatgcatgcgggaagtagtagggaccagaggatgcacaatcctagtggccactctaatgtctttgactttcattttgaatgagatgggagaccaatgaaaggttttgaacacgagggctgtggacatgactggatgtattgaaatataaaggattgctttccttgctgatttgagaatttattatagaggatagaaagtgttagtcactcgtcatgtccaactcttggtgaccccagggactgtagcctaccaggttcttctgaccatggaattctccaggcaagaatactggagtgggtagccatttccttctccaggggaatcttccctacccaaggactaaacctaggtctcctatattcctggcagattctttactgtctgaactaccagggaaacccataaaggagggaaatagggagctaatttggaggctagagcaataatctagacaagagaagaagatggtttgggtcatgggggtgtcaagagaggttgctgagaagtgactgtatcctgcatgtattttgaaggtgaaaccaactatacttgctgctatggaatgtgagagaaagagagaagccaaagatggttccaagacttctgactcacagaaatggaagaaagaccattgccgttcactgaagtgaggaaggctatgggaagaacaggttttaggggaaaattcaagtcaactttgaacatgtaatttcaagatgcctattagacatccaagtggttggtttctgacctgcctgccctccatctgtgaatttggggcagatggaaacagtcagtgctttttaattgtctctgattccagcacttaagagaatatgacacacagtaagaattaacttttgtccagtgttgactgaatgactaatgggagatgagagaggaaaggaatgttggcaccagaacatgaagggcccttgaaagagaaagtgaaagtcgctcagtcatgtccaactctttgagaccctatggactgtagcctgccaggcttctctgtccatgaaattctccaggccctggcatctatctctggaatggatagccatgcccttctccaggggatctgcccaaccaagggattgaacccaggtctcctgcatcatgggtggattctttactctctgagccaccagggaagggcccttaggggttgggaaatgaggagcctttgagagtcttccatcagggaagtaacagggtcaatgctgtcatttgggaagactgacttcataggtgtcccatcctgcttccaacttgcaggaggctgtcaccacctactcactgaaaagccactctcccaaaaacttcctttcattcccaaattttctgatgtccccacagacggcctgatcactgacttgtggctctgtagctcttcaaacttggtgttttgactgggattttcccgaatttgaat

SEQ ID NO: 35304 - DNA, 1716 bp, Bovine  19866881211851
  misc_feature (1)..(1): n is a, c, g, or t
ntgggacccagaagtttcaagaaagcagcagcagtgaagagtaggtaggaatctcctacccagaaactacttgtggggcagagcttcctctctccttcccctctactaaataagcaaacttgaacttcacacaagctttctccacggcagctgctgcaaaccaagcggctttgaggatctgtgcttcccactggacaggaaagagtatttgaggatgaaaaggaaggaaaggaaggggaatctatgtgaggatgtttatactatctttaaacaaaggagagttcaaaggccagcatggaaaagggagatgagagctaactaacactttttaaaagtatcaacctaaaatttcacacagagagggctgaatatcttgttttaaaaattaccatctctttcctattagcaacctgacaataatccctctcactgggaagaaactgcatgagacaagggggtggagggaggaagtatagaaaatggtagaagcatagaggaatgggggaacacagagcaatgctcatcccctttcaactgcaaatactcttagcttcagggagacaaaatggccaagactgattcagtagaatattcggattttgtctcaatgctcaatccaaagtctattttctcagtttgtgtatatttgtggggaaattaaacaccagttaaatctctattattctcaccctggagcaaaaattgttgatgtggcaaagacttttatttagaaagaattttatccctagatattgtctttcttccaaggcttcttttccactaagtaccgctaatctatgtagaccactgcattgcatcacccactaactcactaaccaccattatgggacacctccaatgcatcagatgtaggggatataacaacaaacagcacagcccgtgccctcaaggagctcatgtttagtagagaagagagacaactgaacaaataatcactgcataaaacttccatagtcaaaggctgtaagaagtaggctgaagacatctggcacaaataaatatctccaggcagagaacatttcttatgtttttctgttagaaagggaatttcccgtgttaagaaaaaataagttgatattattcaaattgttaaccccaaattaatcagtccctagttttcagaaccctgtagctagaaaagctctaattcccctgtactgagatctactggcacatacccaagcctgatacagtacaatcctaggggaaaaatatcatatttctctgggtatgcaattgagaaaactccatccttagcatctatggcattttcattgcataacaacttggggaaataacatcaggctcatatttagaaggtatcccatggtaaccgtgagaagtggctggggtctcacatagcagaacataaacattaatcctggcttatcagatgcctggaagaagcagggaaagcagaagttatcctatctcctttgcattatcaaatcaaacacccctctgggcttacatgagcccttagggcaaattaaaattttgtctcaccctttgtcccatcattgtaatggatgttctccatggctgattttttttccctgagatttatggaatgcatcttgctcatggttaggggagtatggttcgatggagatcacactgaacaaaaatttaagagccctctctagtctttccatgtctctgtctctgtatttcgactccctaataaatactgta

SEQ ID NO: 35305 - DNA, 1262 bp, Bovine  19866880209965
  misc_feature (1)..(1): n is a, c, g, or t
ncccatgaatcgcagcacgccaggcctccctgtccatcaccaaatcccggagttcactcagactcacgtccatcgagtcagtgataccatccagccatctcatcctctgttgtccccttctcctcctgcccccaatccctcccagcatcagagtcttccaatgagtcaactcttcacatgaggtggccaaagtactggagtttcagctttagcatcattccttccaaagaaatcccagggctgatctccttcagaatggactggttggatctccttgcagtccaaaggactctcaagagtcttctccaacaccacagttcaaaagcatcaattcttcggtgctcagccttcttcacagtccaactctcacatccatacatgaccacaggaaaaaccatagccttgactagacgaacctttgttggcaaatagccagatccttttagaacttcataatagcagtaatctcctccacaatggtggtcattaaacttatgaaagtatatacaataaataccactaactggggaagactgcatcttgaaactcttcatgatgaaatcaatagtagtaataaaaatgtttctatggttgaaaaatgtaattgaaattgtaactgctgcatgattcgtaatgaaacataagtatatagttcaacctagaagtatcacatagtgaacatttttaaaatatgcctcaaattcaaattaaaattacaattatcattttcagagtcaggcaggaaggatgagacaatattagccactgctttcttcacctatcactaataagcattatgctttttataatttgaagagacccaaggaaagtataatatattttatttcatttgaagagaaagtaaaactgtctcattaagaaaatcatgttctaatgacttgagagtgactgtgcctacataactttattgggagcaaaggctatccttaacagacacgaagtaagcgcattactgaagtgatagatttttctgtcttgtatttttaattaaagccaatgttgtcactaataaatatattcttcaaatcattcactaacaatgaataccagaagttcttggaataaagaattatagaaacaaataaggatggtaatgattacatgagcatcatcatggaataataagcttcattccaagggatataagagctgttttagcataataatttcactactgatcttttttttccccccaggaagggactcaagtattttcagataaataaattccttaaacaaaa

SEQ ID NO: 35306 - DNA, 2687 bp, Bovine  19866880460457
  misc_feature (1)..(1): n is a, c, g, or t
nttctaccacttgaatataaactgctagatttgcttaatatgataatttaaatgtctttttctttttaattacctgcaagagaaggtgagccagaacaattttatgcttcatatggtgttcataatttggcatactacaatcatgaaaagaccaaaagcatggagtttaaacagatgtctaacttgtacaggtccataatacattggcagctttttcatcatgaactctgaggcatcctgatttcagttaggtggaagaaaagacaggcctgataaatgtctaggaggaaaaaaatgaatcagtgcagctgtgacccaggtcaggattattcttaatattcacaattaatttctggagaacagcttgtatacagcattaccagctgctttttaaacaaatatgtgcacattttggcaaccatagatttagtaatttgctctactcacatgaaaaccaaaaggtgaactcattttgcaccctttgcttttttttctagtttcctttatagtgataatgcttttcattgtatgaattacaagtgcaagtaaattaagaatgatgtgattgacatttgagctatgaatgagcattgttcaagttaggatacatgtcttaattaaaatgttggtgaatggtaaaggtagacctctcagtgactttcttttcttttttgttctgaatcattgtagagatactttcatttttgctaatctgtttatgtactttgcctaaagtgtagatatcgaattagattatattagtttagattcagtctgcaatgacttgaaactgtaatgaaaacacacacacactttgtgtgtgtgtgtgtgtgtgtgtgtgtgtgtgtgtctcctttacagagatgaatggttgaaagcagcccatgtgtatctcctatgcaaggtgacacccctctctcctaccgaatctcttttaggattgttttgtatagattcctgtccaagggctgaaggatgaattacatgacctttcgacatcaattccatctgcatgcagtcttctaacactaaaagatacactaattaagaaaattcaatagtatcatgtgagtattagttaaatgtgttcaaaggtgagggggcagtattagaattctataaaaccagaactgtggggaaatacggtctttgtttttgcaccttatcaattacaaccagggtttacttaaaagatccaatgttttcgagtttgatttataaaaatgactatatgaatgtatacatagggttactgaaatgcaggttcaaatatctgacatcacatatatcattttgtgaatttggtgcttaaaatgaatacagattatgaccctcttttctaaaatagatttgagaagatcaagaactaaataatgtgagaagaataggggagaattcctcaggattatactaaaaaatctagtgtaacagttgaataataaccaatttttattttgagcgcttgtatactcaaagaaataatggaaaggacccactcaaaattcatattttattcattgaaaaataagttctactattaattaaatcaatctatagatttttataactgttgcttttttgtgaaggtaaatatttttcaaataccttttttaaaaatatatttgtaatatatatagcctctgttatttcagggatgactgggggaaattaggaattgattttctttaaaattcacatatatccaagtactgccttaatttgctggtgttgccatatgaaatgccacaagctaactagtttaaacagcagaaatttatctcctcacaattctagaaacatgaaatcccaggatcaaggtagaagcagggtttaatttattttaaagcctttctctttggcttgtatatgtccatcttctccctgagtcttctccctacttctctaagtctcactgtgcttgtctgtgtccagtctcttcttataagaatgctagtcagattgaattaaggtccccccatatgaacatcatgtaattgtctccttaaagacccttgatccaaatacagtcactttctgaactactgggggactagacttcagcctatgaattggcgagggaggcatgatttatcccatagcatatgcctcactatgattataaatgtgttgtatttttcaaaatttatttatttctgattgcattgggtcttcttcattcctgcacggggtggggatactctttagttgtgatgtgtgggcttctcactgcagtggtttccttgttgcagtgcatgcactctagagcatagactctagctgtggagcattcacttagttttccctaggcatatggaatcttcctgaaatagggcttgaaccaatgtcccctgcattggcaggcaaattatttaccactaagctacaagggaaacccagtatgttctttttttttgccttacaaagaaattgtctttgcaatactcaacaatattgtacatgggacagcataggacacacttgaagatttgtgtattaatcattatgaaatattgattttatccttttctagtatcttgatcttcaattaaactgaagactattgctatcaatgcttttttttgtagtttatattcatttgcctgctactttaccgttacatgacattcagtgatgctgtgttattcttttcttggtgctgttggtcagttgctcagtcatgtctgaat

SEQ ID NO: 35307 - DNA, 935 bp, Bovine  19866880463005
  misc_feature (1)..(1): n is a, c, g, or t
nagacagtggatagagaagtgagagcacgttgtttcaggggagcagaagctaagcagtctccgtgtaaggtaatctcaaaagaaagccaacattactcaatgtaaaaagatccagagaaccatctctgaagaagttaatgtgaaaaaattaattgaagtagaaatctcagagagttgggtcaaaagagttgggagggaggtcaataatacagaaccgatgtgtttggatttagaaaacgtagaagtaaggtagagattaaaataatacatcataaaataaaattatgtacttaaacttatttgactattcactccaagtttaatattattgttactaaaaatgctttcttaattaggtcattaaatgtccttataattagtgccttttttcctgaaataaatgcctttaaaatgtttttaactgaaataactaatgcaaaatactcattattttggaaactctatttcagcaatatctggaaataggttagcatataagtgtgtggaaaagttggcttaaagctcaacatttagaaaatgaagatcatgacatctggtcccatcacttcatgggaaaggaagatcccctggaggagggcatggcaatccactccagtattcttgcctggagaatcccatgggcggaagagcctggtgggctatgggttcatagacttgcagagaaccagacaggactaaagcaactcagcatgagcaccatggctgtaggtggtctcccacctctctgctcttctgctgctgctaagttgcttcagtcatgtctgactctgtatgaccccatagatggcagcccaccaggctcccctgtccctgggattcttcaggcaagagcactggagtgggttgccctttccttctccaatggatgaaagtgaagtctctcagtcgtgtccaaccctcagcgaccccatgga

SEQ ID NO: 35308 - DNA, 2446 bp, Bovine  19866880691177
  misc_feature (1)..(1): n is a, c, g, or t
nttagatacacatggttctctggaagcttgcatcatggatgaataagaagaataacagaagagatattatatagtgagcattgcaaagagaaataaaaatggagaattgagtggtgaaaaatacatacactcttaaaagcatatagatttaaatcacttctgtgattaccctttaaccctcccaaatcagttcacaggaattcagttcttggatgttttatttcactgctactctttttccagacttactgtcttttaaggcatctgaactgataagaaattaagtccttatgtgtatgtgtccaacttaatagacaatgcattatctaaaagcaagaaaagctggcaagtttaaaatcagagaatacatcgctgactgcaaatgaaggcacagcaagggcacaatactgacctcttagtaacatttagctcgtgatcctacttcagcaagccaacaatgacatggagtcattaaaatattataggaaaaactgcctattgaaatattgtatgctctattatttaaagaactcacctacagcatctggaaaaaaaaagaaaacttcccagggccacctgactctctgcaggttacaaacatcacgctttagttcatttactaaataggcataaaatttatactataatattaaaattgttgtaggatgatagtaaaaaaggaaaaagtagtaagatagttaagtgtctataagcttgttacatatcatctgtgctaagcatgtgtacatctataaactttgtaagagaatcagtggaaaattccactcatttccaatagcatcagcagtgaatctcagtaaggatgacggaagaccaaaaacaccctttaagatttgtatctcctgacttaatttctgttaaatgtgtgtctttctcctctactgtgtacttgtgagccccttatacacttcaatttgtttttactcctgttgtccttagactccatgcgtgtctgctagatggcttcagacgtatctgactctgtgtaaccccatgaactgtagcctgccaggctcctctgtccatgggattcttcaagcaagaatactagagccagttgccatgccctcctctgggagatcttcccaactcagggatcaaacttgtgtctcttttgtctacatgcagtggcaggcagattctttatggctagtaccacctggaagccaccttagactctatccttgatgaaataaagttctttacagtcttcttttcttgccccagtagtgatttctagaaattgggcttttgaaatcccaaattaaattattaacatgtgttttagctacagttaacgagaaaagtttgcagtttcttatgctgaatattatctagaattttatgtttgatatgtttcaatgtttgactaatgggggaagagtagagagggtcagaaaggaattaataatttaaataatccataatataaattgttcttcttagttctgcttttgtcacttttcatacctaagggaaggtgtatcctttcaaatccagttatacttggagagtgaagctgctgctgagttgaggaaaagatcattagtatcctaaggatgcatgcttacttcatttttatttaaactgaagtgtaacatttattatggaactactgagaatctggaaaactccacatgaaataacagccatagaaatttttataacgaactgtaaagggtatctcaatgtctatttcaaaaccgatttgatgaatacagaaaaggtcaaactaaaaataactagactgaatcagtcataagtgtagtaacatatgcctcatttaataatgaactctaaatttgcaccacagtttaagtcgtatcatgaatgctaattctgacagcaaagggttatgaactacctgttgacttgcacccagcacaaggtcagatagttaagcgctaatgaaaccctgatataccagaaggtgaatgactgatgggagtgggctgctgggaagaaactgcaatagcgctgtgacacattcagaatgacaccgtgtcctgaaacagaaacggctgtgatcccatctgttgatgaagtctaactgcttcagttaaagcctcgctatgtaggctacatatttcctaggagatatttttttatctccataaacattcagatgttacaagtgctaaacagtttcaggttccccttacatatgcatgcggttcgctatttctaaaggtttaattaaatatttttggcacgttgagcaacaataaagacttgtgtgtggggactggaggatagtcagttttacccaagagcggattcaaagtttctgaacatcatgttgtccatgaagatttttaacattttgtgtccatggtactgatcaaatggaaatttaatttacgcttgttaaaattcagaaaatcaaagggagcccaaagcactgaaactctgataaagctgatgt

SEQ ID NO: 35309 - DNA, 2636 bp, Bovine  19866880707699
  misc_feature (1)..(1): n is a, c, g, or t
ntgacgagcgctgaagtcgtagagtagtcgtggacattgttaccttaaaaatttaataaaaaagtccctagccaaaatgagtttatttgagaatagcagaagaattgtaatttggaacacacaaactatggcaaatcataggcaaatctaaagagaccaagggaaggtcagattttactgggttttaagagggaagtgggaaaggctgtggcttatctgttagagctgcaagcagtaggcagcttgttgctgggtcagaagaaggcaatcatctttcttcccactgaggtcagtaaactgtggttagtgatacgtgcttgaggtcccttccttcttggcttccagactccgttttgacataggtttccctgttcattttcacaacacatatccatcatgtacctgcagtcactgctgctgctgctgctaagtcgcatcagtcatgtccgactctgtgcgaccccatagacggcagcccaacaggctcctctgtccatgggattttccagccaagagtactggagtgggttgccatggccttctccaacctgcagtcactaattgttaacatttttccatgtctgtttcatctctctgtatagatataaatacatattttgctgatccatttaaaaataaaagctacagattttatgatgctttatccataaatatttcagcatgtatttgttaaggcattgatttatacatccaccctatgattattatactcaagggcattgatatttatacaattatactataatacctattgaggctagatcccaatgttcccaatttcccaataatatctctatagctgctcttagtttttactagtgaatttttgataattttctcatttggaggcaatatatattcagttcagacttaagtataaaaaagaaatgtattgcctcatataactgagaagatctggattgattttaggcagagttttaatgctattaatattagcatcaagcctctctctctctccctccctccatcttcccattttactttcttctctattatatcattctcatgtaggatttctctatgttgtatgaattgagcttacatcatttacagtctggagttcaaaggaatataattttttttttaatctaaaaattctagcaaccatctccaagatttattttcactgaccacatctaatttttggtcgtgggctactcctaaaatgaaaatgttgttcaagtacgggacacaggtaaatccttagagtgtggagttgactctgcctaaaacatggggcagacaagggaaggagtggtgatacaaaagggaaaaacacacaggttggtttaaaaacagtgggaggtatcaataaagacttgagaatgtaatgacgaatataaatattccaagcctagaaagctcccactgtgtggctggggagatgaacacataaacaaatgcatacaacattgataccaaatgcaatagtaaaggcgtaattcacagtaagatcacgatacaacaatattcattaagatgctttttaatccagagtatctaccttcatgtgtaaaataaataaaatactcattcctgcctttcattcaaacaaaatatgcttatgcaattatttgcttattttggtttgggaattgttttatcaattaagtagctgaaaaactccagagtaggtgtctcagggttaaagggtaaaaagtccattacttcatttctacttttgaacacccattatttccagtcattctactaagcattgggataaaagatggtccttgctttcaagaagcttaaagttcagtaaggctgcaatagaaaatcaccttagttgtgatgcttgtctttatttatgggtcccagagcttattcttctccttgacttcacctatttctcatttcctgtcaatgcccagaatactctcggtacccattttgctctgatttctgtgtgatatgtatcttcttggttcctggctgtctacctaagttctagccccatcactttcctgaccccaatttttcatgtatgtgctctgcttcacttcctcaaacccagtaagtttttgacttagtagcatgaacaccattgtgtgataatgcctgcaaaagctcaaagcagaagtagtgaaataaatgtcttatacttccatgagcaataacaaatcaaattaacactataatgtacctaaatattaattatgacatctgctggctaactaattctaaatgtaactgttttcctgcccaaatcttgcctaacaaatgcagtatttgaaaacttcatttttagagtatttattattagaagcaatattattttgcacactttcacatatatgtcaatgtccaactctatcaatttccttggaataaattattagaataaaataaaatgtgataaaagtgggataaaagtcataaaaatagtaaagattcttgcataaatattgacaaattactctcccccaaatggactaactttcactcccaccagtatcatgtgaaaatgctttttttaaattccctaattatttatatcatttatttcacatctttgcaaaaataaaatgcaaaagatagtctaactagcttaaagttatttattgattgctaatgtcaatatttataaatat

SEQ ID NO: 35310 - DNA, 1735 bp, Bovine  19866880760224
  misc_feature (1)..(1): n is a, c, g, or t
ntttcttatgaacatcaatattaagcgatggtcagaaaaaacagagaaatgttttcaaagccctaggggaaatcaacaactgaactagaattgcacagacaggtaaaatacagttacatggataaatgacttaaagacatagtgaagcagagaagtattattgagcaaaagttcatagcactcaccacagaacacaccaataagttgagagacaagttattggggttagaaacacgtgggaagtcagcaaactgagaagacgcggactagtgtcccagggacgttaccttcaataaggagtcgggtttgttctctgctacagaagggcgatctggaatgccaagatgtgacaaagaggataatgctacattaatagagagtcagagaagatctatcagttaagccaagatggcttaatgacaatatgtttcttattagaaaaacagataacaaataagatgtgacaatggagaattaagatcaaagtagtgagcaaaatacaaattagtgctaagactgagtatatttgtttttatattaattatttcatctaaaatttattctacttattgtttagggtgatgaatttgaaaagaggggagaatcttatgagaataatgtttgttagagtgcaaatttctatgacaggaccctgttaagatcttttaagaagataaatacattaaatagagttttgcttagattacagtaaatgctatagaataatactgaaacatgaaaaggcaatagaaacttttaaggacaggaaaacaaaatttaactgacttggttagaaaagacttcatggaaaaggtaacaacaaattatgacctaaagaatgaaagtatgttatgaagctgtcctcatttatctttcctgtgttatgttccacaaaattttacaatacatttcaccttgtttcacaatcacatttcaaaacatgataatttctttttcacattagtacttctcttacttagactgttcttcagaatttattgaaattatactatcagctatatctgattttatattttaccatgtaatgttattataaaaattacagccaactattttaagtacattaaaaatcttacctatcctttaaggccaaattaaaaacaatttctacccaaattgttgtgtgtgtccttagaaggaattttttggcttctttcattgctaattatttacctgcttgttttccacattagtttggaaactgcatcccttagttatcctcataaacaacagttttgtaaagtcctttactgatattaaaaaccaaaaccattcataggctagaagaagacagaggaaggagaaattaccaaaattccgagaatgtagtgtacccagaaggccattgaaagatggtgagaagtgttgttaaatgtgtagtcaacttagagagacctagaaggaagggggcagagaaaagaaatatatgacttcactctctgtgctcctatctctcactgtgcctttgatacgttttagtagaatcaggagaaggagaagaagagtcctgtttatgcagttcttttgaaatcaccttccccgggtagtcaaagctatggtttttccagtagtcatgtatggatgtgcaagttggaccataaagaaggctgagtgccaaagacttgatgctttcaaactttaatgctggagaagactcttgagagtcccttggacagcaaggagataaaaaccagtcaatcctaaaggaaatcaa

SEQ ID NO: 35311 - DNA, 1916 bp, Bovine  19866880775485
  misc_feature (1)..(1): n is a, c, g, or t
ntgagtgaaaaaaaaaaatgcaagcccatcatgagtaaaaaagttactacttgaaaatcaataattactctctgcagatcgattagcatattattagctagactaaaagtcatattaagacaagagaactatattcaatattctgtgataaatcataacagaaaaaaatattttcaaaaataatgcttatatatgtataactgaatccactttgttgtatagcaaaaattaatgcaacactgaaaatcaactatacttcaatacaaaactgataaaaaagagaagaaagctgatttaacagttattgcaacatgagcagtgccaccaatttgattcatttatgctcacatcacttttagatacttcctgtgagtccactgttttcaatgtagaaattcaacatgaaggcaaaatttggtttctactcatgaactctcaggaagcaaattttaaaattccttcctgtctactcctctggtgatcattctgctcttgtgtacaaaatcacatacagcattctgggttttactcttgactctggcagaagagttgaggagatcactcatcacgcattgcccgcctggtgaaagctgactgcgtggcatcattctctccacggctggggaggggaacaccttgcttgtcacaggctattgaaaatcatcagctttcatcagtggatcctgacaatgcagaggaatgattcacctgaagggagcagagggcatagcacttcaaaagtgatctctaaagactgattatttcttgtccttgacaccctgccaagggctagatacatcgaacatttgggatgtaatggagccacaaatcaccagttgcctggagtctccctgggcctaccagaggatagcatgcttggctttagttcagtttttattacatgctgtgaacttttgacggctttgatatgctttgtcattgatttgtcaagattggactctgacaaggtgtctgacctgatcgaaatcaagaatgctctactggatcttgtagaaataatgggaaaacttctgtcataggaccctgggcaatggaatacatttcattatgatgccactgaaacaacacagagagttattctaagagcattttagttagagtgaaggggtgtaccttggactgaaaaatgtataatttaatcttatattgtaaaaattcaaaagacataaaggcacacattatacattttgttaagggctaaattgtgtggtagaaatttgtgcatccaatacctattgctaagtaacattttgttgttttactgcagttgatgcaaatgatttttttggtacaaaagagaaatcacaaaagacttgttatcaacagagagataagctctgcttttgttattccagtattcaaagggctcactcgataatatttgaaaatcttttatgactgactcatgaaatgcagtttcagacaagacagtctcgctcctaagaagactatcgatgatagtggtttaccctgtggagaaaggattgtggatcaaaatgtttttttcttcttcaaagatatttccgactcagaacaactagtaaacaggaagataagggtattattttagccaccctaaatcctaatcaaagtagcagagtgctggtggaaaggagtagccccaaagcatgcagcaggttgattttgtaatattttcaataggagagtgcccacttgtagattaaaagatgcagtccagcacaacctggaaaagttgatattttgaagaagttaagaaaacaatcacctttagcccatgggtttaagaatattgcaaagcaaataaaaacaatctttcatgcaaagagtcctttaaaggtaggaagaaaaaactatggggcataaaatgtcattttcttcaaaacttatccttttcctcatgtttctctgtccat

SEQ ID NO: 35312 - DNA, 1629 bp, Bovine  19866880897564
  misc_feature (1)..(1): n is a, c, g, or t
ncttgtgagttttccaatttgctgaattttccaaatttccaaattttaagtataatggagtgtatatgccaatcccaatacctcagtttatccctttccccttcttttctcccttggtaaccaaaagcttgttttctacatctgtaaatctattcctgttttgtaaatagattcatttgtaccatgttttttgattccacatagaagtaacatcatatgatatttatctttatttaactgacagtctcaaggttcattcatgtcatctcacatggcattgtttcatcctttttttaaggctgagctatattccattatatatatatgtttatgtatgtatacatacatatatctcctttatccattcatttattgatgggcatttgggttacctccttgtcctggctgttataaatagtgctgcaatgaatgttggggtgcaggtattttttttttaaatatggtttttctacatatgcccaggaggggattgctagatgatatttatcccatttctgacatgcttaaaaggtattggtctatcaacttgccatctcatattatgacagttcttttaagagaagggttttattttatatgctttgtaactagtcaatgaatccagttctgtaaaaaaaccaaataattcaaatcaattactaaatttaattttaatgttttttgaagtcattttaaaaggttgttgccaagaagtcaacctgttactctgagatctgaccagcgcataagactgttgtataattatcatccttaaaaatctcaggtacataatctggttcactgacataaggatacaatgcatatatagtatttttagcattttcaagttcatattatacaattcatacttaattaaaattctgagaccttatttccatgatttttccatgtcttcttattatctaagtctctcaatttgtaatttttgtccttggtatttatagtaatatgactttactgttttatttgattttactctccatcaagtatttctattttaagtctttcattcatcgttcaaaattgaaacccaagcatattacctacagacaatcttatctattgagaaaagtgttctgtttcactggccacctgtaaatttctttgagcattgagtttgacttttgtgatattgctttgtaaaatactatatacattaggtattctaaaataaatgtttgaccctagaatattggatttttggtaaatgtcagattgtagtggaaaataatatagcaatttgtgatcgatttaggacatgggttgcataatttctcatttctgtgctcagatactaaaagatatgcatttttggtttatcttttaaaattcctcataagacttttccttgtaagtggaactaagtatttacctttcttaaacaatgcacagttgatagaaaagctagatatatttattgcatttatataaagtataccatctgtaaagtctcaattataagtaatcctggtattaaattcaatatatgaagaaaacttaacatatgcccaagagatttagctgtataatacatttttttgactagctacatatttttataagtgttcttttcttcaatgatatttggtgggttagattcccaagtag

SEQ ID NO: 35313 - DNA, 992 bp, Bovine  19866880903272
  misc_feature (1)..(1): n is a, c, g, or t
nagaaggaaatggcagcccactccagtgttctcacctggaaaatcccatggattgcggagcctggtaggctaccgtccatgggatcacaaagagttggacatgactgagcaagttcattttcaagactcctttaagattttgtgttgactgtacaaagtaggaattgaaaaatgtgaaatattatctacctcacagaacttgttggtaggataaagaaaataatatttagagtgacttagttcatccttagcatatattaagagctcagtaaaagcttttattactgttgttgaactgttagcagtggtggtggtggttgatggtttagtctctgaattctgtccgactcttgagaccctgtggactgtagcctgccaggctcctctgtccctgggattctccaggcaagaatactggagtgggttgccgtttccttctctaggggatcttcctgacccaggaatcaaacctgcgtctcctgcattgcaggcagattctttactgactggctataagggaagtttttattactgttattgaactgttttcagtagtaaacagaaatggcgtttatgtgtatgtgtgtgtgtttagatttctgtatgtacatttgtaagtgtatatgtatttttatatactataatattatgttttacctgtatctctaaattcatttaaaatgatttctttctttatttttgaaatctaaattcatatatatatttttaagaccatgtacattattaccactcaatgtgcttttagggaattttgaaagagatattctaatctttatagctttcagtatttttaaagtgtgggattatccccttgagtgtatgagaaaaagctcggttaccaaaactgaaagaatgtgtgtcatttctacctacagcattggcacaggcgaattttacaggaatagggaagattaactaggaactcagtgtgatgtaaaggcatctgggaagcagtaggagatgatacttga

SEQ ID NO: 35314 - DNA, 610 bp, Bovine  19866881132183
  misc_feature (1)..(1): n is a, c, g, or t
ntccacctcccagtgccatgacatcaggtgtttggtttaatgtttacattaatatgattaagattaatgcttaatgttaatataaatttgtggtgatacaaacattcagaccatagcaaatcggaaattttaaaatgataatactaagctatggggaataatataactgattagtaaaaatggagcaaattactgaaaaaaaaagaagagaaaatgtcaagattaattaggagcagagaggcagagagagttttccctaaaccaactgcattttttctcagaaaatattatcagtgaaactttgacctgaaagtcccagaagactcactgaacactttacttagttctaagtatggagaacaaagagcttcaaggcatttcagatttgtactctgcttgtaagtgaaaattatactcacctctaagtgtatcaaatgcccaacatagcttccccaaagacatggaacataatataaatggagaaaccagattataagtttataaaccaggctctatacaaaccaaggctccaagaaattgaataactcctgttggtcctagagaaatgctgataaattattagacatgtttgaagtatatttagtattaa

SEQ ID NO: 35315 - DNA, 1618 bp, Bovine  19866881185701
  misc_feature (1)..(1): n is a, c, g, or t
ngagataatgttccaaggtctttgaagagccagatcagcaaaacgtagctgtgcccagtcggaactttcagagaatccctaggaactctgaatgtgtatagtctaaatgtcccctcaccatagctgctttcttcattattttttttaatcgataagcccccagcaggcacttttctgtagctgatctctgagtgcttatcaaccacaacagctgagatgacatcttgaaacaacttgcttcattcttaaaaacaactttacttctaatacctttttttaccctggtcataaacaagtggattaaaatagcttcactagagtcataaacaagtggctttgaaaagcatatcaaactaatatacaatatcacttatcatcatctaacgtgataaagtcaaagtcaatcatatctatcttgttgatttccagtcttcttacaacaccagttcatgtaagcttaggaaggggtggaggggtctcctctgttctccatggtgtccattgttccaagtgaatgatctagcattgaatgcactgagaaataagcatctgaacaatagtgacccaaaaactagagatggaatgtcaaaatatagaataaaaaaaaggcaagcatataaaaataatcatattcatattcaagcataatcaaaactttatattgaaaaagatcagtgaaaataccctgcacttggtgggtacagatctaaaaggttctaagatttggcaaacaattagaatcctttatctgcagaagcctcccttggtggctcagaaggtaaagaatctgcctgcaatgcaggagacatgggttggatccctgggttgggaagatctcctggaggagggcatggcaacccactccagtgggttcttgtctggagaatccccatggacagaggagcctggtgggctacagtccatggggttgcaaagagtcagacaggataaagtgagtaagcacacacatttgcagaagcacctgaaatctcaagttttttgctatgtgttctttctggcaagaaggttgcaatagatacaaaggaattctttcaatctgagatggtcaccaatagaagaaaactccaggaaaataaaataggagagtgttgaattgaattcttcattggttttggaatatcttcagcattccagaaggctgcaaggcatttacaagagaaaaataaaaataagaattcacagctacttaaaagttcaacaaaacagccaacatttgaaacagcagcggtgttttgcatgctggtgaaagtgggctcattagcaaagtgatggcttagagctgacactgggggaggaaacggctgaacttcacacaatcagtcctacagaactgattgtgaaatacccttggtctcactttgttggaagcagctcagcttgctttctggcctaaggtaacataggagtcagtacaaaggcagaaggacagagaccaacattttgaaataagcaaaatgaaaggccaccgtaaaagttggcaccgtataaagtaagaacccaaattcctgtgtgagtcctttgaacacagaatgtgccaaagccattgttgacacacagtaagaagtctcaacacatgatctaaggtacacatattggg

SEQ ID NO: 35316 - DNA, 820 bp, Bovine  19866881215017
  misc_feature (1)..(1): n is a, c, g, or t
nttggatctccttgcagtccaagggactctcaagagtcttctccaacaccacagttcaaaagcatcaattctttggtgctcatctttctttatagtccaactctcacatcccacacatgattactgataaatcttagttgtcaaaatagggatgaatcctacctgtatctaatgagtagagccctcagatgctgctaaatattgtacaatgcaagaacactcttccacaacaaataactatgtagtacaagtatcagtagtgccaagattgagatatcttgttttaaatagtctcctttattaacatcaaacagattagctacttttaaaatgttttaggattggacatttgtattattatttttttttttttcctttcttcaccatagaaccactgatcctgtggcagaacttaagctttacaacaggcaaagaacctttccaaaaatatgcttgaggatttataatttttaattttgaaaaatatcatgttctttaatttaacgtggaaaaaatagttatttcatcacatgaccttatctacattacacattacacttagtcaagaacatttttaaaaagctactaacatctgtccctcccattacatttcacacaattatctgcacaaaagtggtctggggctctgggcttcatttgcatgtctttcctttgtatgctaaatataatttggcatgctctttaacatttattatcctggtatcgtttgatgttataatttactctctatgtcagcatctaatttactactaatctttcaagtgttgagtaaagatcctagaaaccttacttctttaaa

SEQ ID NO: 35317 - DNA, 805 bp, Bovine  19866881240744
  misc_feature (1)..(1): n is a, c, g, or t
nactaagacgtagcaaggatttgctgacagtatataaataaaagatggcaggcaccctcaagaagattgtatcttcatgtgcaaaatcaaaaaccatccaatttttctctttagctgtgtttagttggaacctttagcagcatcatttaatggcagagatgaagggtgatattgtgagggttggaaaaaaaattgcaacagggaaaaatgcttaaatagtataaatacctgtataaatctttctaatagcttttctaaaagctagactggatgtattttatcacatattcctgggcaactagagggtttaacaccagaagtagagctggactgcccttggtactcagaactttatttgggaaatttacagagatcacccggggcatggaagtggggcacacgtgctagtttcaaacatctcctgtgaagaaagagaaggaaaatatttaggtgaaaattaggacatgtttgaaggtgtgggatttcagaatgagaaaggggggtgggatctgatggtgtctaatttctctgtaaggcaagagctaaggttaattgctgagaataagggaggcagggcgtgaataataaggttggtgagttcttaaagtagctcatgggggtcaaagaaagttgacatagtgaacattgcagagcagtttttgaagaccttgtaataattccttactgtattttatcaggactgtagtagcacaggaaactatactcaatattttgtaataatctataagggaaaaattcaaaacatataggaatgtgtatttgtaactagtcactctgctgtaca

SEQ ID NO: 35318 - DNA, 929 bp, Bovine  19866881454617
  misc_feature (1)..(1): n is a, c, g, or t
natttcttaatggatctcatggggaaaagtaaaatggaagtaatatgatcttctcagagagaagtaaaaatcaaaagatacagaggaaagtagtccactttagagttaattttggtgaagaagtcaaggaggcagaatgagttatttgtgacagctttaatgagggggggaaaaaaaaaaaaggcaaacaaatccatggcatccaactgaaatatgagatggtagccaagggcaagaaaagagactgtaggggaaacagaagtaattaatattttcagaacatttattttgtgccaagtgttttaaacatattaccttatctttcatcacaataaggcactcctctatattacccaggagtgaagaaatgtcgtccaacacatcatacaagattctagtatagtcatgaagtgtacaaagttcccaacgctgtttgtttgaaagaataaattcatattagcaagaaagacataggtttagacagattaagcaatatgcttatgttctggcagcataaggaactacagaattcaaagtctctcttgtatcaaagtcttccttataatcaccgtaatgaatcatctcctttagagttaagtgctttctttattcaaaagatcctagaattcctgacatttctttttttttaatttaaatttatttattttaattggcggctaattactttacaatattgtattggttttgccatacatcaacatgaatcctccacgggtgtatacgtgttccccatccttaatcctcctcccacctccctccccatattgttctaatgggcttccctgatggctcagcggataaagaatccatctgcaatgcaggagacacaggagatgtgggttcgatccctggatttggaagatcccctggagaaggaaaaggcaacccactacagtattcttgcctgg

SEQ ID NO: 35319 - DNA, 1227 bp, Bovine  19866881665258
  misc_feature (1)..(1): n is a, c, g, or t
nttttagctgaagatagtgcttaacatgaatattttagtcattttggtgaattatttagtttttctggatctcttccatgtatacatgtaattaaactttgtttgattttatttagttaatctgtctcaggtcagcttaattcttagtctagccagaagaatctagaaaggaaaaggaaaatttcttcctccctgacacttaggaggtagatttgtaatatggtgtttccaggatccactctgctctcccatccttcctcacaataactcagtttggttcacatttccccatttcctcacacaagtgttgaaccacctcgcctccttgaaagtgtctagctggtccaaggtagcctgatcccagtgagtacatcaggaggccaataaaatgctaaagagtttttagcagcgttcctcgataattaagaagagattgtgtacacatttcattttccttttactctttgacatgcacagaatttagaacagtaactatttcagctatttcactaccagcctgagatacgcagggctattaaatctcagagcatctcagaagcatgggtggctggttcaaatcagatgtgaagcctgatctacatctcaacttcttgaatcatatgatgcaacaaattcaagccatttgaattagatttttgctggcaaaataactgataggaacttgtaagataaaatatggtggtagagatggaaagaatcaggggaaaacaacttattcaagggtatcagcaagtgcaaaaagtcactgatgatgatattcagttatcacgaaagatggtattatcaatgcaatattcaaagaggccagtgagttttgagagagcggtagaggacaaagtcacatggcctagcaaggactagatttgttgttcagtcactcagtcgtgtctgactctttgtgaccccatggactgaagcacaccaggtttccctgtccttcaccatctcccgcagcttgctcaaactcacatccatttagtcagtgatgccatccaaccatctcatcctctgtcatccccttctcctcccaccctcaatctttcccagcatcagggtcttttctaatgagtcatctcttcacatcaggtggccaaagtattggagtttcagcctcatcagtccttccaatgaatattcagaatttatgtcctttaggatggactggttggatctcctgcagtccaagggactctcaagagtcttctc

SEQ ID NO: 35320 - DNA, 747 bp, Bovine  19866881714545
  misc_feature (1)..(1): n is a, c, g, or t
naaacgagacatagagctgagcgtgctcagtaaagtcttttcgtcacctagagtctacatttaagtttgctactcctatatcttgaaaaacacactgagtttttctgaaatataaatttaatcgagcggagtatttattgtacatttgctacccccatggcagttccaagagtacaacaggaagacatgagtgacatagtactgctcagctcgtataatgatcagagacaagggccattcatcatgcttcaaccaggtcttaaattatgatgaaaatgcactgagactcacttctgctgatttcattacaatgtagttccagactcatgtggtaagcatttcagctcagactccccactggcaactctataatattaaaggacaacaaaatgaatcttgaaggaggaaaatagtgttacaagtaatagaatatttgttggtgaaatatctccattattctgtttgtttttaagtaaaccaaaacagttgcagaaattgatttaattgataaatgtttaatgggcatctatatttatgaagcatttactataactcaagtatcttatgtcacaggatacatgtagtcacaaaacaaattatgtggaggcaacatgattagggcttgtatggcagccagtgcatccttgacaagcaacactgaacagaaaaagtaactcatgtctctcacccaaatcttctacatctatggaggcccagttatgtggcacatattgtgtaaaataccag

SEQ ID NO: 35321 - DNA, 1376 bp, Bovine  19866881762990
  misc_feature (1)..(1): n is a, c, g, or t
nctgagcacacattgtataaattttaactatcctgtagagtacatagctaacatgcacaattaaattagcatgcatacatacacatccctagaggtccacacatttaaaaacttgttaagaagcgcaagccagtcttatgccgaactctttgaggtttacatggattaactttgcacttcaaagaaaatatattaaacagctatcaaggctaaactctgaagaacagtgaaagtatatttagaaatattcaccactcaggtttttcatctttctgtcattacaaatatgttttcactttattgtatttattagagattggaatctaaatgctaaatgttttatttgataaggagcacatggcattcatagtcacagtaatgtttgttgatgaagtcagtggtcatgagatgtctgatgttagcggattgcaggatttcagctttcctttgatattgctggcattaattttttatagcaaccttattgagatataaattacatgccatacagttcttcctttaaaatatataattaaatgatttttagcagattcatagagttgtgcaaccatcactattatctagctttagaacattttcatcattcccaaaagaaaccttatgtccattagtgggtgatctaccatctgcctttcccactaggccctgcagacaactgggtacttactgactctaaatgtgcttattttggatatttccttaacaagaaatcatataataggtgatcttttgtgagtgtattattttaccgtgtataatgttttcaaagttcaactatattgaaacatgtatcaatatttcactcttttgtatgatgaacaatattccattgtacagatatactacattatatttatccattcatctattggtgaacattagtgttattcgcatttttagctactatgaataatattgctatgaacattggtgtgcatgctttttgtggacttttgttttttatttctcttgagtatatacctaggaatagaattgctaaatcatacaataactgtttatttaacattttgagaaactatcaaacagctttccaaaaacactgcactattttaagatactgttagctgtgtataaagttcccaatttcttcagtctttccagcagttgttatagtcagtctttttatttcagttatgtttctatggtggtatctcatcttgtattgatttctatttatctaatgcctaatggcattagatataatttcatatgtgtatgttagataaagcttgctgtatacaagaaatttccagaaaattcatgagtagaaggattgattatactatgatatagataaatgatatatagatagaaatttccatttatttgttttt

SEQ ID NO: 35322 - DNA, 1221 bp, Bovine  19866880255808
  misc_feature (1)..(1): n is a, c, g, or t
nttatgaccaacctagactgcatattaaaaagcagagacattactctgtcaacaaaggtccgtctagtcaagtctatggtttttccagtagtcatgtatggatgtgagagctggactataaagaaagctgaacaccgaaaaaactgatacttttgaactgtggtgttggagaagactcttgagagtcccttggactgcagggagatccaaccagtccatcctaaaggagatcagtcctgggtgttcattggaaggactgatgctaaagctgaaactccaatactttggccacgtgatgcaaagagctgactcatttgagaacaccctgatgctgggaaagattgagggcaggaggagaaggggacgacagaaaatgagatggtggatggcatcaccaaatcaatggacgtgggttagggtggactctgggagttggtgatggaaagggaggcctggcgtgttgcaattcatggggtcgcaaagagttggacgcaactgaacaactgaactgaactgaaacttgctttgaaatgggtataaagcaagtttgaggatgattattttaataaaacctgttaggaatgctaaaaagaatattttggagggaaaatataggtgacaagttgtatgtgtttgtatatagtatatgtataattaaataatttgtttcaggcaaagcaagtaacttacacgaagagtgataatccttttcctcttatctccttaggatagcagtgagattcacttcaaagtgaaaatgacaacacatctcaagaaactcaaagaatcatactgtcaaagacaggtctgtatgttgtagtattaaattcagtgctttatatatcattaacttttcttttaagaaagcttgtcaaaagaaaagtaatcttttgggaattctttggtggtctagtatttaggactttgcaagaagaaagatcatttaggtgttgggataaggaaaacagtgggcttccctggtggctcagacagtagagaatctgcctgcaagacaggagacctagattctatccctgcagggtcaggaaaatccactggaggagggactggttacccactccagtgttaggataagtgagccaataaacttttttttttttttgctgtactgcgtggcctgtgggatcctaatgcccggaccgaggattgaacctatgcccttggcagtaaaagttcagtcctcaccacgaactgccaggg

SEQ ID NO: 35323 - DNA, 2065 bp, Bovine  19866880435847
  misc_feature (1)..(1): n is a, c, g, or t
ntattctggtagaattccagggagagaaggagcctggcaggctatagtccatgggttgcagagtcagacatgaccaagtgactttcacttcacaacagaatgagccagtctgggcttttgaagagactcctagtgtggagttagctgccctggacattaaggccagaaatctgccagatatccagtctcctatgtccaccactctgcaagttcatcaactgatgctcatctcctaatttaacaatccatatgcagagttaacggaaacctttaagattacaaaaatactgtcgggagttccctggtggtgcagtggctaagactctgcacccccaatacaggggagctgggttcgttccctagtcagggaactagatcccacgtgccacaactaagactctatgcagccaaataaataaaaataaacattaaaaacaaaagtactgtcatcacatacagcactcacttcaatcattcattgcccttgtaagccaccaagtgcctgaaggtcagttacgtactcattcagcagctatgtatcaagcactgtgttttaggccttgtgtcagatgctgggtacacagtgaacaagaaaactaaaatctctattttcacggagcaaaagagagcttcccaggtggctcagtggtaaagagtccgcctacaaatgcagtagacacaggtttgatccctgggttgggaagaccccctggaaagggaaatggcaacccactccagtattcttgcctgaagaatcccatggacagaacagcctggcgggctatagtccatggggtcgcaaagacttggaactaactgagcatgcatgcaagggggtaaatcacacggtagaggaatgctgtgatgggaaagtacaggactccaggaaaacacaggaggtcagggaaagtctccttgaggaagtaacttttaagttcaaccctaaagaaataattattggccccatgaaagaggaagtaataaaaggtaagcaatctaggtagaggaaagcctaatggcaaggatgtggaaaagctgccagagaaggaggagaataaggtcagcagttggaagggaaagtgagatccagggagaggtccgttgtttttcttatttgactgtgctgggtttagttgcaacacacagatagatcttcagtcttcgttttggcatttgggacctttagtttcttttttgtttgtttttttttttgtttgtttgttttttgggggggggatctttagtttcaacatgtgggatctagttccctgaccagggattgaacccaggacccctgcattgggaacacacagtcttagccattggaccactaaagaaatcccagggacaggtttttgctgttggtatatttgtttacaagatgggagaggttttataagatgcgagaaaaacaaataaggataaaatataaacaattggttagggacttctaaatgtataaatattaaaaaaaaaaaaaaacagttggtgaatttgagtaaaggtatatggaaaagggggcttccctgatagcttagttgtaaagaatctgcctgcaatgcaggagatccaggttcaattcctgggtcgggacaatctgctggagaagagatagggtacccactgcagtattcttgggcttcccttgtggctcagctggtaaagaatccgcctgcaatgcaggagacctgagtttgattcctgggttggaaagatcctctatcgaagggaaagggaacccactccggtattctggcctggagaattccatggattgcatagtccttggggtcgtgaagagttggacacgactgagtgactttcactcactcactcactcactcactcatatggaaaaggatatatatcctccaaaaaaactgatcatgttggtcccctggtagtaactctctgatagcttcccaagatgtgaaaatgaagactcactaggacatacaaagtcccttgagaagtggaacctgcttaccttccaggccttatctcccttctgttcttttaacacagccttccagccacatagctccctgagtactttaaactcatt

SEQ ID NO: 35324 - DNA, 1707 bp, Bovine  19866880500253
  misc_feature (1)..(1): n is a, c, g, or t
nccttacaggtcatgtgaggtaattacttcctgagcctcagtttctgcaacagacaggggctgggccaggtgtcctgaaggtctcagctgttcttggagaaccttccactggccctgccctctcccctcacacccagctccctatctgagcatggtacttctaggcccatagcaggctccgggaaagaactacagggcggagggggagcaggagccagaggtggggctccagttggcctcacgctgtatgactgatcatagcctctccatctgtgaaatgggagtaatgatacattttgtagagagttcttgaaaagctaaattaggaaaatacatttggaaattctttgtaacatatcatttaacacatgcattatatgaccaatttcaatgccttattgatgcttgaagggaatcagggtctcatttgtgagtttcaactgcaaggtcgtacaacttttctcatgtattaaaaagatctcacatttattcttcaataaagcgaatggatttatgaaaatcataaggtatcttgcattattaagatgaaagtattaaatctctgttcctcttccaggtactgaaaggctaaacaaagatatacaattaaattcttctcaggaacagcgcagataaaccttatcaataagaggaattgtaggtttggtggctttggaaactagctccctctcccgccagttacatcactctttggttcgctcatctcaccaatcctcagtttcctcatctgcacagtggtgaactgtacacttaccaggaagggggtgggggaaattaaataaggtttaatatgtggaaggcctgctcttagcagggatcagtgaatatttctttcttctttgtgaatcgaatcctttatagatgtgaaaactctttgaaaattattatttcgtctaattctcgcctcaccattgagaggtaggtagggaggttccagtattactatttccatcttactgaagaggcagctgaagaggagtcccacagtgtgacaaggttgctcagagtccgagaacacccagggcttcccaactgctggtcagatactttaatattgataagagtccacttaattcgggcttttttttgggaggaactgtcacagactcaatgccctgaatattcttgctggcaaaattattttcaagtgtcctggggtcatcgcatctggaaaccagcttgggattcatctgcaacttgcctgctggtggccaacaaagtaggtttcaatgactctaggcaccggaacttccctcctcaggggcccactccacctctggacaacgtcttgagcatcaagcatcgttttgccgttacttctcctcactgaaatccatgttgtctcttccccacatgaccacagggttcagggtagtgacagccagactcttcttggcaggatgtacccacacctgcctgcgtaagttacatccaagtaacacctgactcctaaccaaggacaggggacaactcagggtaccccatttcaggcaggtccctctgtcgggattcaagggcaccaagcgatgactgcctgtgtgatggctgtgaggtggaggcttatttctcattcttcatatcctctgggcataacgtacataccctttgatgtcagtgtcgagtataagcatattcaattctgtatctagcattaattggcattattgctattttcttccccactac

SEQ ID NO: 35325 - DNA, 1283 bp, Bovine  19866880532315
  misc_feature (1)..(1): n is a, c, g, or t
nactttatcttttggctagctttcgggacatcgtcacttgggtagagaaaagggaaggagtgtttgacacttactctgaagcagatcactttacaaggtgcttttttttttttcttttggtacttttatctcattttatcctcaccataaccatataagataaggtgctttatccctgtttcccagaggaggcaaatgaggctgagagattaggtaactaacccatggtcacacagccctaagtgaaggagctgagccatgaacccaggtttctatactccaagcccctggctcttaaaagcaggaaaagccatccatgtgtttctgattaggaaataattacaaggtcggagaaacaccacaaaattatggcaccatttttttttttaagccagcatgaaacttggagattatttagaatctctactgtaggtaaaggaacttgaggtctaaaagccaagagaatcatgcaaaaccgtggctaataatgaaaaccgaggtaacccaagtctgcctcaactaagtgttcctaggtgtttcatttagtttagatcaatatactttggttttgaaggcgtttcctcaggagcagttcccaacaccaggaataaacagctccaaaaggaacaagaataatgactacctaatctgtgccaagaagtgaagcagccactgatgcaaagtttctcttaaagctggggataaaatagggaaaccagaaggacatgcccaggaggggaggcactgctcctgcaccagcatccaaagcctgaaggtgcttcccactgcaaagggccgccttgcaatgtgggtctcagctcctcacttccagaactgctctgccttgatctgcagtctccgtacactgccaggctctgctgtctggagccctggcactgggttcagcgtagtctgctagctcttagcagcctagatgacctacacacggtatcactcctttatttttccttctggaaaggatttcaaagttctcctctatagtgggaagtgatgcatccttaagactgtttctggctcactccacacagcccaggatggaaaccccccagaatcccagaatacagctgttgccccttgattctgaaaatcctcttcacctcccaggaagtaaagcttatttctaacttgacacccaaattcatcaaaaccaaaaagaagttgaaactagagacaagaacagcataagaaagaaaatctatagaccagtctcactcgtatatgtgtatccaaacgtaccacaacgaattcagttaccccaggaa

SEQ ID NO: 35326 - DNA, 733 bp, Bovine  19866880644063
  misc_feature (1)..(1): n is a, c, g, or t
natggtaaagaatctgcctgcaatgcaggagcccgggtttgacctctgggaccagaagatcccctggagaagtgaatggcaacccattccagtattcttgcctggagaattccacggacagaggagtccagcgggtacacgggggtctcaaagagtcggacatgactgagtgactaatactttcactttacacttttagggtatcttagaactagtgcagctagaagtgttgtttagaagtctgactcctaggatcaacttttccacagttgctctgcttctctgccatggatcttatgaaagctccatgtttctacttccataagtaacaggacctctgcgggtgccaggacagcggagctaggctaccagcaaagaggaaatggcttgtaagctgttgaccatctgggcacaaaagaagagactggaaagaaaggagcagagtacaactcaaacaaaaagttttctttatttgtgatataggaagaagaggtaaaacaagactcctgataactgactggctggtacttacctaaaccaagaagaggcctgagaatctgggacttgatatcacttagttttgaatagaagcgtctttcagtagtagccaactcatggagactggcaatatatcccataatgtttttgtccaccaaggctagataactgtcttttcctgctgtcactctgcttatatacccaagctaaaacaggagaagaaagagattaaaaa

SEQ ID NO: 35327 - DNA, 1845 bp, Bovine  19866880648142
  misc_feature (1)..(1): n is a, c, g, or t
ncccctgaaaacttgcccgtgaatgttcatggcggcattactcataattgccgaaaaagggaaaacaatccaaatgtccatcaaagaatgaatggataaataaaacatgagtctctctcctctctagactctcacatacacacctgcctgcattcagcatttaatttcaaccatttgatgaaaaaatcagtcttctccacataaagggtttggagccaggttctctccaggagcctgagaggagaggccactttccctcctctaaagtcctccctcctccacatacatcttctgctttagcatcttcacattttgcatttctggaagccttccatgcctttgtgcatcctcatcatggaatgctttctcctgcatttctgcccatggaccacctactggtcttccagagcctttccctggaaccacttggttactgcctccccctgggttgggaagcagcacaggccccatgggactgagctcttcaggtgcagagactgtggctcactcccctgaatcctggtgggatacaggacatatggtgggtctctagtgatgatgggaagaaaagggaaaaaagaggtagagggacagaaggagaaggaagaccattttttgtattatatctgtttttatataatgatatttaaaaggaaaaggaattagttacaaaggtctctgatttcttccatgtaattttttgttggtatctaatttaattcattaataaagtggaaaaggagaaagacatattttacatcctaatgaagtgaacagatttgaggattttaaaaacagttatcttttatagataatattcatttcttccctataaaaaatcattttttctcccttagaatcaccttgatccttactgaataagggctgaatatggagcttctttctctttgttcaagtggaaagcgcacacacaattgttgcctttcaaatcagaagtggcttaacttctttgttttggtccaaacccatccccctcaacactccctgtgtacaaatgcatcaaatttgtggacttcaaagggcgttccacgtgagtgctggagatatgggggttcaggaggtgggaatggcccctctttattagttagcatttactaagcctttataatcattaactagtttgagttttggagtaattcttttttaaattttattgtaattgatttactatgttgtgttaatttctgctgtacagcagtgactcacttatacacatatatatcctttttcatattgatggaataattcttgcagacattgatgagaactgtctgaacatagcagggtggaaactgatctgctgactggtagatgtggtcctgtccctatgcaggtccctttatgagacacgtttcagaactgggggctgtatggctcagaggaaaaaaatgttgaaatgatttcttgccctgactctgtcattaaccagctgtgtgaccttggctgcagcctcagctgtactatggctggcttcaatcagggaaagcaaataggtagcacatgtgccatgactggtgccctcctgtcaccagggcagacatcgttaatcaatcccagcctttctcctgagcctggacaggcttcataatcccatgtgcctacaattgagctgattgttgcagcttatttaccatgcctggcctaaatgatctcttgcctgtcccttccaaggctaacgttcaatgatgttaagtattacagctattccttttgttgtggcaaccaccaccaacagactctacaaaattgtgctattccattccaaggatcacaaagaatttccctcctaaaatactcctagaaacaggaaaataagcattccat

SEQ ID NO: 35328 - DNA, 1289 bp, Bovine  19866880656065
  misc_feature (1)..(1): n is a, c, g, or t
ntatgttccagtgtctccagtttacagtctatggagatttgaatagaatttgtatcctactggtgtgtgaaaattgtataaatcttaattatgttgaattggttgacagtgcttatcaggtctactatatcctactgcttcctcagtatattcattctattaatttttgagtatgatattgaaactccaactaaaaatcttccatttatctactttaaacaattataatatatagaggaactatatgtaatcttgttctgtattttccaagtctcctataaatgtgttatcatactttcataattaaaaaaataataaaaaaataagtaaaatgagcctctcttgtgtcaagaaacagggttccttctaagagcagctaattagaaagacacactgtgtttgactttaacagtggtgtctcagaaaacctggttgtgtaccttttgcacattattctcaaaaattataaactttgtaatgcctctgagagtcaagtctgtggtctgctttgtgacactgaccaagcactactaacatcactctctccactattttgtgtagcacacagacctggctcagtatatgtctcagcacccaggagggcttcatcctcataatgtcagggtaagtactttaagggctgggactcccctctggcttgcccacggcaggagaattcagaaacagactgccatcacaaactgaaagcccatgatactaggtaagaagatggacaccactgatattctagagaaaagttaaaaaaaaaaaatctgccctcaagatatggagcaaagtccagctgctttctgggcaagctaaccctgtcagtcatcaccatcaagcaaatgtgtctttagaagtataatccaattaaaaagaatcgccttaaaaggaaagaagtgaagttaagctatcataaattaaatactttcttcatagcagactactgtgctctgtgataaagttcatgttgcacttaaagttcccaactaggactagcagactaccttgactggttctttatcagttatctgtttgcctgttctataaaatcgtattacatgcaggaccaacttccatttttccagttattggaatagaaataatattaaactcttaactagctataattccacatttgtttgtatgccatatttttcattctctaaggttttattggcattaattgattggcccttaacataaccatatgagatttgtatatgatgtacccattcatttaactaatatttatgtgttcatttattcacctcattcaagatata

SEQ ID NO: 35329 - DNA, 1368 bp, Bovine  19866880670112
  misc_feature (1)..(1): n is a, c, g, or t
natggggcaactaagcctgcatgctgaagctaagaaacctgtgtgcggcaactactgagtctgtgcgctgtaacaggggagaaagccctgccctgcaatgaaagacccagcatagccagaaacaaaactatataaaatattaaaaagagatcaaggaacatctgaatacagattgaggatttgaagtaattgatttgttgttgtttttcagtcactcagttcatgtctgactctttgcaaccccttggactgtagcatgccaggcttccctgcctttcacgatcttccagagcttgctcaaactcatgtccattgagtcagtgatgccattcatccatcttgtcgtctgtcatcctcttctcctcttgccttcagtctttcccagcatcagttttttttctaatgggttggctcttcacatcaggtggccaaagtattggcacttcagcctaagcatcagtccctccaatgaatattcaggattgatttcctttaagattgactggtttgatctccttgcagtccaagggactctcaagagtcttctccaacaccatagttcaaaagcatcaattctttggtgctcggtcttctttatggtccaactttcacatccatgcatgactactggaaaaaccatggctttgactataagggcctttgttggcaaagtaaaacaatttacaagttattattaattttcaggttgataatgtaattatatttaaaaacaagacctattgggaaaatgtgaatactgactacgtatttgataacagtaggaaacattttcttcaaatgtgataatggtgtcttggttatatttaggaaaagaaagtcagatttaagaaatgcatactgaaatatttacagatggaatgatataatgtttgaaatttgcttcaaaataatatggagcaaagggaatcaatggaaggcataaataaaacacagttgacgataagctggtgattgttgaaggaggctgatagacacatggaagttcattgtattgtctacttttatctacatttgaaatttctataataaaaagttaatggaagctctactctcatagaaatacatagtaaaatatgtattgatgtgatagatatggtggatttattttaaaatcagaggccaaaaagtaatagtagaaatgaaactagataggctatgtgtctctaattgctgaagttgagtgatgggtatttgtctaaattcaaatttttaaattatgaaacattaaaagtgtttaatgaaacattaaaagcaagtggttagtcaggcccattctatgaacacaagggttgataaaggttttgaatgttttgttatcaatgaattaagatattgaagcagaaaaca

SEQ ID NO: 35330 - DNA, 1373 bp, Bovine  19866880739069
  misc_feature (1)..(1): n is a, c, g, or t
nctcatgtacgatgtagccttttcagattggcttctttcacttagtaatattcatttaagcttcttcccatgtcttttcatgacttgacagctcccatttctttttcctgttgaataatactctattttttgaatgtaccacagtctgttttattcatatgttgtgactgaacggcatatggccttaaaggccatatagaggtctttggtttctaggctactacatttcctgagtagatgacctcaaccggaacaacatcttggttgtttcgaaggtttggtgattaggaataaagctgctataaacatctgtgtgcaggttttttgtggacataatttttcaactgctttgggtaaatagcaaggagcatgattgctggatcttagagagtgtttcttagttttgtaagaaactgctaaacagcattttaaagtggcctctaccattttgcattcccaccaataattagagttcctgttgctccacacagcattggtgctgtcagtgttctggaatttgatcattctaaatccaggacgaatgtgtagtgtacacatcagcttttggcaatatctcagtcttttgaatcatgatccaatgctaaacatcagctgcttcttcgagagttgtgtgttctacagatttgatagatacatgatgactggaaggatgatagaccttggagacagccaggcctaagatctgtaccttaactctggtgtgctactatggaggagttagttaacttctttgagcctcagtttccttcttctgtaaaatggaagtaataaatgaatggccacagtacttactttaatgagttgtatgaataaattgcatgccttctctgattttattcaagtgattaataaaaacatttgaccagaatagaactcagggctgaacctcataccacaccactgccagcctttctccagcaaggccactgttctttgagcacacacaccccatcatccagcccacacagttccctctttcaggtatatctgaacaggctttaccaaatgcctcactaaaattgaatactcagtaaggaagatttctctggactatctgtatatagtttcatcttagactttgagtgcataggtactatttttaaattctctcttaattagttccgccttgttcttctaaaggccatatagaagtctttggtttctaggctactacatttcctgggtagatgatcctcagatgaagtaatttgagtttcccagcttctttcagaaggacccattgtagaaaatgaaacacgtgttagctgagacagatctctcattttatttgaggcttatgggcgtgcacacatgcatgtgtgtctgcatggtgcaataggacttagttacta

SEQ ID NO: 35331 - DNA, 2459 bp, Bovine  19866880760698
  misc_feature (1)..(1): n is a, c, g, or t
ntatgaataatgcaaacaagatttttttttgcttcatgctaagatttttgacctacaaatcactgttcgtgttaaagtttcttttgaaggcacccagttaatctcaagattaaaacaatagtctgcctttattttcccaattttgaagctccctatctcttctcttaaaccttgatcatgcccaggctacagtttctgtacatttctgcctgtggagaaagatctcagatcaatcaagtgactttattgatctaataggcactaccaggtctgctacctgtcaatgcagaaggatgcctgtattataacagggtggtccctgtgctctttgtgaaaagataaaagcaaagtgcccgaagtcaatgctgagatgcccgaagtctgggaagatctgagctccttctctcaagcagggtgctttctctatgtcattcttagagactacctacatttaacctcttttatgttcttgtgtattatattattaatgccaattgctaatattattgagtgttttcctgagctaggcactgtgataaattgattacatttcccctatatgtcttcctgttaagctggtattcttctcccatttttcagatgaggaaatagggcctcagaggcactgactgcctcagagacccacagctcatggttggtgaggcctgcacttgagcctccacagcttgtcttcaaatcctatgcactttctactgcataaataactgtcttcagcaacctgtaaaacaggtgtggtcatggaactcagctcaatgttatgtggtaggctggatgcgaggggagcttgggggagaatggatacatgtgtgtgcaaggctgagtgccttcaagctcacctgaaactatcacaacattgttaattggctgtatctcaatataaaaagttaaaaaacaaaacaaaacatgtcattcatcctgttgccaatagagaaattgaggctgatggaatgcaagtgatttgccactttcccaaagttttgccactgggaaatagcaaagctggaacttgagtgttttaactccaaattcagcactcttcctctgacccttgcagcagccctgggttgctggcaaattcagaaaggatagaaagctgagttcctggttcctccagggtcccttgcctcggcctgtcactacctggattcaggtgcttaggtcttcttaggccttgggctgagcaagccaagtcatgtgaccctccaaggcctctttcatcaaaaccactttccagtgcaatttaaccacaagtatcctcacctgggtttggctacgttatttctcagggtccctcttgggttctttccattaagatcccccttcaaagtcccactcctacaggaggccttccttctgtctttggctcaggttactctacttatgggcttccctgctgtctcagtggtaaagactctgcctgcaatgcaggagatgcaggttccctgggttgggaagatcctctggagaagggaccagcaacccactccagtattcttgcctggaaaatcccgacagaggagcctggtgggctacagtctatagcaaagagttggacacagctgaagtgactgagcacgtgctctacttaaaaccttcttgtctttcgagttgactgttttctccttcacttttctgccctgggtccatgagagtctatgctagattccagatgtggcttctctagaatatgaaaactcccagcacccctgggaggcaccccccatctatgaggaagttgatcacccaacagtaccttcccctgtacatgctccaggcccagcccccactcctgttgctcccactttgggttcaccatcctggaaaaggttcagggtggtgatggagttaatgcaatccaatcggaacctgtgaggaagagcttggcactagtataaacttccccacctgccaagggcggccctggtatccatcatcttctgttccctcttcccaataaaatgacccatttaaaccagatttttcttattaacaagcttcctactaaatggcttcagctgtgcttgttgatttatagggcttaggatgccctgctcagctgtgcccctccctgttggtcaagggcctgaatcgtcttgtcctggtgacactgggggagggcagaagccaccttccaagtggcaactccagaaagggcggcttctttccttcttaatattttaattttggaaatgtttgaacacacgagattagagaaaatctaattgtatagtggaaccccttgaaccatcagcttgccaatctcatttgatttgcttctccctgcttcccaaacctcaagatagattattttaacttgaatcccgaacattttatcattccacccatttcagtatattttctaagagataaagactgtctgtgcttttagtctaaccacaatgccatgcacacatctaaaaatattaacaatacgtttt

SEQ ID NO: 35332 - DNA, 1727 bp, Bovine  19866880842018
  misc_feature (1)..(1): n is a, c, g, or t
ncttggtggagttcaacctccttatgtcttggctcagaaagaattcagtgagaggcgaggtgatagataagcgtgagttattagtataggacacttgtgaaggctacaggtggacaggccagaggactctacagaagaacttagtgggctacattttttataatcaaagggaaagtggggaggggggagaagactaccttcttcctcatccttgagtagacatcaggcttccatcatcagcttctcctctaaatcaggtgggggagtcttcttgtccctccacagtcaaacccagatggtcatggagctattcaaatcagtagaaaggtggtggtggtggtggttcagtcgctaagttgtgtcctactcttgcggccccatggactgtagcccgccaggctcctctgtccatgggattctccaggcaagaatactggagtgggttgccatttccttctccaagggatcttcccaaccccagggaatcaaacccaggtctcctgcactgcaagcagattctttaccaactgagccatgagggaagcctagaaaagtgctaacatatgctaaaatatggtaaattatctcaggtttcagtgtaaagatgttcttgtactttagaatgtcatttcctcatatatatatatgggatcattaacttacttacctcaaccagcaagatgcaggtgccattgacttgtatagttttgttattaagcaagcctgctatatttacaatgtctagattgttttctcaagtgatattaacttacagttgtctcctaaagccccctaaatttccctctctatctataatcctctagtgggatttctaaactaactgtttggttatcctactctttctgtatcaccaccaagctctattcagatttagctctcaaaggctaagcagaccttaacaaagtgaaggatgtggggagggtattccaaggagagagagaggaaaaccaagtttaggattctggagaagttctgaatacttgccaacaacaggttattttgatggcttttggaaaaggattttaaccactaaagtggcttgagttatggtcctttctcaatgtgagacttagggacttctgaagtcccttacagtagtacatgctatctgacttcactgtttctcaacacctctgaaccatggtgttttcacacagggagtcagaagaccttggtttgagtccttgcaatcccttgcaagtgataattgcatttggactagcatgcacattaccaacctattctaaaaaacgtaagattgaacaagtagacaaagaggatgaagttattgaaaagaaggccaaaaaggccaaggttaaaattaaagttgaagaagaagtagtagaagatgtagaagacacagaagaagaaggagtacaagctgtagaagaacaggaaacatctgtgaagaagaagaagaaaaaggacaagaagaaacacgttaaggaagaaccactttctgaagaagagccatgcaccagcacagcagttgctagtccagagaaaaagaagaaaaagaaaaaaaagaaagttaatgaggactaatggaaggaaccattctttcaaagagttcataattgaatcacctggatacatcatgcttatgactcagtcagaaatatacccaagatactctgtaaaataattgatgggaggtggatgagaaagaaagattaatcgttaatagcatttatacctatttgtgt

SEQ ID NO: 35333 - DNA, 1629 bp, Bovine  19866880895647
  misc_feature (1)..(1): n is a, c, g, or t
naaaagatgattttatgaaggctaagtgtattaattggacaatactgagaacatttttaataagaaaacagagttgtcaggtgtcattttattcattcggttgtgaaccaaacaacaggttacttctgtacaagatctggatcattaaaaattaacattggtatgattttccttaaagctttacccatacaaagcttttcatgtttcaaaggggctaccaaatctgactattatacaaagagaaacctttaatgcagtcagtagataataggaataaaaagttagcaagatcagtggaaattcccttttgggattatgaaatagtatctaaacacctttctttgtagttgttcctgtcaagcctctgacttgttaccatgccagccacccaggaatcaaacttggttaaattcaatgaactaaactttggggaggaaaatagttcttttgcctctgtatctggtttggcctgatttgcttttagactaaatatataatctgcccctcatgttattgttggggcttcccaggtattgctggtggtaaagaacctgcctgcgagtgcaggagatgtaagagacgtggggtttgatctcgtgccctggaggagggcatagcaacccactccagtattcttgtctggagaattccatggacagaggaggctggtgagctgtagtccatagggtcgcacagagtcggacacgactgaagcaacttagcacacacatgttattgtcataatgtgggattgaaaattttttgctgtagttactaaaatccatggttatttaacaggtaatttgtactcatttgatttttttagtggagattagtaagatttctcttgagtttgagtaggtagaagaatgagccttcttttttgataaaccccatttgagtcaataaattttggataagaaaaattgtgcatagctttaagttcacctcttgagtgacattgttttgagttgaattctggcattaattaatattttataattatcaaggaagccctgaaaatatatacagatctgtgtctggtagtatgtgtatgttaatcactcagttggtgtctgactctttgcaaccccatggactgtagcccaccatgctcctctgtctgtggaattctccaggccagaatacaggagtgggtagccattcccttctccaggggatcttcccaacccagggtttgaacccagatctcccgagttgaggcagattctttatcatctgagccaccagttcccgagaggacagtgctcagagtgggatatgttttgcagtcacattctcccctgttggaggagatagcgttaacactttaattaatgaaatgggacagatactaacctaggggtgatgcttggtatcttccatgtgatcattgttttttccctacctcatccttatcataattgattttttaatttcatttcttttttttaaatttctatttttaatttttttttctatttctctgcagaggggagaagtatatgggactgtggcaagatgatgtatgccaaggcaatggtgtagtagttacccagtttggtttatactatgaaggcaacttccatcttaataaaatgatggtgagtggaatgttttgcatatagt

SEQ ID NO: 35334 - DNA, 1101 bp, Bovine  19866880932929
  misc_feature (1)..(1): n is a, c, g, or t
nacattgaaagagccagtgagtaaccctccagcttcctcatcccttgctgtggcaactgagggggcctcacgttaagatggtagaactgcaggcatggaagtagctgagatcactgcatcattagtgaagagggagaggaaggtaactttcctggattgctcctatgatggactttgcattaaccagaaaaaccccttatgatattaagtaactgtgatttgggggttagtgtgatgtaacccagtctatcctgatgaaatgagacaaaagaagatgtagtccctatcacagaactatatgcaagacaacagttatattctaggtgactccattcagggatgaatgttttttaacttttaaggtcaaatatcaaccacataactagtgtcacatagtatcagccatcctttaaaaatggcagtcataggagattaatatgatttaaaaaattgtgacattatatactattcagattcaagtttaagggaaaattaagggggaaaaaactaactttcaaacatcaaatactgtatttagaaaattttacattaacagaaaactaactcaccttgaatagcactttacatgacaccaccaaatttaatcaggacagagacaaaaagagaaactctattaattagaaatctattaaactgtcagattgtaaattgacttatatcattacaaatttaaaataaaattagctttcacagaaaataagctaatttacaaactagcttattatttataagtaataagctgtttaataagactaacaaaataaccccaatattttctgaacctacatatacatactccctgtctattaataaagtgggttaaacagattaaggactctcatgttgtcactgattaaaatcagcttaaactctgaggaaactattctcacaaacaaaagaggatcagaattctgatcaacaaatcactaaaacattcagaacagacacagtatacgaatatgtggacattcagtctttgaaacagaatgtttaattacaactgttatcttaatgattcaaggatttttcatctttaagcttgaggaagtcttttctgaattattataattgtgcaatgct

SEQ ID NO: 35335 - DNA, 1113 bp, Bovine  19866880951511
  misc_feature (1)..(1): n is a, c, g, or t
nctcaccccccacccccctgccccgaggaaaaccctgaaacctgaccctgaggctgagagagaaggggtcatccaggcagatgggtcagagggcatggccaggggaggggtcagctttgtttccgctccgtgttggtgaaagccaaatctttatggaaattttctagctgcattttgggctatttagcttcaaaaacaaaagatttatttttccctgctctccttttgggttttgtcctctgctgacagcagtgacatatgcgggtctagaggctgttaagattaggccaggttcccccacccccaatcccactccttcttccccagtcctaaggaaaagaaaagagaatcctaagtaaaaaagaacccaacctgcagggaggcagcaggaacattcccaacttccaccactgcttctctggtcttttcaatagagaaaagaacaggagtggcatggtgggacgtgcctttcattatacactgttgacataacctgttacattttataaagcacttgcacatgctgcagtatcccatgggatccttgcatccgttccttgagttggggcttatggtccccttttgcagatgtgaaaactgaggcttatcagtaactctgccaaggtcagtgagatatcaaaggggtagaactagcactcccaccaaagtttctgtctccaaacacagggaccttcctgatagatacgctgggagatgtgatttaacttctccaggtctcattttccaaatctaaaaggaggttattccctaggttctattgagaccttctaaactgttttctcactttggtccttcacgagaaaaagtcaatgaaaggggtgtcaggagcttgacagtatgaggggaagaaatcaagctgtgtctcttggtagcttctggggttttacctcaaggtcccctgcatggtgacaaagatgggttgttgttcccatgcagttctcaagtatcgatcagagcagttatcgaatcaatctggaacatctccagagtggccctctggcattgtggatgtggaagccgttcttagcattgccaggtgttcaaaagtaagggattttggtaaaaaaaaaaaaaatacagtccgtttcaaca

SEQ ID NO: 35336 - DNA, 1980 bp, Bovine  19866880976554
  misc_feature (1)..(1): n is a, c, g, or t
ntaagagccttcagggagagagtaaatcaactatttttggttttcagtttcccagtcagtgaagtggagatttagtaattttctcaagtgaaaatgaactcaataattttcaaataaaaactgagcatcaaatttccaaataaaggatattgaatttttgtttaaacttttaaaatctcaaagcttaaagcttttagcacaatcttctaaaattgttggtatccattgttggctttaattacacaataatacaaagtagccaacaattctggtaacttttgccttagagaaaatatggatgtggtcatttttatttcctttattgctttctcttcattatctttgctttcttgtcattttcttgctaggcaacagagatgtaggggtatttgtgaatcattctgcccacttgtttacacacacatctgtgcaaatacataagatggcagtttagcaaagaagaattaactccccatcctttggccctctcccacaaaagaagaattagtccagttggtttttcaaaatggattccaggattctcagtgttccctctggctcggggtggctgataggaaaagctcacaatcctctcagtagcttttcaatttgtttagggaatggatcaaagaaagaagcttctactgggtggcttgattttattattattattattattattatatgagggaaaatggcactttggtatcttttgtttgaggacaagcttaacaggcaccacaaagtatacttgtcagccagagtcctactcagctaactggtggttattaagaggcttccagattcctcatcaattttcatcagtcgaggcttcccagatggtgcaatgataaagaatctacctgccagtgcaagagacacaagagacacaggttcattggtaagatcacctggagtaggaaatcagtcattgttgggcagttgatttcctgctataacaattgggccagcatctgtctccagcattttacaaatggattcactaggcttcttctatgagagatgcttgtattgaggtatgcttcccagaagagctatattgtagtggtgtatgaaagctactaatgtttcattagtatttcacaaaaacaatattattctagctcccaactgacattgagcatttatgattatcttaaaagaatggtaaggttttgtctacaagggaactcagagtaacagagtcatttaaaatctgaagtattttgacttaaattctaaaagatttttcttttcttagtaattaaaaagtaaagcttcagtttagtaatccaaagcataagtgagctctttttcaagcaatgttgttactattatgatccaccagttaaaaaccaaacactatattccaaactgctgggccacagagaaaagaagcagataagatgaattcagtagaaaagactagagttaggtttcggatcatttttagccaacattccactgcctaaaggtcagtaatctgaatcctttttaatttgaacacattggtgaacagctgaatgcccatgctgaggcataatttaaactgtcaaatgtctcctgttgagatatatatatatatatacacagagagttatctgatgtaaggcaaagggacactttgccactcacgtctttctgtatttccaactccaaagatagcatcccaatgtatggtgatcatgcactacatacagtaggcaaacttcgttttattgcgctctactttattgcactttgcagacattgcttttttaaaacaaattgaaggtttgcagcaacgctgtcttgtcagatgatggatagcaattttttagcaaggaagcatttttaaaattaaggtatgtacattggtttttaaattaaggtatgcacattggtctgttacacacttaatagaccatagtatagtgtaaacataaattttatatatactgggaaaccaaaaaatttgtgtgattcacattattacagtat

SEQ ID NO: 35337 - DNA, 1404 bp, Bovine  19866881013409
  misc_feature (1)..(1): n is a, c, g, or t
nactaacatgtaaagatactgttatgaagaaagtacttttatccccagtttaaagacaaggaaattcagacagaggagtaacttgcccaaactcaaagatgtaggttgatggggctccaggtacgcccaggtctaaagcctaggatcttcaccattatgcttgtactattaagattaaaatactgtaatctactgcaaaaacaaatttttcactcttttaaattcttaatcactaactcagaggtcaagtggccactccaaaaccatccctatctatgataaactgaaaaagatactggaccaacaggtttgctgaatttctgtacttgttcaaaataaacacacatcacacaattttatttttctaagcattttaaagaacatttacagccaccaacaaatccagaaggcaacagactaaggatgagcgtttgttgctgctgctattgttcagtcgcccagtcgtgtccaactctttgcgaccccatggactgcagcacgccatgcctccctgaacctcaccatctcccgaaatttgcccaagttcatgtccattgcatcggtgatgccatgtacaaatggtgagcgtgtgtattcaacagttatttccttttccattctaaacccaaaagaaaatactgtacttggataagccacttcagccagtgtgtttttcctattccctcatcaacaaagccctaagcaatacaccaccactttagccaaacacacaaggaggaccaacaccagcgtcagtaccatttcctcacgaaaacccctgttattttcctcttcacttgtcaaaagaacttgccaccctctgctggatcacttgacacgcaaaaggactaacctaaactcctaattcttaatatcattttctttttccacgaccgccttttcaagtcagcgaaacccttggtccactgtccaccgcgagctgcatccaggggcaacccctcccgggacactcaccaaggttcgcggccagggacccgagtttatctggtcggcgccaagagtgggcattcaataaatcctccggaatgaatggctggaaggcagcgtgggtggaggcgggaaggggggacgcgaagaatttcaggaggctgaggtcttccgcagtggcgccccgtgtgaggagggaggaaccggggcgactgggagaacctggggccgttgggtgctcctccacaggcaggcgcagcggggcggacgctggcttgggaagatgggggcgccgtctccgcggatccccgcagagcgctcctgggcctctgcctgcgcctccgcctttctctcggaccccggccgccctcaggctggaggccccggccggtcagccttccgaagccacgggccaacccgggacccgcgctcgctcacctgacgctccaccagcgg

SEQ ID NO: 35338 - DNA, 2145 bp, Bovine  19866881073095
  misc_feature (1)..(1): n is a, c, g, or t
naacctgtaaggtagggttctgttctgcaatcaaatgttctttatataccccctcatagagctattcattattatactgttttttccaaataccttcatacactttatctctgaaacttaaaatatttcccagttggaaaggatgtatggtgccttaattgtcccccagaattttagaggaatggtggcttttcagggggaaaacaagatgccatgggaagtcctgaatgcctccatataaatagagccggcttggctccataaccaatgagattaagtcgcccatcagtcacatctgagtcccacatctttcagtataatctgttggttacccacatacagtaaaagaacatctattccaagagcacatctttatttcttcttcccaactctgtcaatgtgctggatggttataccttgtcaattttagcaagcacttgccttaaagtgtggagcctggaggatctgtcttagctcttggatctcaggggacttgggggtttcgcgtagtatcttcactacctggttggtgggaaaacatacatgtgaatttttaataatctttatcacctagttaacatcacccaggttggataacaggtatattgacatgatatttacctaagaaaagctgttactaaagccttcttcttcacctttaaagtcaggtgaaattagcattttttccttattcactaaacttcattacagccgatagaatccaagactggggatagatctaaaccacagtgcccttgtcctggcacctcacagacttgggggaaggactaacttaatcgtgtaagatcatatgtgccaaggcagtttccctcagtgcctctaaagtgactgtttgctcatgtgaatgctttatgggcaagttaagatatctgggttctccaggtacaggctcagttacctggaaaaccaagtagctttaatcccatgggatgttccatttttcaactaaaaaacgaaacggtaatttgtattttaaggcttttatttgattagtaattttaatgtttgttgcaacaataaaaaagtgttagaataaattctgatccctttgctttggtttaagtgtagacctggcttctgatagaacataagagctttcaagaatttaactctgtaaatcctcaccagtcaagcaacatcacatccagtcaaatgaaaacaagaggtttagcaaacttcacctccactcactagggttacagctgaataaaatcacatgtatgtgtttccccatggatagctaagaacaatttgagttgttgattactggagttttggctgtaaggctttattttttttctttttaaaagtttctattaatgtggtttggacaataaataaaaataaaatggattatatttatgcatccaaatattgggcttccatggtggctcagatggtaaagaatccacttgcaaggcgggaaacccaggtttgatccctgggtggagaaggtctcctggaggagggcatggcaactccagtattcttgcctggagaatccccatgaacacaggagccaggtggactatggtacatggggttgcaaagattcagacatgactgagtggctttcatttttcaacaaatatgtattgaacatttactatgtgctaggtattgttttttgtttgtttgtttttaaatatgtatgtatttatttacttggttgtgctgggcctgtcatagcgcttgaaatctttgattttttttctgaaatgcaggatctagttccctgacgagagatcgaaccctggtcccctgctttgggagggcagagtcttagccactggaccaccagggaagtccctagacactgttttaagtgatgcaaatacagctgtgaataggcagacacaaacccccacactcatagaatttacatttttgttaggagccacagaaaagaagtaaaatgtgtaaataaaaaaaagaatagttttatttgatgatgaaaagaattaagaagaaaaataaaacaaggaaggtggatagagagtgctatgaggggattgcagttttagatggggtgaccagagaaagtctctgtgagaagctgacgtttcagtggaaactggaaggagatgtagaagcatatcatgtggatatataggcaagagcatt

SEQ ID NO: 35339 - DNA, 1771 bp, Bovine  19866881081058
  misc_feature (1)..(1): n is a, c, g, or t
ncttttttttcctaaatgagatctatattgttctgtaacttgtttttcttcatatatgtctatcttatactctagatgtttgcatactatttcactatatagtaataatttagccagtcctccattaatggatattggtaaccaggctttcactctttctattataagtcttgctgcaattaatatactgttacatacatctctgtgaacttggacagagtatatatttctagtgtattttttcattctgttactaggatgaatattttgaaggaaattttttatattcttagttcctaagatagtttatggaagtgagttaaatcttgtttatacataaaatatttaaaatggtatctcttccaaactcgcctttaacaagtaaaaacaataccacaagtattaagatacataataaatacttagttttgtagtatttatattaaattgttaaaaattaacattaaaccactttgagccattatttttctccactggagtaacgtaaattaaggaaatcagaccttcttgactatcccaccttgaaaaagcagtgaaattcatgactctctcaaatatgtttaacatagtttttattaaccaaaaatgggtattcgctttctggattaacagtcttttttattctccagccatttttgtgtaatttgcaagtgtagaaaacccaggataaatcaatctttgcgtactaggtcttactttgtagaaaccaacttcagtatcttctaagaaggcaaagtaaaagaaggaaggagcaaactcaagggtgctactgaaacccttgtcatgtttcaggaaggatatgacatcttatccactgtactccccaccaagtgatggacagtaattgagaaagtttaatttgaattgactcaaaaggaggaaaagctgataaacatcttagtgggctgattttaattggggcacgggaagtctgtctgctttcaaggctgcttcagtcattatgtcattccatattgacagtggggtcttgcataggtcctgaatttctaccatgtgtcagctggcttcataatgtcaaatcctgggggtgaaatcctcatctctaaagtctctcccagctaatgagtcacttacctgctaatccctttgtaaactgtagcataagaaccttcacccagcttctccaagttcaagtaagatgaagctgccccaaaagggaggctcttcctctgcataagaggaatgaggagtgaggaggggggaaagaaaagagcatttttttagtgttgactttttcccccacagaaattagacaacgttgcagaatgtgcttgggaaggtctgcttagtaattgtcttggaaaaagggccagccttcctagataagtacacattaaattcctcttgatcaacatcagctgctcactcacccactgaaaaccttgcctcagatcctcttcctgaaaagaatcgctgttactccgtggccttttactcttgaacttccgggcatgcacagcctgaagtcccctggggtgaaatgaagtcatggaacatgatgcttcttttaggtctgttagctagagaaaaaggaaagtgcaggaataaaatttatgcaaagtcaagacaatggctagcataaaccgctttttctttatttgcctgatgttaactcttcaaatgttttctaagcttcccacactttcaaaatgtacctttcttgaacatcagttcctttaaaaaaacaaaaaacccataagatatcaactgctaaaacacaacattcttt

SEQ ID NO: 35340 - DNA, 1254 bp, Bovine  19866881083463
  misc_feature (1)..(1): n is a, c, g, or t
nttttaaggaagtagcaagatttttttttttttttaatggcacaggacctatatttaggccctcactgttgaccatttagtttccatggctaagctaaactaagtcatccgcctgttgtattctgccagcagtatttatatcaatgacatgttttgtttgttctttttatgtctcattgttattaaaataagtcactgggccggtttagtttattttctcctaaatgtgcaagaattacaaaagctggcttcttgttaaataatgcatgcttggttgattgttttatgaagaaaagtgggtgaagttgttcctaaaaagaatgaatatagatccagcatagcaagtagaaagtactcaaggaagtgtgtgtgtgtgaactaggaaaggcactggatatgtactgtttgtgcttgccagagtttagttttgactgcatttaggactgtgacgctgcagactttctatttatgcatcacgaggtagagagaaaatgataaagggcactaaactagcatcactcattcagaggacaggaagtaaatgtgacttcttagttgcaagaagatatcataaagcaatcaaccgtaggctttacagtgtgtacagctttctgtagtcttgaataattataatgataaagataaaatagtattatttgatggtgatagaaataataataactcatatttgcatagcatttactgtattctgaggtattgttctaagagctttacatgtagtaactcatggaatttcccagtgaccatctgaggcaggttcttctattatcctcttgtaactcacttaatctccataaaggagacatgttattaaggccacttacaaatgaagaaacgaggttaagtaacttgtccaaggtcatgcaactagtagtagaactggggttcagaatccatgttcttaacctctgtgacaggctcaataatggccctccaggatacctagaccttagtctcctggaacttgtgaatattacctgatacagccaaagggattttgcagaaaggaccacattgagggattttgagagggggagattattttggctaatccagttgggccttaaataaaagtatgagtgtccataagagggagatagcagaagatttggcagaagacggtgatgtgacaggggaagcagagagagagaagagatccggagatactggctttgaagatggaagaaaggcccctgagccaaggactgcagctctagaagctggacaagacag

SEQ ID NO: 35341 - DNA, 2847 bp, Bovine  19866881189988
  misc_feature (1)..(1): n is a, c, g, or t
nactgttagaacagtctttaactgttctacccatctccaagttctgtatttttgtcctgtcaagaacgtatatttctaaaattctgatctgatcaggtcacttttatggtggcatctcctcatgactccctagtatcaacagaataaaatccaaatacattagcatttgaaaatttccataatttaactatatccattttaaaacaccatatactccatgcttcagggctggtcactgtgcctggaatcctcctgacttttgctgaccctggatctctgcccctccttctgcttataatacttcacccttcctaccatccaaggctgaacactaatactgcctgttaagaagtcctccagagtccccctgagctgagttaatctctcactcttctgagttcccttgtgtacaacaagcaccattgttatacatctggtgcttcatactctggagccaagactgcctgttagaggatccctcaggcccctgtgctcctccaagctcagtcactgggtggggtgccccaggaggagcatggcctctgaactgaggtgggcctgaagctctcgcaggtgggacctgtcctctcactgcactccctacagctgaatggcaagttgtttctcggagggagacctgaatggcgggcaacccttgctgccacagaggccctggggaagcagccagattgactggtgccagctagctatggaagcactattgtcttattctccctctgaaccctcaactccactgttctctaggctcacatattttctgaaattgtgctccaagtactttactgagaaagtgtcgaggggaccaacagggctccccaatcatgaagctggtggcctgagtacacagcaaagaaaagttttcaaattgtgtgtgagcttctgcagagtacagcccaggctcctgcctctactactgtcccctaacccctgttagagatgtgcttctgcaactgggtctccggcctattaggtaaatgtttcatgcaactgacgaggcctcgtccccttgtcatttgcctgctgcccctgggttacagctgagagattggctatacctccccaacttccctgtggtagagatcactgaatccttgatactactgtccccttaagaaagaaagaaatgagagtcatgagcagagcagacgtgtgtccttataaatgggattctccccttgaccctcacactccccttactgtcccattctttcccccaaacccagactagtgagaaacttctgagaaacaacgtccacaattaaatataaggtcacatttagttcagcaccactggctgcttaattggctgattctatagcatcttttgggtgactgatactgttgctgaagttgaaactccaattctttggctatctgatgtgaagaactgactcattggaaaagatcctgatgctgagaaagattgaagggaggaggaaaaggggacaacaaagcatgagatgattggatggcatgactgactcgatggacatgagtttgagcaggctccgggagttggtgatggacaaggaagcctggcatcctgcagtccatggggttgcaaagagctagacacaactgaacaactgaattgaactgatagcttctctcctcatctgccaacatagtgtctaacaaactggcttgcagggaaattaatcctcaggttcctgagacccagctggagtaggatttgtttccttcatgggcatctgttcatttgtgaggttgttgggtgggggccagggtacaactgcatggaacttagtggagctaagtccagaggtccggtgggaaacttacaggggctcagaggaccaaccatcctaaagaggagttgtcagcttcttggagggaagctctagccttttgttagggtccaggacaagcagcctaatctttttctgggtctcagattcttcccatgtgaaaatgggtaatagtaacaactgttactatactgtcacctacaaataaggattacataatgttgtctatgtgtgacgtgcctggtgcccatcactagggcagtgatgagactggataagcaaatgaagtcatgttgcccaaggcagatgttctcagccctcagtgggcagtgaaagtgttagtcgctcagttgtgtccaactttttgcaactccatggactgtagtttgccaggctcctctttctatggaattctttgggcaagattactgaagtgggtagtcattcccttctccaggggttcttcccaagccagggatcaaatctgtatctctgcattgcaggtggattctttatcatcttaccaccagggagggaactgtaaatgatgggcagtggggagagggcatgtctcttagtaggatgggaggcagctgtgaagtcaacccagctggagcagagttgaagcttgagtttttaaggagacaattactgtcacaagggaaggcatctgggggtggtccaggtggaacatccctcctcccaagtttattcacttactgactgtggccataaggaggacggcatctatccaggcatcctgattgtcattatcattatccagatttggagtgtggtttgcacacatctatgtccatgaatgcatttgatcctcagaacaacctatgaagttcacatttccagatgagacaatgaggctcagagaggttattatttgcctcacttggccacaggcctgggtgagaaatggggatttgaagtccattattttctgagtccagcagtgcatcatgctatcatgatgacagacacctctaacattgctgagggcatgggttgcttatgacccttctaaacattgctggagaagttgcca

SEQ ID NO: 35342 - DNA, 1299 bp, Bovine  19866881342438
  misc_feature (1)..(1): n is a, c, g, or t
ngagacagtggctgactttattttttggagctccaaaatcgctgcagatggtgactgcagccatgaaattaaaagacactccttggaaggaacgttatgaccaacatagacagcatattaaagagcagagacattactttgccaacaaaggtctgtctagtcaaggctatggtttttccagtggtcatgtgtggatgtgagagttggactgtaaattaagctgagagccgaagaattggtgcttttgaactgtggtgttagagaagactcttgagagtcccttggactgcaaggagatccaaccagtccatcctagaggagatcagtcctgggtgttcattggaaggactggtattgaagctgaaactccaatactttggccacctgatgcgaagagctggctcattggaaaagaccctgatgctgggaaagattgagggcaggaggagaaggggacgacagagtgtgagatggttggatggcatcaccgactcaatggacatgggtttgggtggactctgggagtgggtgatggacagggaagcctggcatgttgcagttcatggggtcgccaagagtcggacaccactgagtgaaccgaactgagctgaatggcatcgcacaattgagaatacacagaaattctgctcccaccattagcacacagtggtgaagctttgttatacaaaatgatgtcctgaaagccattttctcacactagggaatctcatgtgttgttcacagtaagtcgctggggctgcacaactagatagttctccatcacctggctcccagttcactctttaaaccatgtgatggtaatggtttttatactttctaactactatggagtgaaaattgtgagctgtctgctaatcattttagcaaaatgctaatttgatgtacaaagcatttgtatctttccagggacatatgtattgtataacccaaggtacacaaatacctcccctctatttgcccacattagtgaggttttgatataccaatcagtgtcctcactcttagcccaggaagggagctgccaggaagctggagctgacagtctgaggaagaggaaggggcatcacggagccctgggttctgggagaacttcacctcaaggcccttgctgctagagttcactttgtaccaggagcccctggcccacaggtaagcccactgtctgtgactcaacctttatagtttcctttgggaaagcattcatatcttctggagagccgagttcagatgcaagtccttctgcagagatggcattaaccatactgtataggaagggga

SEQ ID NO: 35343 - DNA, 962 bp, Bovine  19866881359856
  misc_feature (1)..(1): n is a, c, g, or t
ntttataaatgaggagcctgagtcacagagctgttaagtaacttatccaagctagcacaggtagaaaggggttgaggcaggcttcggaaactaggcacgtgctttagaaaccctgcacccatgcccttaaccactagatctcgtggccttatgatatcaggcagagagactggcaagtctgactcctgtgctcaggaatgcagaggcacctccacttctcagacaaggtcctgagattcttgcggctggtgaggcttcatggttcaggtaataaaaattttggctgggttttatttagaccagagtttccatctcagggttgaacgatcctattctcagcctgctggtctctggcatttgcaacaggagccttctctgttgaaggactgactggtccagttgagccccaggtagaagacaaaggaggtataagacaatctttctccctgctggcttggaaacaatcatctttctccccaggaatcaatgtctttgcattctggatgttgaaagaaaagacttcatgtcattaaaaataaaattttttaaaggaaaaaaaaagcagtgttcgtctctttgtgcatctctacaccctcttagatgtgcctgcagaaaacttcacttaaacgagcacattcctagagtgctaagggataaatggaacaggaagtggactgactacttggttatttgttaattctctgcaggggaataacttaggacaatgcctggtgaagatctcagagacgcaaaaaaggaaggtgtcaaaaggtaaagggattcttagctgggagtagcaagggaggaatgaaggaaatgtatctaatgaaattataccagcctataacgatctggagaaaacaaaccaacatttttaactgctgaggaattcacactgagctcagataagacaatggatttatttataggtgccccatggtgcatgttggggcgagggcaag

SEQ ID NO: 35344 - DNA, 2524 bp, Bovine  19866881430170
  misc_feature (1)..(1): n is a, c, g, or t
ntctggtgttcctttttctggctgcaaggttaataattcagtttaggatttaatttgacgtggctgagccactcttattgcaggtgatatgaggtctcctggaatataatgatggggctgtgtgaatttggagtacatgaggtatttgcaaggcctctggagtcatggaattattgaaatacagcatattttcctcagtcacagtctctcttgaagaaaacctttcacattccatataaagggtatcttcaaaacaggcatattaaaaaaaatgcaaatgttggttgtgtggctccttagtagcaggaagggtcgactcagttgtgttttagctcaggggaggcctgacccaggcctggggtcctaacaccgagagttcaggtccttcctcagaaccaactaggcacacacagggaaacaaagttacttttattattactgtgttttaatgagtgtgagggaagaggagaaagccaggaagttggagataagggagaaatagaggccatgttggttcatctctcaaccaccagcacccgccccagccccccgcagggagagccccgggctgtgctgcgtctgctgagacccgcaaagttctaggaaataccctgagttgtctctctagagtgaatctcaaggcagtgccagcttcaaatctttaattttaaggaaccaatttataaatatttgtaaacatatgtcctcgaatcactaataagtattttttttttattttatttatttatttggctgctctgggtcttagttgtagcatgtgggatctagctccctgaccagggatcgaacctgggcccccggcactgggagctcagagtcttagccactggaccaccagggaagtcccactaataagtattcttaatccacccggataaagcatttttctcctttcttcacagtctccttgcatttttttcttagttgctattttttctctccccattgggaatgagaattagagtaggaaaaaaacaggcccattggcgcaaagtcttagtccccactgcctcaatggaggatgcctttctgtgtttccctgttcccttctgactttgcagaagtcagggaaaggcctcttcagcttattcgcgcttatgaagagccagacaaaacagtccaagttgagttaagacattccaagtctatgagttaaggaacctctgtgattttatagtctgcttgtctcatttaattgatgaagcaaatgaggcccagagaggtgaagaatctcacccagggtcacacagcaagcagggacaagaacctcaaagtcccgactaccagtcacttgctcatgcagaatcaatactgtacctgattctctggcttttgagtcaaaggtgaagtctcattaagattcatatgaagatctgttctggattcagtgtttactatgatgaaaatcagagagaaaagggtcaaggttgtcagatataggtctcatgaatttttatgtatacaatacacctacatacctagttcatatgtgtaagactataaatgtacacatgcttatggcattcatatttacttaccaaataacacatgtaacctctataggcacagtctaaatgctccatttaataaagtgttatagagcttatattcaaatttctagttttcttgttttggttgctctttaaaagaacaaaagtaaattctttgtgctactaaaattcagataaagctgaaattaaaaaggaaatattgatggaaaaaaatctgctgatactgttgaatataaattttgtatgatccaacttcactgaagtaggaaaatgcttctgcaaccttccagatagagagatcagagccttcccttttcctcattatgtggaggggcaataggagaggtggaaacacaagcaaacaaaggcaaaggtcaaaacggggctggtgggaggggactaacagaaatcttgccgctcacccagaagcaggcacatacggacaaccacatgggctggcgtgtaaccttcacgactcccctccatggtcgtgctgtcatactcgctataggtgtggaagctgaggctcaaaagataaagtaatccacccaagggtgtgcaactagtgaggttttgagtaaggatttgagtccaagactgccagactcaaacttcatgctgttagaggataggatttattttgtttttctttttttcccctaagaaagtaaatttcatgtctgtaaaggaatgtttatttgaggaacagattcagctaagtgcatggctcctctgaaaaggattttagtctcttgtactggactagtgtccaacacaaagttctttacatacttgctactcctaagtagttctgtgatgagtctggccatatgcaattctgcatctttgcctctttgacctgaagcctctattctttctttgtgggctgactttccctttcccttttctgttgtttctcagctgttctatcttgctggaaaatggcttctgcacagatgaaaacatttgttatttagataactagggaaact

SEQ ID NO: 35345 - DNA, 1065 bp, Bovine  19866881570231
  misc_feature (1)..(1): n is a, c, g, or t
nctttgccttggaaatggggaaagtcaagtcaaagaaacatcttcaactaagcaacggggagaaatacagttttcttctcctccctggcccgagcccctggagtcactaagagcggccacacttgaccgtcagggcacagctatgctgctgagtagggcacaaaggcacaaggcagagcaggaagcagaggctggaggctctgagacctgtgccgaggctctgggctgcacacgtgcttgaaggacacggcttcatttccttcgcacaagatgcccctaccagcctcaccttgtccctgcagggatgcctgaaaccaaaggacccttcttttctagacctcacggaagccatggcataggcaagtggcagccccaccccattcatcccacactaactttagacaatggggcccaaacatggcgcagctctggagaaccccaggagggagagggcagcgagctcctgagcacaccctccagcagctccccgctggggagagcaggctacattcggcctccctcccctgctctagtgctaacactcactgccggtgcctgtgcttattttcaagaaaaatctggagaccctacattgggacacttcttgcaaggtccaggtggagaaaacatctgcctgtccctcccagggcccacccacacccaggagcttccgtcacgggaaggtaagatgagacagcccaggtcagccctgtttccttggggggaagattctacctgcagcttccaaaacttcccagcagcagagacatcattaaaaacagacgcaagtcagccagtttctctcctctggctgacacagaggtgcttctgtagttcagacacaataacccaatgtttgcttaacaagttcgctcttgcatcaggagagagacgttcctgtggaatggctcggaggaggcctaatgtgctgtgctgatgcctcgatgaggatgataaagccctcttggtatttgcccaaactaaacaccatcttttctcttctttccaaccaccctccagaggtggaggggctaattggtatccaatcaggtctcctgtaatgag

SEQ ID NO: 35346 - DNA, 1430 bp, Bovine  19866881658982
  misc_feature (1)..(1): n is a, c, g, or t
ntccctctcccacagagtccaaaaaactgttctatacatcagtgcctcttttgctgtctcatatacagggttattgttaccatctttctaaattccatatatatgcattagtatactgtattggtgtttttctttctggcttacttcactctgtataataggctccagtttcatccacctcattagaactgattcaaatgtattctttttaatggctgagtaatactccattgtgtatatgtaccacagctgtcttatccattcacctgctgatggacatctaggttgcttccatgacctggctattataaacagtgcttgcggggaaattttgaggaagaaaaatcttttggcttgaaattttttttagtgtgtgaatgtttcccaatttgtcctgtgttcctccattatatcctccgtgtttccaaaagaaagcttaatggcagtgattaatctctataaaacatctgaatttcacaaaggacattctattttagtgttcacaacacactgtgttttctgggtcatgaatctgtggcactagactggtttgcacagaatatcttcataaatgtgagtcattgtccctccagacactagcaactaactcttcccttttcctaaaagtttcctgaggattatcttcaccttcatgttgtaaaattcaacttaaaaaaatgatataagtgttttttacatgggcttttacaaatatttatttatttatttttatttggctgtgccaggtctcagttgcagcacaatggatcttttgttgtggcatgtgatatctaattccctgaacagggatcaaacctgggctccctgcattggaagcacagggtcttagccactggaccaccagggaaatccccagctttttaaaatttttaataaatgaaggactctgcagtggaaacataattcaaaaatgaaattttatattattcctgcaaggcaaaatgtttgatgacattaagtcaaaatcacaaagagtttgagaaaagataagtttcctcacctgcacacaaaaatcccactttgcattatttccccagatacctgattgggaggctattagcaagaatgctctagatgcttgcttgaaacaagcaaacttaaaggaatccgaatccaggatacaaggaagtaccctacccaccccagtttaaagtacttgatacatgctacaatatggatggatcttgaaaacattatgctaagtgaaataagccagacacaaaggacaaacactgtatgattccacttatatgaaaacctagaatgggcaatttcatgcagacagaatgtagatgagaggttaccagtggctaggggcaggaaaatggggggctggttgaatggatatagagctgctgttggggatgatgaaaagttttggatgatgaaatggatggtggtgatggttg

SEQ ID NO: 35347 - DNA, 2036 bp, Bovine  19866881667078
  misc_feature (1)..(1): n is a, c, g, or t
naataaagaagtggaaacacacatacataagcatcctgtcaccttagaaatctagttttggagcataagtagtatatttctcttacactaacatgggaagctaacattttgttttatcagggctctgtgaaaatgtagtgttttatcttcagttgacaaagatccatggccaaatatgtggtagaattagacctgggggttgcagggaaggttagtaatggcagaaattgccctaggatgttaagataatagtcatcaggagcaggaggattcaagggcatctatgggacaaagggggggttcctaaccactcattccctaggtgcttaagcccctggcaaacaccacagtttccacaacctcaaaatatggcttaatgtctcaaagcagatggactgcttcatttgtttctaacgcaaatttggttcaaagttttatatgcatatattttttcttcctaagaggaattcttctcttacctcccagatcttctccagctgttcaaggatgttggaaaccccaggaaacaagggttgaccctggaacatttcaataaagatgcagcctgcacccctaacaaaggaaataagagtcaacccgatactttcaaggaaaccatacatgcaaaaccgaactactagcatttcatcccttaagaaatattttaaggataattaaatatgggccatgcactatgaaaagtcttggcaaaaaaagtccctatgttaaacaaagataagaccagcttgcagctttttgttaaaatggaacgcattgggcatttaggatcccagtatagatagcaaacattttagttcattcaagctcattaactatctattttatgagagaggaagaaaatactgagtctccaaactgaataccctctttcactgaatttaaggtgctatcattgtaagaagcatcattattgtatgtacttttaagaacccaaaaaaaaaaaaaaacccaaaaaaaaaaaaaaaaaccccacaagttaaactatgacatgatcagaatgtttcttttatactcattgaaagggctgttacacatttaatcagacagattatttcatcaactatcatacttgtacaatgaaaaatattaaatgaaagaaattgattcaggtactcatcaaactttctcacattcagcatttgacaaagactgtttaatgtctgtgtttatatccatgatatcgtcttttgatggtattgtccaggagtttgatgatacagcatttcttaaaataatccttatttcttaaaataaaagaactaagagttattggtgctgggatcctaggctgaccttgcaattacaagttacacttttgattccagcttaaaaaatattgctaaatatgtctgattcacttattctccacaaccatttggtttcctaagagttaaaaaataaagaaagaaataaagctctcctgtcttcaaagtcactgactcccattcagcaagttttgatgctgacatgtttgatgtccacacacatacaagggtaactatagtcacaactgcagcatggttgatggctattctaagatgttactgactgaaatgcatcctgatttaaacagagaatgcacattttaaaggacttcccaggtggtactagtggtaaagaacccatctgccaatgaaggagacacaggagtcgtgggtttgatccctgggttggcaagatctcctggagagggcatgccaacccactccagtactcttgcctagagaatctcatggacagatgagcctggcgggctacagtccatagagttgcaaagagtcagacatgactgaagcgacttagcactcaggcacatgcatcttaaaataaattgtctttcctgcttagtcaaactggagggtaattcctaaggaacagtaagaagtaagagtttgctggtaacacacatttttactctcacaaaacttttttgagaatgcttcaaggggcttcccttgtggctcagctggtaaacaatctgcctgcaatgcagaacccaatgagacctgggttcg

SEQ ID NO: 35348 - DNA, 1382 bp, Bovine  19866880340132
  misc_feature (1)..(1): n is a, c, g, or t
ntggcaggttttttggacaccgtagtttggtaaatcctggcagagactggaaactggtttccatcttgatttaacgctgttttaagtttataagaaaaatgtcactatgtaaacaacagacattttgattaaacactcaagttcttattttggctgttaaatcaataacgcagctggactgaatgtcgtttacattccctccaagctgggctccagttcagctggtcttgtgctgacatcattttccagcaagatctggctgctctcagcggccagtttagaaatatcccttacaaacaaccacataacgttcaatgttagcacattttaagatgagagtctcaaaaatgcctgtgcttaaaataggacagttgatcccaaaatagtctcccacctgatgtgtcattcactagtaaaaagaaaaaaattaagtagtttaacaagaaaacaaaagcttctggtgatactatttatcttgacttcacctgagaccgactctgggaagagttcctattttcctctccagagtagattaactaatatgtaactcagagcaatgattctcaaacctgttttggtggcaggctctttccctgaaacaattagcttcaggtagaactttacagatactgatgaattatttaattacttaaagtcagaatgacttagaaaacaagcccaggttatatacataaaagcacagctaccagcacaaagacttattttttaaaaagcagttgaacggatcacaacacattgagtctttcagagaccactagcttagaacttgaacgtttagtgtcagaaccaaaaattaaagaaaaaatatgaaggaaaaatgctaaaatgtactcaagaccatctaataattattattttatgtgaattagggaaaatgcccctatggtttcatttcagcagctagacactcatccagccaactgaacaaagggattctagagcccacgtgggagaagaagaaaatcagaacttttggaccaggaactcaaactgctcacctgcagaaattctctgacgttagatcccaggacgcgcaggattgtatcataaccagattcttgacagaagacgaagaacatcttcccaaacatttggaggatttctccagcgttgagatctggtttatagatttgagaggcaacaacagaaacaaaacgtattagaggtagaaaatcattagaggcaggaataaagataagtgcatgacagaaatgttaaatagcctcaatttctttgcacagtgaacagatcataggaaaaatatctggccaggaaaatacaatgaaatctgagaagaagcatattgacacgttaacagtttaagtctgtacttaaaagcaaagcaaccagtttctcaggtt

SEQ ID NO: 35349 - DNA, 778 bp, Bovine  19866880602634
  misc_feature (1)..(1): n is a, c, g, or t
nttaccattaaagcagggattcaaaatgaaagtctatcagaggcaaaatgatacgacatatttccagaaatggcactagtcaaaagaccaataagagcattcacatcatttttattgaatcaaaaaccgtctagagacaagtggaaaaaataatttattacaggttctcttacacatgaacatggaacatttatacaggttatcaacgtgctgataggaaatgctatatttgaagacaaacatttttacacaaaagtagtggtcctgtattttataaagatagatattaataaattatcagagataatgaagaacaacaggtgatgattccaacaggaatgcactctatgttgaaattaaagtaacttttctcaagatggcaccctggatagaatcaagttcttgtgagctaagacaaaggagctcttttctgggaagaaagggccaagaagggctctgaccaaccaaaacaccccagctgtgcttgccgcgtcatccttggatgtagttagagcccctaacgtttactccaagctaatgcaatagctcattgtgaaacagtgctgccttcaccaacagctgcatgaggttaatgagatttataatgcaaaggatacagtgcaaaggacagcattttagaggaactgtaatcgccacatgatctgaatgaataacctaatagtttaatagcaaagaagtatattctctatttctgaagggaaattaacataattctaaatagacactgttttcttagcatgatatatggagtctgaaa

SEQ ID NO: 35350 - DNA, 1654 bp, Bovine  19866880714650
  misc_feature (1)..(1): n is a, c, g, or t
naacattgccttaactgctctgcaaattatcaattgctttcgaattcctaaacattcacctcagtgtaggctgactgcctcctatacccagatatggcacaactcttgttttccatggatccagatgttgactgaagtgtttatagtcgctgcgatccaggctcagcaatgccagctttctgcttcctccatcattttctgcttcaatattgcaattctttttctccccgggttggtcatttgaatagtgaggtagtgtctggcataaagttcttgcgagcaaaatacctaaacacccacactttatatcctgagaagtgaccgtgttttgggaaacagcttctgggctccagaagtcctgtctctctcacccaatggacagagcatgttcacatagcctgcagagacttcgtctggtcaccatggcgactgtggtaggttcgtggggggctttgattcagataggaaagacgagtgaaatacacgttgtgtgataaacccaagtgcatccatgagaagtgaagaggggtgactgatgccccgctagtggttcttccttggaagggaggagtagaggaacattggctggaggtttggaggaaggaggaggtgtgggaagagtgaagagtataataatttcaacaggtccacaaacagcactgacaagcaggagtgtttttccagaacactgactgacttttcgctttcagatgcgcattgggctgcattctgggtcagtttttgctggagttgttggagttaaaatgcctcgttactgcctttttggaaacaatgtcaccctggctaacaaatttgaatcgtgcagtgttccccggaaaatcaacgtcagcccaaccacttacaggtatgaccccactgagcgcctgcaatgtactcttttatatgcagttgtcatttttgttcattgatttgtctcattcttcataacattttcttgcttagataatattagagaaaagtcataattgagtcatcctcattttaactgtttttaaactacttgttagtctatgggaatgaccctcctgagatacctgtagcctggctgtcatcctcaatgtatatcctatctcccccattattaccctttaagcaaagggtaataatgtattccttctcacgggcttgggaggtattctaacactgaccagagttacagagaccacacaagttgatgggcatggtccctgaaaagaatgcccttaattcatgtgccaggtgtatatacagtttatctgctttgaaaaatcaaattataatggaaatcctcgaagaacaaaaagattttccagatctaagcaaatgaactgctatgatggtttcatagcatcttctttctactccaaacaactttcctttccagccctgattctaagttgaaaaccttgctttgttttgcccaagaaaggctgaaacctgctaagacccgctccagcttcatgctcagatccagtgcacctggctccctggcactcttgactgtgtgtggttcctgtcctggggaccaacagccctgctctggatttgctgtcctttcaaacattttcttttgaaaatatcagccttgtctatgatcagttcctccaatgaaatgattcttcccatcaaaatacagccatatctgtttacttac

SEQ ID NO: 35351 - DNA, 861 bp, Bovine  19866880718025
  misc_feature (1)..(1): n is a, c, g, or t
ntcttgctcactcacatttattggcccttttgttccaaatgaactaagtttgtaatgaggtagaaggaagtagaacaagatcatctttttacagaacaaattgattagactgattggttaaaagatagactaatttaaaagttattacccttgtggctctatttacataaactaacctcttttcctatgtctacttgaaacaacatccctcgttatctgttcagacatgaacttaactctcactgcacctttccagatcctatcagaactatatctacaacctattgagaatcaatagtataaccaaatggtcattaggatagctaagctccataatttttactataggagactgttattaaaactttaaaaataattcctgtaaaaaggacttattaaccccaagaacaaataaataaatttattgaatatttacataaagaaaggcagagtcagtttcaaatatactaagcactatacctaagttaattattataattaagctaattccattattaatatttcctaactggggacttgataataaggtttgctttttcagtctgataagttaagtatattacttaataaacactaataagtttcactgagcatttttcacttgactgggtttagagaattctcctgcatgcgtttcctgctctttctctttctgtcctgtgctcttcctcctttccttgggctagtgtcccgatttatggaacttcttcctccttctggaatcagcttccacattctagctgcactacactacttcattctgtctgtgatttaagtaggattgtatgatttgaagtttatttatccctcaggaaaacgacattaagataaaaaagaaat

SEQ ID NO: 35352 - DNA, 1452 bp, Bovine  19866880739975
  misc_feature (1)..(1): n is a, c, g, or t
naacaggagatatagagaaaacaggagcaaaagacaaagacaaacagaatttaattacctaggctgtcaataaaaaacacttaaagttttaacctcagattttcataactcaaagaatacccaataatgacctgtgaccaagtggaatcttagactctttgtagtaagttctgtttgatctttgacacaatcatgtgacatagattacgttggatgattattttctttcagctgcaagtcaagctggtgagagattcggaatacccatttcaagcccagaatggcctctgccgttacttttccgactcacattctggatcttcaatcaaaggttattctgcgtatgacttcaggtaaatgtctccttctcttgtggttttctctatgtttcttaagttattatctattgactacttggaattaataagttgcttggcagctttactgcatagttttaattgttttaaaatacacttgatttcctggtggctcagataaagaatctgcatgcaaaacaggagaccagggttccacctctgggtcgggaagatgccctggaaaagggaatggccacccactccagtattcttgcctagagaattccatggacagaggagtttggtgggctgcagtccatagggtcacacagagtcagacacaactgaacgactaacacttttattagaaagatgcattggcagtcaccatggaggtctatggatgttgtttcttaaatattatccactttttttccatgtctctaccaacagaaataatgcaattaaatcaacacatttaaattcattttaaggtataattgatacttagcacctcctaccaagtttcagtgtcacaattacccttagcacatttcagtcttactcttgaattaataataataataaaaacttgctttctgtagagtctgaagctaatgtcaagcagtcttacttaccaagaagtttttttgaaccccctctctcttccctacattgttcaagtcatcgactgtaagaaaaatataaaatgaagttttcctattagaggcaagtggacagagtatataacgaggcagatgacaagctcatcctgcaggcgtgatgggatgcgggggtgggtgaggaagggacttgtgtgggaatgggaagggcgtgatgacttggggtgggttcaggggaagcaatccatttaaaaatgctttaaaaacacatggcactcaaagccagctaaagaactattatgaccatttcatttagtgcaaaagaggtgctcagggatgagaaacagagccatccaactccttgcttattttttagaagtataaaggaagctttccacagggttttgaaacagagaaagcaaaaaaaaaaaaaaaaattaaatttggctaaggtaacagactggtctactacttacgaatataaaagcatctcgggtctagaggcatgtccc

SEQ ID NO: 35353 - DNA, 1063 bp, Bovine  19866880758361
  misc_feature (1)..(1): n is a, c, g, or t
ncgtcacatcaaagatttggagtggcggacattaaagccccactcgatatgtcacagctctcgggtcttggacagaccgtgttatagctctcaggtctcgaacggaccctgttatagctcttagacaaatcagtgttatacctctattttatttagaagatagcaggaaatccatctttgaggcgtgagggcacattgacccaaagacgcgaagagaagagcaccccagcacgcaggagagagagagcgcgttattttttaaataagagagtttcactcataatcaggattactcccataaaataaacttatagacttagaattaaatcaaagaatataatttgaggagggggatttttatgcatattgtcaatctatccttcagaaagattaatcaaactacccttccattagtgatgtatgaaatgactcttttttactgtgtcctacctaatatggcactgcagttttatatacttgccagttgatagatataaaagacatcacatatattttaagatatgtatttctatcatttagttttcctctgtttccacacagcattttttatcatattaaacagtactgctctgtctgatgtgtatgtcatttaccgtaagtgtgtgcctggcttgaggggacactgagcctatggggacgggggtgctttactccagattctactgaagatgctgcatggaccactaggggactagtaccagatttgcagttttactgtgaataattattgccttcaaatttcctaagtcagtatccaaatatagttttctatattaggcatatatagtatttgcatattttaaatctttaaaattaaccttctaaatgtggttttcattaccaatttcttaggtatttaaatattgtaaccaaatggaaatgccagacagttaacaccatttatctctttggcatccaggttattcaacaaagaaatgaagaatgtgatcatactcaatttttgattgaagaaaaagagtcaaaagaagaggatttttatgaagatctgacagattgaagaaaacggtacccaggaatcacg

SEQ ID NO: 35354 - DNA, 1476 bp, Bovine  19866880760806
  misc_feature (1)..(1): n is a, c, g, or t
nctatagacaatgatatactatggcattttccttagcacttggaaattgatttcatgccgtcaggtaagaactgtgcactacagtcaagttgccaaaggctccccaccaggggtacagggtaaaactcaccaactagtttgttacaagtctcataactgtaccaaaccagacatttactattagatgaatgactaagatgaatctgttgaagatttgacttgaaaaggggacagatagaaaatgtggtccaacagatggaatgtataaaacaggaacagctgcttaccgtcaacttgttttcttgaacaaatctcctttcctagtcattaaaacactttttttaaggccacgcacaaagtttgaagtagctattttgtcaacacacatctgcatgatatcaagagctacatggtgcaattttacaatgcggttaggggactttcatttggaagagtccagtggaatgtgaaaaaggaaaatgcctctcaataagaggcataggatgtgctctggaagaataatgataactttccacgttagtgcacaataaatgtccattttattactgctttacaaacagtaatgaagagattagctgagatttgagaaaatagactgtagtcatggaagtgataaaacaaaggtttgcataagatttaaaatcaactttttccttcctaaattcacaatttatttgaaatgagtgtaggaatgattgctaaatagtcattagtgattaacagttagcaaatacttcattatttgggatggtagcaaagagtgacagagacagtagtagtaggagagtcataatttattattccataagtagtgttaatacctgtaaaaaaaaaataggtagttgcctatagcttaagtgcttatagcataggttaagttctatggaagattttttatattcaaagataaaatttacatacaagatacatctactgtagataaagtaggatgaaatacatttgactattggtatttatcacctgtgaagactgctggcctcagggtggcaaacaggtaagtaactggacgtggcttcccagagcattgtgttgagaaaaattctaaggactgactgagaacatataaaatgatagtgatgtttggggtgagtgtggtgattaatggtctacatacctaacatttattacccctccagcttgtatattatagcttacaaattaactcaaggaccaaacaaattctattgtgtataagcaccaagcatgtttttaacatttaaagcttaaagaaacttaattaaatgtgtagtgaagttcttttcctctctaaactgtgatagttcttgtggtatatgatgaattttatcatattttcacatttggaacactttttggttgtgaaaataaaaaaactatagtaagctgaagcacaagttcccactcttgacagtctttaaaataacacttgacctacaaccaaaagtccaaaatttc

SEQ ID NO: 35355 - DNA, 1292 bp, Bovine  19866881145077
  misc_feature (1)..(1): n is a, c, g, or t
ngagatcagccctgggatttctttggaaggaatgatgctaaagctgaaactccagtactttggcccctcatgcgaagagttgactcattggaaaagactctgatgcagagagggattgggggcaggaggagaaggagacgacagaggatgagatggctggatggcatcattgactcgatggacatgagtctgagtgaactccgggagatggtgatagacagggaggcctggcgtgctgtgattcatggggtcgcaaagagttggacacgactgagcgactgaactgactgactgactgactgactgataccatatttgtttttctctttctgacttatatcatgctgtatgacaatctctaggtccatccacatctctgcaaaagcactattttgttccttttatggctgagtaatattccattgtgtgtatggaccacatcttctttatccactcctctgtcgatggacatttgacttgcttccatgtcttggctattgtaaacagtgctgcaatgaacactggggtggggtgcgtgtacccaactgactcttcacataataagcatgagcgagtttctctttcttgcaaatatttatttgatattaatagtttttgataactgaaaggataatattcccttaaactcatcatgtaagcacaaggaactcaaaataaggtgactggactataaaagtgctactaccttcctgttagtactagcactttttggagggattgtagaagactatgtggagaaggcaatggcaccccactccagtactcttgcctggaaaatcccatggatggaggagcctggtggactgcagtccatggggtcgcgaagagtctgacacgactgagcaaatttgctttcacttttcactttcacgaattggagaaggaaatggcaacccagtccagtgttcttgcctggagaatcccagggatgctggagcctggtgggctgccgtctatggggtcgcacagggtcggacacgactgaagcgacttagcagcagcagcagcagcagaagactatgaaataaagaaatacttatgcacattatgaaggaattaaaagtaccccgaactgcctcccatgtgtggagctgtgaacagctcatcaggcttgcccagcttccacccacaaccacccctccacaagagcattttccagagcagctggagtaacaactgggacacaaggagattagcattttagctgctgccaaggtgaatcttcccaaatcctgattatttttatttaagtgaaacatctgccaataaga

SEQ ID NO: 35356 - DNA, 924 bp, Bovine  19866881296246
  misc_feature (1)..(1): n is a, c, g, or t
nctgatgcaaaaagccaacttactggaaaagaccctgatgctagtaaagattgaaggcaaaaggagaaggggtagcaaaggatgagatgtcaaatagcatctaaccatctaaccaactcaatggacatgaatttaagcacactctggaagatagtggaggacagagagggctggcgtgctacagtctgtggtgttgcaaagagtcagacacgacttagcaagtgaacaggagaaatacaagtcctgacttaacaatagcttgatttcaatttttttactttatgatgatgtgaaaaatgggacccattcagtagaaatcatacatcacactttggattctgatcttatcccaggctagccctaggcggtgtggccctctgatggtgctgggcagctgccaagagcatctcttagtcatgtggtcaccaggtaaaccgccaacactcaacgttctgtacccagacaacctttctgcttttcactttcagtgtcatagtcaataaatgacaagagatatccaacaccgtgttataaaacaggcttcgtgttaagtgattttgcccccctgtaggccaattgaaatgtcctgagctcatttaaggtaggctaggctcagctaagatgttaagcaggtcaggtgtattaaatgcattttcaacttacagtgttttcaacttatgatggatttatctggacgtaactccatcctaagtcaaggttattaacacatacatgtggaatctagaaatatggcacagatgaacctatttccaagacaggaacagagacgtagacataaagaacagatatctggccccaggggcggggacggcgagggggcagtgaattgggagtttagagttgaagtatacactaccatgggtaacataaatagctagtgggaagctgctataaagcacagga

SEQ ID NO: 35357 - DNA, 1622 bp, Bovine  19866881367749
  misc_feature (1)..(1): n is a, c, g, or t
naaaggaataacaaacatttgcaatgtttgagggaaaacaggaggccagcagcttgggacaaagtgagcaagaaagagaataaggagaaggatcaggatcaggggcagtagaaaggcaggacaggaactttgggggcagcttaagggctctggcatttattctgagtgaaataagcaattgctgatgctgtccccctttctcttctctctcaccttcacccctccagattgccagctttggatcagaacagtgatatgatctaggttacaataagaatttggaggagaaaaatgcacctattacaatttggtagctaatttgtgaatttaaatgaactgttagttttctatattcagcatgacaactgaaaatcactcgtaacaacagcaataatgacaatgataataactgatcaatacatgaaattcacagaagagattgatttccgatagctttccaatcaccattgtctctgcctcccgtttgacatcttagtctctgtactttatgattaatattcatgtagacagtttatcattgctatgacggcaccaaaagttctttgaaaagttgcaatgtcagttttaaccttaactatattcataggaccttgattcagtagtgactttgttcaaagcactgtattttatgctgagaggatattatcacccaatatctcaaacatattataatagattcaaagtaagtcatttgcttctgcaaagtccattttacatggtgtgggaagaaagaggtgcagggatatgggggaatcagtggcaagtttgggagcagacacccctcctgacactgtattcacagcagggtgctgcctttcagcttagaaaccttgtgagtttcctggaaagaaaaaccttttccaagagtctgtgattgactctgatgttccattggcccacgaagctgagatttctgcttcatgatgtaatttctgctgtatgatgtacactgtgatgcttcctgggtttttgttgttttttttttttgtaatgtggagaatctgttgtgcgtaggtggagacgattggcgatgcgtactgtgtggctgggggcttacataaagagagtgacacccacgctgttcagatcgcgctgatggccctcaagatgatggaactctctcatgaagtcgtgtctccccacggagaacccatcaaggtgagcctgctcacgtgttgttcaggagatgtcacgagagtaaatgctgggtagttagtcttgctgtatctcactgttctctgaaccgtgggtaggcaaggtgccagcggggaagctggaagaaaagtcaaggagctgtaggaactgcagacatgtttattctttcctgactggcacagcagccatagcagcagacaagctgtattttctcatggttgacccagcggacacagccataaccgtggccataacgcagcctcaagggcttttcaggtggatcttctgtatgtttacagaacagaagtggcccgtgcccaagtgggtacattgtgacatgcatgcacagtgctataagttagctcagctgttacataaccatgtatttacaacacgtggggccagagtgagaggccatgggggtgagagagcctgaccagtacctg

SEQ ID NO: 35358 - DNA, 1752 bp, Bovine  19866881375845
  misc_feature (1)..(1): n is a, c, g, or t
ncagcatttgttatttgtagactttttaatgatggctgttctgaccagtgtgaactgatacttcattgtagttttgatttgcatttctctaataattagtgatgttgaacatcatttcatgtgccttttggcatctgtgtaaacaaagactaatattttattgaacctattatattacattcttacatagaaatgggaaatctgtccatctatttgaaattaccttctttattccatgtgctgaaagtcatgaggatgagattaaaacccccctgtcccttctggtttattttttaaaatctctttcctaaatctaatgtaagtggccagattcatacttttgaaagctccaaagaatgtttctctcatgccagattttgtgagggtttttgtctgtaatatgtttggagttctagagagttcttatgatttttatatgatgactctgaattctttagtctagcgtgaccaataattcctattattgaatgtattgaaccagagctttgattctgcagataacgatcgggatccacacaggggaggtagtgaccggagtcataggacagaggatgcctcgctactgtctttttggaaacactgtcaacctcacaagccgaacagaaaccactggagaaaaagggaaaataaatgtgtctgaatatacatacaggttagaacacatctaggtatctactgacttgaaaaatgtctctttgcagctgctttaattccctgggtgattttattaccttttacagttatcaactctgcttttaggattactattatttttcaattaaacaaaaacaaaacaaaaaactggtgtgttgttctttttttggtcacaccatggtatgtgggatcttagttccccaaccagggatcaaacctggggtcccagcattgggagtggggagtcttaaccactggaccaccagggaagtcttgggattatttattttttatttgagaagattgtgtcattatttccattttaaatgattctacatactcttagggatttctgctgtggtatttttactaaagccttggtacttttaaataatttactgtgtgtcattcctgtctctctttataactttgatgtatgttactttctctgtgcgaccatacagcaagcttctctgcctgttccctgtccccttctagatgtctcatgacaccagaaaattcagacccgcaattccatttggagcacagaggccccgtgtccatgaagggcaaaaaggagccaatgcaagtttggtttctatccagaaaaaatacaggaacagaggtatgactcatcagagtataattccttttttaagacagggtatgaatatggggagctaaatcataatctctgaaaatatgtttcatttgcaaagagttcttgcttacatgaacttgtaagtacagcagcggaaacactgacccattagtgagctggttagaataatgcagctgctaggggagacctgatgtctgacagttttgtcctttaatgaaattaaaaccaaaagcactggagagagagaagccctgattttggttcttctgccgtaatctggctggagccccacaagtgagtgggcggtgagggggcgtccctggccccctccccagtgccctgggttgccatgtggtcactgccagggctgagacaacatgaccatcttaaagggggggtttcctaaccacgatgctccagatccttctaaggccacaccatcaccttgtgggaat

SEQ ID NO: 35359 - DNA, 954 bp, Bovine  19866881400452
  misc_feature (1)..(1): n is a, c, g, or t
natgggactgaaactgaacagtaagctaagcattaaatctgtcccttaaaaaagatcagttttttaaaaagccctatttaatcaaagacacctagatgtttgaatagctgatgaagtaatctagtttggttgctattcagcatgaatgtatccagccctgcgatgttcactaaaatgtgaatgaaaatggcctcagttgtgggaaagagtcctggttcttcaggtcaagggcagacctcttgcttccttggaagtcctcagcctggctttctctactacatgacagcacactcaaagctatgagcccgcaaacaaatgacacacattatcctaaataaaggaaaataagaacgcatatatttgatattctgaatgtttttaaaagagattccaatatgtgcatgacttccattgtaggaattcagaatttatcaaacaaaataataaagccaacagggtaatgacaggacctggggaaagcatggccactctccagcttcccaacctcaccatctgctcatccctgtgctctgcccttggaaatgagggtgccaaccgcttcccagactgacaccaaccaactgcctgggaagagctgcatccctcatcctagtcaatgctggctgctggtgactggagcggggagactgtaattaaatatttccatctcaaaggccactagccagtctactactgtgcttatcttatatttgaaataagttccctcaacttcctgccaattctaatttatccattcttcaaacttcaagtctcttctttgcccgttgagcccatattgccgacagcagtaattgctatatctttcaaaagctgtgtgactttagtcaagtcacttagcctctcaggtccttcttgggaagtaaacaaggttacctctgaagttccttccagtcctaaagtcagcagcctgtggtccttcagtgtttctcacaa

SEQ ID NO: 35360 - DNA, 1160 bp, Bovine  19866881811252
  misc_feature (1)..(1): n is a, c, g, or t
naaaaggcggattatgcagaggcagacttgttgaaatctcactttatgaaaatgacagttatggctgctgctcctatatttataaaatacagtgcttaaacagttgacaatattacctacaagaagtagtgtcttaccagattcttcttccttttcagaggatctattttggtctgattatagaaataatgcaagcaattaaaagggcctcccctttccaacacgggggcagacatgcagagaagccctccctggtagagaaccgctgatgactctgggtaaaattaaaaatgggattttagggtttaagcaggctggatgtttagaaagggtaacaaactgaagcaaggaacagagaggggaaaaaagggcctcactggtagcaagcacagtagtagcaggagttcctgggagttcatcacctgacgctgtgggcgagggcctcggagctcggacatggggacaagagagaataagcgcagataggaagtgataccacaatagaggtcttgcacggtgggggtgcattttctcctcagtgttggcttagaacctagagaagacagtctctcctgagttttcctgatctgaagcctgcatgtccatggtttcagctcagaaattcatacatattcagtggcttgaaactccgcaggtggaaccttgaatttaaaagtgatcctgtgttgggaagactgcaggagcctggcagaagcaaacacaaattctctctggaataaaaagtgttccctcagaatcacccattcattaaaatattttggtagaaaaacaatcacacagcaggcactgttctagaaactggacacttaacaatctgtaaaacaaagacctttgttgtcatggtgtttccactatgaaggacaattaaaaatattaacgaaaaatgtaggtcatcagatggtggtgtgtggtgtgagaaaaacaaagcagagaaagacgatggacacagagtggagaggtgggagggaagaagaagtcactgtctgaccaatgccatcgttttaatatctcaggtataaaatatatgttttattatgaacactatgtcagattgtttcttttcaggaaaacggaaatcacctgatgcattttagacagagctgtatgaagaccttggcgaggagtgtggggatcagagg

SEQ ID NO: 35361 - DNA, 2601 bp, Bovine  19866880245504
  misc_feature (1)..(1): n is a, c, g, or t
ntggcccttttctcggagaaggcatggcaccccactccagtactcttgcctggaaaattcctggatggaggagcctggtaggctgcagtccatgggatcactaagagtcggacatgactgagcaacttcactttcactttttcactttcatgcattggagaaggaaatggcaacccactccagtgttcttgcctggagaatcccaggggcaggagagcctggtgggctgacgtctatggggtcacacagagtcggacacgactgaagtgacttaacagtagcagcggcccttttcttctaacctcttttctccttaacctatactcatttcttaaaactctagctgtaataagtctcccgtgccaaagagacatctccctcatctttttagtcttgaaatccttacttatagcctcatctggttttggtggcagttttacttagtctttaagatgtaacggtacaactggcctcgatgtagcctgcaaggccaacaaatagcttcatgcattaattcagcaaacatttgctgagctgttgcagtccaggaaatgttataaacttggggtatttggtacttaaagaggctcctgcttcctttgtgaggcttaccacaaaaggaacagaaatagatggtaaacaggtaagcaaatgagtaatgcaatttcaggtagaaatagatacaatgggagaaaatcaaacagggtgatgagtgttgcaataggattctgactgtggttctgttagactctctattgaacttttctggaattcaatggtcacttaccagttccaacacggtgtccagcacattggccaagctgaatgtatctggatggactgaatttttaatatcgtcagttatttaggctacagtttcttcatcttaaaaatgaagggattaaagaagtgagtacttaaggcctgccacgtttgggatttaagaagtaggtaatctacactgtctgatgttttattcctttacaagagtcaaacaagccagttattttaacaattattgaagaatcacaactaaagatcacatcttaaaaataccttttgagatgacatcttgtttgaaaaaagtatcagcagttggtattttctcgaattttactgagttacttccacagatttactgcaggagcttatagtcttttgaaatttacttgttaagcatttttgaatgctccataactctctttcttcaaacactaaatgaactagaaattaaaattcatattcaatggcagtattggaactttaacatatttaaattaaaatgatttatattcactttaaataccaaatttaattaaaatgaaataactgggtaatgttacttttataaaaatgcattaaatcatactttcattaaaatattttatacattttgaatataaagtgaaaacagaaggaaagagataataaaatgacagcatacattaattaaaaaacagaaaaataatacagaaaatctttggagaaaatcaacataatggacaaatgtctggaaattttaattaaaaatagaaaacaaaatatgaacattatgaatgatgaggggctacaacttcatgaatgaggagatgagatttaagaggaggagaggagatgatgaagaggagatttgaaacaaaataaaattgctttgtaaagcctatttagatacatttctaatcctaataaattggatgagttattaggaaattgtaattatcaaaattcactgagagagtgaattgataaatattgaaaaataagaattaaaataccaaaaattttcttttaaagattcttgctctatgtagcttatgtggaaatgctaaggtaaagttatttctcattattaattttttaaaagctcagagaaataaaattctgggtaaaataaatacctctccttgttattatgaagctacataattatgataactgtaatgactgtaaaactttacaaaacagcaaaaaaataaaaaaatctacagtgttacaaaaattctaaataaaataataaatgtgtcaatatataagtagaatatataatttgaagaatttattctaggaatgcataatttaacattgcaaagcttcttaaatcttactgttggttaaaaggtaaaactgtttatctcatcagatctctaaatgttgtttgatgtcatttaaaacatactgttgttcaactctatattttcttgcaagttaaagaaaatcagtaatgtcactcttgaaaatgaaaacctagaaacatttttattaaataaggaataagatgaagatgtttgctatgataaatcttgttcagcgtattccaggaaattttagctaataagataagagggggcttcttataagaatctgcctgcagtgcaggagatgcaggtttgatccctgggtcgggaagattcccccctggagaagggcatggcaaaccactccagtattcttgcctggagaatcccatagacagaggagcctggcagactacagtccatagcatcacaaagagttagatactactgaagcaacttagcacgcacacatgcaagatatggaggctagagctactggaaagtaagagacaaaaagatctttgca

SEQ ID NO: 35362 - DNA, 2223 bp, Bovine  19866880340339
  misc_feature (1)..(1): n is a, c, g, or t
naatgcaaggttcattttatttcagttttatcccatctccttccatagctgaactacaacattgaactgttctcaagtcactcacagatgctattagaaaactgtttcatctcttcagttcctaatattgtctctttttttgttcttttaaagaaaatggtaccgtgtgtgttcctggtcagtcataaaggtctaatgctgttgtcttctctttgaggcctgtttatagcacctaattctactgataaaatgtgacctcatgtgttgttatgaaaggcattgcaaatatagcttttactattttttttttcctttgcagtttcctatgaaataagacaagagtccaacttattttctcagtgctttgccacttttggagaaggaaatggcagccaactccagtattcttacctggagaatgccatgtacggaggagccgggaaggctgcagtccatggtatagcagagttggacacgactgagcgactatcacccactcaatcacttgccacttttaaagtagttagtgtctatgtgtatatctaattaaaatatttaatagttttgttatttaaataagagttactagccttttctctatgttctttgttaaataattttaggtttttcttcatcccttcaacattataaattaagtgagttaaggagttgctctgttttgaaggtggctaccttggtagctcagatggtaaagaatctgcctgcaatttggaagacccaggtttgatccttgggtcaggaagatcccctggaggaggaaatggcaacccactccagtattcttgcctagagaatcccatggacagaagagcctggcaggctacagtccaacaaagacttggactcaactgagtgactaacactttctgttttaatagcttccgctctagtggtaaacacagtaacacaaaatgctgctcttggagagaggagaccaaagaccctgactgtctggacagcctagtctgcagaaaggaggcaggacatgtccctctttgattattttcttataagagaaatagattagaaacaaatgtatgaagtcaaggacaggaggtgatttgaacacatgccgatgtgctggagccattttaaagacactaatctcctagttcttggagaaaatggaccagctcctgtctctgatccctgtgcctgcttgatctcggagtacagactgtggtgggaaagtgaggggtgctgtggactgggtgtttgagtccccactcaaatcagatattgaagccctcattgccagtgtgttggtatttggaggtggcctttgggagataataagtcatgaggggagcagggaattgtatccctgttctcagaaggagagacatcagagagaggctctattccttggccatgtaaggaagcagcaggaagatggccatctgcaaagtaggaagtgggttctcattcactaccagatccaccagcactcagctttgcacttcccagcctccagactctgagagataaatgtctgttgtttaggtcacctattctttgttttgctatagcagcctgaaaagcttaagatagcgagagacagcaaaggacatcctcacaaaaggagaaagagcaaagagaggaaggaaccatttgctcaagaagcaggttgtttcaggatccttttgaggtgtctgggagtaaaacagactggcctacggaatggagtctcccttgttgagaaatatctcacccactaagtcacaatttcattaacagagtgtgtgtttatttgtggaggatatgtgtgtgtgctgaagagatactggtaaaaattgggtctaattctttgttttcacagagattttacagctctcatcattagcactcccttggctatatgtattccatcatccacttagatggtgaaacagaaaggttgagtttgaacctcaaagttcagtttcagtatataaaacacaatcctttacagaattacatgacaatgtgaggaaaaaaatggaagaaaagttgcttattcatcttttctatactttaatcatagaagtgacttgagtttctatacatgcaaaaaaaaaaacaaactgcagaattttaaaaaatatgtatgcttatagccattgaaatttgtagagatacataaaacactgtttctagaaaaccagaaaaaataataatttctaattataaataagaacttgtttttaaaattatttattttat

SEQ ID NO: 35363 - DNA, 2254 bp, Bovine  19866880404066
  misc_feature (1)..(1): n is a, c, g, or t
ntcaaggtactgaaagtttatttgtggattggtgtttagtttgaatgtgtcctgagttgatatggccttttgggattggtgggccactaagccctgttttattaaggttatttctatgatgaaagtgcactcttgtatgtgtatctcttgtagtgatgttgaatttattgtattttatatggttgacatttgagagtcataaactaagacttgacttgtgtatagaagaaagaggcaggttaaatatcactgaagcgaatgtataattccccaggccaatcatctacagatgaaaatgtactttaaaccatccgagaaagagttccttcctgcatctttgaaaactctttttgtttctaggattttggatttgaggagtctaaatatgctgcagcagtttctccatggcagtgcaaaattgcatatgtacatggacagattcatcagattctcaaaactacccaaaagaggttaaaagccactgatctaattatatgttatatgctttatgttaatttcccttttgttacctgagcctttagccttttgagaatatagtagcctaatctcaactctgaattgggaaattaagagaagggataagcatttaggctcaggccagaatgttaaagcaaggatatgctccactccagtccgacacagtggggacaatattcacttaagatgaattgccaaggaggagacgaatcacagggacaggtgtccagattgaaagaataaccatccccaacctctcaacatgctatagagatcaacctcattgcttaccttgaagaattcaggttttatctaatcaggaaaccagcagttttctttatatgcttgccggatatttctctacctgaatccctcaccacaaactcaacatacttaaaagcagcttaatagtcagtccactatattcccaaatcatacatctctgcctccctcagagttttccatttctctgaattttccaaatcatttaggctcataaccatttctgctttttctgcttcgctgcagtatttcccacatcgaggccattattcacagggttaatttcctgtcttcttgctcatctttaacactgtgccagtaggggacccgtcattcagaccacactcagccctgtccagtacacagaaatgcctccaagagcctcttctcctttcactcctgaaagtgagttgttgttatttaatgtggaagactgacatttgtttgccaacatcttcatttttccaaacaagcatatttgaaaacaaatgaaacgagattatcatttgtcatcaccattgttttttttttaaacattaaaactgatattcctttataactaaacaggcttaatttaacattttggaatgtttcctttttgtttatttttctcatttacctgaagacgctgagattttaaaaatgaacacctctcctagcatcggaactgacaaccaaaaccattggcctatggcacttaatatgcagaaaggttaagagcttgccctggagccagatccatgggagtgtcacacactaattctgagatctcagtcaagttgctttcctctcatctgttttgatctgaaacagtataaattggggatgtgaatactatttgccttgtagaaataaggtaaagataaatgaattaataaaggcaagttgctcagcataggagttggcacacagtaaactaccaataaatggaagatataatcattactgttactattttgaactcttattatgcttcctgtgtttaacttttcactaatagcaggttttttcttaaatatgtgttgatttagctagttccttaaactaagttagtcccttggataattgttttaccttatgggggatcagtaattcatgcatcttaggactaagacactgctgctatttttcatatatttaacgtgagagacatttttctagaaaatttttcatttcattgaatgttattattcttactctgagaaatttaactgtgtgacttattttccgaaaatggacttcaatttggcctttgctgtgatcaaaaaggaatgaagattttactgtctgatctaggtttacaaactaacctaaaagaatcccctttgggcaagactgcagatgaattttctgcaccactgaatttcacatttcctcataattaaaagggtgggtaaaaccctccttactacatcttaaacacaagaatgtttacctgagcacatccaaaagaataccaacctttctctaacag

SEQ ID NO: 35364 - DNA, 3628 bp, Bovine  19866880438673
  misc_feature (1)..(1): n is a, c, g, or t
ntgaagagagaccagtaaccagaaaacataaatgtgacatgataaatgatatcatagagcaaagcagcagaaagttttctagatattaggacctgaattcaaaatggtgtcttaggttaatttttttttatattttaaccatgtagaaaaaagccaactcatatttgtccttttgatgtgttctcatgattttctttctgcaaaggacagagcacagggtgcttataagctacctatcaccaagtttgggcttcacttggggctcagctgataaagaattcaccagcaatgcaggagacctgtgttcaatccctgggttgggaagttccccaggagaagggaaaggctacccactccagtattctggcctggagaattccatggactctatagttcatggggttgcaaagagtcaagacaggactgggcgactttcactttcataaccaagtttaaggcctgtctgagcaaagaaacttctgtattcctctcagaactccagaggacttaacaatactcgttttcagttgttgaaaagctgaatgctgggaaagaggagtgcgttagtatggttgagctgtaacaaaagtattagcagagaagagtgcagacaatgagatgaccacgtggtctggcagtgccacagttcgtggaagggcaaacgctgtgtgacatcagtagtgtctccttccgtgttttttcctttttctgcagaaaggggtggatagaccattgactttagcaacctatgagttgagaacctttctcttccataggtatgacactagggcatatactcattttgctcgatgatatttgcttcttgcctgcaagttaatcagctttgcctgtggagtagaccctatgtaccacttggattgagagcccgggactattgagatggctgccatgactgctgtcctaagcactttctattgctgacagtattactttttctttcaaattctatctcgtcagcaggacttgtcctgggattgtttatgacagagattacttgtgtaacatcatttctactcccattttggccctttttattaaaaaaacaacaaatagcacattgttgtagtcattataattctagttaattttgtatatctaaatatgcttttttataccctgaataccccaaggttgtgtgtgtgtgtgtgttttttaatgatgcattgtctgctttaaaaaaaaaaaatcatttggtacttagctcatatcttttccagactttatgagcactttatccttctgtttctgtaccactaatataataaaatacataagaaaaatgagatctcaacctggtccttgatgccaaacataatcagtttctaaaatgatccacatgttctaatgatgttctgctgtctatgtccacttggattataagcatcgatcagattttatgccttggacctgtattttgttactttaacttaaatttcttgacatttcattatatgaagtattcttttttgtcaccatagttccatttcacattattggaattctaaacagctagcagaaaagagatatataacccacaaaagtaggccataaataggtttgtgttcatggtggactattataaaaagcaattgtgtagacgtatggccaatattgctatagtcatagtgtagccagcctcctaatcttcaattttaaatgatttttgttctcttcctaatttcaagtttttcttgaaatcagtctcagagaatatcttctttcctaatattgagcatcgattatcttgatattttaattgaaggctgaatcatttcgtagcaggtgataagtatgcagcaaaggagatttgcatgctatgtatcttatgaatagtactgctttggccatataggtgttatagagatatagtcatgcataggttatcattagaggatgccctgtgaataactgaaggataatggagtaagaaaccacacagtgactccagaaatacaggtcacttcagagcatgatatgaatatattacaaagtgagatgaatttccttttttcatttttcagtcactactgaatattgatttcttccctctgcagctcttacctatatcctctaatttccctaccgcttttaacaacctccgatgtttaaaggggaagaaaggtacatttgtatttataggggtggatgaatgtgcctacatacattatatagaaatatgtatagttttaatatgcatagttgttcatacagaaatatttgcatatttcttgctgcagcttctgctaaacattctaacttacctctaaatccagcccgatgtgcttcaatgttacttatgtgccagaatctcagcaggttgttgggaaatatttgtttaaaatgttttccttctgcaggggctgatgtactctcctttgggccattccccgtgatgccattctctcaaattatcccagtggcaccctttggggtcagtgttggcacatagaagagtgctggaaaataattgtaatttcaccatcttctaacagagtacaccctcaggccaagtggtaaaataccacctccgccagccccaacatccatcactgtaatgagctacaaaatcaatctgtaattgacaaaagcatttttaatcaaagtatgaggcatttagagtctccagatactgcttttttgtcttacgtcagtatttactttatagcaggatggaagacatttgattttgtttaagagtgtaacttatttctgccaaggaacaaagatctgcttttcagaaactcacctcacacccaaccacctccaaaagtaagatgacataatcgcctgatatctgtcctaaagcatcaagtcaggaagctcgtgctctactagtttaggaggaagaaaggatttgtttttgtgagtgattgctgatgctttctaccagaatgcctctctatatgaaatggctactttttgtctcaaactgctaccatttatgcagaaactaatcccagaggttattattttgtactcacctcccagttgcttggatctgttctttaaaatttacaggtatcactaaacattcctcttattagtgctgttctttcttaatcaagttaaactccccaaaatataagggtatatggacacttcaggtgaatacacattaaacattttaatatgtttccatgtagtgggaattacagccaaaggcaaaatatttataggtatatgcgatgactttctggacctgagttcttatgttttttataagttgtactccaaatttttagtatcatctctttcatttggaggccatatttgtattatctattggaaaataaggttcttatattctgagccttgtccagcacctcttgggtactttggccttggtgtttatgtatttgagagaagctccataactatgttgcatagggtatagagtattttcaaaggaagctattcagaggttgcaagaataactaaacacagtctaccttttctgatgttcttatttgtgggttttaagattaatttttctatacatatatgtgtgtctgtgtgtgtttgataagttttagtgggctttggatatatcaacttaaaaccttgcaactcttatctaaatgaccttaacatttctggaactttatta

SEQ ID NO: 35365 - DNA, 1923 bp, Bovine  19866880443181
  misc_feature (1)..(1): n is a, c, g, or t
ncatgtctttgcagggtgctccttctccatcttgggaagggtcagagtggtcctctgagtgccctggcttcctgacagtgaggcgggggcagcctatgtgatgactgacgggcagggctcagacacacacagccgcaggtcacagagcacggaatcctctgctccaccgcacctgaattctccccgttgtccgtaaacaagggtcaggttcatcacgtggggtggcactgctaggtagtcatagtgaacccagacacatgtgaatggagctagatggattctcctgctaatcaattctttcccccttactaacacaaactagtttaaaaatcagctgatcatcacatggcaagcctgggacaacaaatttagtctcaatgcacaaaactggtcaaaatatcttacactgcaacttcaagccaatcttcaagccaactccagggctctctccctatcatgtttatgtagaggaggccctctgtcatcatttcaagactatgcttcttactttcttttttttttttaattttattgctttattttttttctaattttattttatttttaaactttacataattgtattagttttgccaaatatcaaaatgaatccgccacaggtatacatgtgttccccatcctgaaccctcctccctcctccctccccataccatccctctgggtcgtcccagtgcactagccccaagcatccagtatcgtgcatcgaacctggactggcaactcgtttcttacatgatattttacatgtttcaatgccattctcccaaatcttcccaccctctccctctcccacagagtccataatcaaattaaatacacattccctgtttgggaaggaatttgcactaagaaaaaagaggcaaagcagagggacaataatgattggaggtgggctggagaataagctttaagaaaaaattaatgagggacttacatggtggttcagtgactaagactccacatttccaatgaagagggcccaggtttgatccctaatcagggaactagatcccacatgcttcaactgagaattcacatgccccaacttaagatctcacatgcagcaatgaagatagaagatgccacatgccacaagatgccatgtgttacaaccaatacccagcccagccatataaataaataaatacatatttttttaaagaaaagattaaagaaaacacatttttaatataggaacaataactagagaaatgaacagtgagaaaagaaagttggctgaacataaggataaactaggcagagacttcagaggaattacaaagctgaaaagactgaggtttttctctctagcttcttccctattttgaaattttgccattaaaaattcatagacaagaaaaatgacaatcatatactgaaattagttaatatgcttgtttttcttccagcttcctactcctccatgcaattaactctctcatcaataaaaagaaacagggttgatgcttgaaacctgaagctattcgacaaatatcttgcgactggaacactgttatcagtgccatagataagaagcttgatttaggcattgggataaaggaaattacaaagactgcatcataccagatacaatagattacagtgccagcttttaatctcaaaactgcatgtgcgtagtcgcaatccttggtttacctccagcaatttccttccaggagctgtcttctaatttcccttggtacttccccaaattctctacatattgctccatctctgaagctaatatcatacctatgcaaccctagaatttgaattgctgctctgatgttctttggagacattcctaatgagtttattatcaatgttcttactacatattccccttgtgggcttttactgacttcacccataaatctgattctcatacaaattcatctttgg

SEQ ID NO: 35366 - DNA, 2158 bp, Bovine  19866880450353
  misc_feature (1)..(1): n is a, c, g, or t
natggagtcttaataaacttcaaatgtatttggatagctgataaatttaatgatctcatcaaattaaaaaatagcaagtaaaaagtaagtgatcttgagaataattaacagggcaatgatgggagagaagaacattacacagaataaatggaagtgtccttatttctgttgaaatttccattaagaaactgtaatcatcattttgtttttgttattcatagcttaaactgtactctacgtattttgtatattttatactaggaactgaaaataatttacaaatgcaacattaatttattggtcctttttatatctcagtaaaccaagaagcaaatgcttgcaacctagagttgacagttagagaaactaaagccgaagattggtgcacaactgtttagtgatatctggggaataattaatatggaagggatcatgtgtagagaatctaaagagactattttatctttctacaaatgtctgtggttttgttccaaaatatgttaatatgataaattagaaaggatatgtatttcctttatctaatgcatttttattcttagcatattcttaccgtaagtgttgtatgaagagaagggaatggaagtttctgccctgaggacaataatgttttatctggctttgtttagaattgccaagcacatggttataataaagagtagaccaacttttcattgattttattattgttttaaaagtctttacatttgtaaagattatttgattttcttatttattattgttttaaaagtcttcacatttgtaaagattatttgattttcttattgcttgcacccagggagagtgtccctgcccccaccccactgtccttggcccatcactgatgaggctaacatttcttgaggcacagaataagtttgaaagaaaagtgatattttttttctattttagagataacaacactgaggtagagtagtatttttttttacaatatctcttacttgtaagtgatgaaagcaagcattttgattccagactcctctgctaagtgttataatctaccatctacagaaacacacagtgagttctgactgacttgtagctatttaaccatgtttacctagtgttagtcttatttttgtttcccagttgaattgatattgttttataattatttcaagtgtcaatgtgaaaagtgaaagtgaaaagtgaaaagtgaagtcgtgtccgactctttgcgaccccatggactgtagcctatcaggttcctccatccatgggattgtccaggcaagatacaaatcttaatataatgtaagtttttgatttggtttagctccttttctgatcatttcatcatatttttaaacatcttgcatccctaatacctacatggaattgtgtattctttgactagttcattagtgtaataagttgggtagggtatacactgcaacagggtcatataatcaagctcttctgtcaggtgaggtcagattgccttaaagtttgaaatttcctcagctgagtgatacagacaggtagtcattttcttatgtagagaatgccattaacttataaaggttatcaacttgtcttcagaattaggctttaggacacatataagaggaagaaagggaacttccctgatggctcagtggtaaagaaactgcctgccaattcaggagatgcaggtttgatccctgggttgggaagatgccctggagaaggaaatggcaacccactctagtatttatgcttggagaatcccatggactggctgactacagtccatagtttcacagagtcagacacaactgagtgatggagcacaatgcacagggagaagaaaatggtttgtttggacttttggtatacagtaatcacacgggtgttttctaccataatcagagtcttttcattacttgtacagctattactgcaactagaggtactattgctgaagaggttttatgacaggctcagtttaatctgaggcattactctggtactggggcaattgtcttagattcatgtgtaatataagaatggcaggagtttcagaattagcattttccaatataaatttgattttcttcaaattactcctatgctaccatgtaccactttacataattacacctactactttcatattctcattatcatccattatcaa

SEQ ID NO: 35367 - DNA, 1501 bp, Bovine  19866880451480
  misc_feature (1)..(1): n is a, c, g, or t
ntactctgtgacaagccctacgttaggcagaggacagagcaatgaacaggtcacaatttccatccatctttaaaatgtaaagaaccccttcataaaattttgtgaaaccagaagccagcagccatcccatgtaggctgtgggaggcaatgtcacctgagtacgggaagctcctttgagtttaccctgtgctttctgactgccacgctggtgattgaactgccagtcagtcggagtgctttctgacttgattccagaaactctgacctaaaacacgggaaatcctgccaataactcactaaagttagggggagggtgtggggaagcaagatctgtctctgctccttttatttaattagctcagaaatctggcaatcagaacccctgacgcagagaagacaaaataaggtcttatttaaaatactgcaggaggctgagtctggaatgccggccagcccctgttgggacaggggaggcagctgaggtgacctgtcaggaagcagcgcctcagctcccagtttctatttgaattcccctgtgaggctcctattaccctgtactgatttgcatggatgccaaaggccccagaatcagcaggctgatgaagcagactgagcaccagtggtcatcctggcagttctttctattgaaggtgtgaaaaacacaactcctgagaggctctggcagatggccaggatgtctgctgtgtgtatgctgaagggagcgacacagactccagaaacacgtcacaagagcacactttcttcacattctgactttgatctgtaatttttattcatccaaaattcctttgtgaaagaaatgaatgggttgaatactgcagaatatcccctttataggttcaaactcactctcctttttaatctacatgctgatcactagccctaagtctaaaagccttcctcacaaattcaaaaacggatggggtgtggaggcttctttttctcacacccataaatcaaagacttgagatgaaaaggcattaggatttcttttctaattttcatagctagccttgaaatgatacaagccctcctactgaggccagatgtgaatgagaacatcaatatacacatgacaccttttacctgaaagaggaggtttctaaagtaggaagacaaaatagaagtatttacaaacatcaagagtgaggcaaggtttccataccaacttaataaagctctccactcacacacacccatgcacatgggtgggaacagtggaacagcgcagtggccattcatccatgggacagtgtggtggctggaaggctttataatactgagctggcctttcagaagagtgaatgatagatcaagtagtgaagatataaagggcatttccagtgggctgagtttagtgactgaaatccgaataggcgtgtctgaggctattcaaaaaaataagctgggaatttcaaatagacttcctttttaacttcttataatcttgccactcttccctacagattaaactcatctc

SEQ ID NO: 35368 - DNA, 2236 bp, Bovine  19866880461467
  misc_feature (1)..(1): n is a, c, g, or t
ncatagactgaaagcaggaggagggaacatgcatgaaggagaatgacaaaaccagcatttccttagacgactaggcatttagggatctcagagaggagtgatggcattagcgacgactgtgagcacatgggtcaccccagtttcagctcggctgtgaccagtgtgattcagtgtggggagggaagcctgaagttcccagatgacaatcagaaagtgggttctcaaggaaagttagagcttctacccatggtcacttggcaaggatagaatggggaccatgacttcctggctcttttcccagtgcccgtccagtctctcagcttggcttttggacagtgggatgcgaggggcctgtgagtttacactggggtagcttagctgtttcctctgtgcatcatctgtgcctaccgccatgatccctgccccgcctccgcacttggcaatgtgtatgcagctctcacaatgccacagccctcctggttggtaggacgctcacactcccttagagactattctgctcacttggcacagctcaaatcgtgtctcttggcttttgcacactgatctcctgttctgctctaatgtgctgcctttgccagttggtgggcttctgttaaacccatgctgtggatattgcccatctcgtgttcctctggatagactgattctgcctttggctctgcgtggactggcttgccttgctgccagtgggctgaactgacctgatttagatgttttccattgatccatcctctccttggctagcaatgtactgcctgtgccagtgggtaggttccttccaagggggctgcttgggctccatcttctacttctgctgcctttatcattgcttttaccatcctggttggccaggcttacccacaacatgcaattgccaccatattgtggctggccctctctccttccactgtctgcctcctggtaactctgacttatctgaccctggtgcctccatctttcatgtgtgatgtgttattcaaagcacattaaattcaatttgactaactcacggtggctgagaacatttcacactattctgcggaatgtgccttagtataaatggtttttgttaaaaaccagcttctcaccattattcagatatccccccctctagcaatattacacttatctatctactcttctcacccaagaagtcagttagtatctatgaagcacctactaattttccatgtctgatctctctttattgaacaacctgttagttccaggagtcacttcaagactcttagactattcatcacaggggaaacttgacagaaaatgcagtccatcttttttactttcgacctggcagtcccacaattattccagagaaatgagtatctaatttctaatggcctcaggaagaagctctagggagttcattctagtatttaacagccttctctgttaggaatatgtcaaaagcaattgacacacttcaccgtttttcacccctttataaaatgggttgcctttttttttcagtcaccagaggacataaatagcaggttattaattttttatttaaaatgactcattaagataaaaaatgcactaaatgctgacatattgtttcttattttgtcatgactacatggttcaaatttcttttggtttcctcctggaaggatttggtagattagctgtctaacttctaatttagagatttgtttggcatacaaggaagagaaaagccctcaacaggctcaggatgcttaggggaaaaacaaaacaaaaaacaagtatcaaccagccaggaaaaaaaggtagggaccatcctttttgaagtctagtgttgggatatctaaggctgctccctgggatcatggctcttctatgattaaacccatccatggtttcccagtgattattccctgacacccagtcttttaggcacagccgtagaactctgaaggatttggattcccacgtccattgcaaatctagtttttcccctctttcactctgctcccattttgctgggaggtcctcaaataccctaaataattttctgcctcgagcctttcatatgctgctgcttctacgggaaacttcttctgtcttcccttcacaaagctaaatctatctcatcgtttagattttcagatgaaacatcatatgaaacatgcctacttgaccatcccctccactgttttctttgttgcattgcttgtccacacccctaatggcatcttaaattggtaattgaata

SEQ ID NO: 35369 - DNA, 3225 bp, Bovine  19866880473091
  misc_feature (1)..(1): n is a, c, g, or t
ntttccacatgctcctcatcctcaaatatctcacatctatttcacttttctcctcttcttttctatacttcccatctttagcattatttccctccacttatctgttattttaaatcattaaatatcacacagtagtcacgatgtgacagagtactggcctgtgatgcttactaccagaaatattctgcaagttcaggcttttgaaagaaacaacaatatattatgttttatatgtccatttggaaaacttaagacatatgggggcttggcagaaacatcatcaactttagagtagtgctcaatcattcccacagagaacattcttacaacctatcgccgcttctagaaaatgggtaccgactctgatggaaaataaatgcgaacaggatagctttagaaaatgcttccaagtcttttgtaggaggcctagattaataaaaatggtcagattattggggtaggaagggctatttttgcaacacaatataccattgaatcatcacccttgcaatgttcaatctgtagctatatgggtatattggaaaggaaaaaaaaaaatctctttctgatattcaggacttaaaggttcagttttgcctttttgaatttttttcttcctcttgttggcagagaaaactgtttcagatctcattttttggtttaaaaatattatctccaatccagaaaggttcactctaaaccagagatgacatttctgtgctatgaaaaaaacaggaacaaagattagattcaactaactctttggcaatcaatatagggagctgctttgcacccctcccctttcccccttcaatacatttcccatgaatgctcttctatatttggagaagagctggaggtgaggaaggctgtacacaatgaattgagtatgttttattaatgtaaccacagacctgtgaccataaattcaaaatttttccttagttttcttttccccatcatttattataatatttttcctttcagagtaattttgtattcttttattgcttggattttatgaaattctacataacttgttttcatcacatcaagtgatcaggaatattcttgtctgaatagtttcagggctttctccagtcactaatgctgattttcaaacagattatggtccagaactctcaaagacctagttattcttgaagttgtggccactgtcattgattaaagtcattattctggtagttaaatatttagcagattgttatgaatcaggcacactagacaaaggcattccttaatgataagaaccctgagagatttctcctttgttcccaggataaggaagtaaaatgacaagctcatctcagccagagccgtgatgaccaacagctcttgttggcactgtatatgctgacagcactttcttgatattttttcccacttctttttgtcttcctatttttctttctgtattaaaaatgatagtcattttgctactaggtgatgaaggagaaagaaatgcctgtttcacagataaaagcaaggcactactttacagcaacactggcttagtgtcttgtatcatcaatctctctggctttatccatcaccatcaccatttcgtctcttgcggtccaaggttgatggcaacaagacagatatcattacctgaatacaaagaaatgcagggaagaagccctgattccagaacactgttgtgctgacactcaaactaaatacctagagactcatggtcttccaagagtgtgcacaagtgcatttacttattcatttaaacaagtacttattgagtcgccgttatccctggattcttgaaattgccccctaatcggtatctctgcttctgctggagccccttttcaatctattctcagctcagcatccagaatgatcctattaaaacccctcagtctctccttttcttcagacattcttggcccactgcaactaaaatcatcacttccttacactggccctatacatggtcctcagtcaactctctgacccactttcagtctctgctcacttgctccactccatcccaaagaccgttcccctatttctcaaacaccagctgagctcccatctcagggcctttgcacttgcccttctctctacttctagcacttttcctgaatctatccacagcgagacctttcctggcccttttatctaaaattgcagtcctcccttatcccttttccatgatttatcattctccttaacacttgccaatgtctaccataccatatagttatattttagttatcttttatgttcccaactaaagtggcatgaaggcagggattttcttgtttctttgctatatctacaatgtctaggaaagtgcttagcataaaacaaaaccttaatataaggtgaatgaattgggacagagaagtcaatggtcagtaagacagggatgattgctgcccacaggatattataacccactgggacagaccaaccatatttaaagagacaagtaggcaatcatttcaaactctgataagcactataaacagcaaacaaaatattgagatgaaacacaaaaggagggaagatgtcattcagaatcattggtcatgaaagtccttgctatgagatgcgaagcatgagataaagctgaaacgtattagagtaggtgctagaaacaagggagagtggtaaggagagaacaggtgtcttgaggcaggaaaaatgtcggcatgctgcaagaacagagaaaacttgtggggctggatctgaggagcaataacgtcattgctcacctttacgaggctttattgagatgccagactctgttttaaaggctctgtctcaaactatcttaacagccctacacagtagagaatattctatcatccatttcataggaagacatgggatatacagctagtaagtggtagaactgggactgtagaacctagattctgaacactaccctcctgctgtcttcctacacagcagaattctatgcttaaatggaggtgctgaggatccaaaaatgcatgtgtttagttgctacaaatcttcacatggaatatttaaaaatcaggcaatatactaattttttatgctgttcgtttatttatatatattttttggagttatgtcacaatgttgttttggtttctgctgtacaatgaagtgaatcagttatgtgtatgcttagttgctcagtcgtgtccaaccctttgtgatccaaaagactgtagcctgccaggttcctctgtccat

SEQ ID NO: 35370 - DNA, 1363 bp, Bovine  19866880483443
  misc_feature (1)..(1): n is a, c, g, or t
natccaagtagttacaacatgtcgacctaaaccagtcctagttcactaaagttgaaaggaatctcagatatgacacttataggtccttacaagtccagatccagaaaggtaaaaaggtccagagaggttaaacactttgcccaaaggcctcacaaatggacaacaatcaaaattcaacctatagctcctcattcgcaggccaatcttctttctttttaagtcaatctgagtcaggacagcacaaaatgaagcaccatggcaattatctgataaatctgatggatgtgtatggacaaacagggataattacggccaggaaatccaatttaggtcttcaattacctagattgactgtctacattgaccaaataaactggacaaaggccaaaaacgcactctacattgtgttgtgcaccctgagaagcacttcattgtgtttgtgagattaatagggacacacacaccattgagctaactataaagcacaattgtgaatgggtgcattttccatcaatgaacagatctgaaagttaccccaaatctttttggtaagttgaatgaaaatgctataggaactcatgtacacacattatagaatttctctgaagaagccaatcacactgcctgtgtcccgatcctttgttttatcaagactattattcctccaaatgaatcaaatataattaggtccaaatggtaggatgaaagactacaaaagcctcaataaatctaagtcattcttgacttcattctggaaagtacgtaggtctctgttttaaacttaagataaacatcacacttaggacatttggccattgatggaaagcatttgaggaaaggggttttcagtcaaggctgatataaactttcctgcaagatgacatgttttaaaataaaaattctaccagtcaagtatacagggatttatttgcctgtgtatagtttcaacaagaaaaaaaaaaatacatttccaaagtaagatgtttccctgtatttttaaaaaataaataggtttagaactttttgtgccgacatcaggaacacaaatgactgtgcatcatgattagaggctgagaagataagcccacggaaagatgaatcaaaaagcaagacacagtgtggtgcagtgcaaatgctgttggcctggaatcacgaaactgggttttacttctccatttggcaggaaacagctaggttatatgagacaattcaccttctccctggactttagttcccttatttcgaaaatgagaaggttgactggaattatttccggttttacctctctgtgactttaaaccagggatgagcaaactaaggatgatgggccaaatctagaccaccacctgttttgtaaataaag

SEQ ID NO: 35371 - DNA, 2195 bp, Bovine  19866880492265
  misc_feature (1)..(1): n is a, c, g, or t
nttgccacatcctctggctctcgaaaaagcaagagagttccagaaaaacatctatttctgctttgttgactatgccaaagccgttgactgtgtgaatcacaataaactggaaatttcttaaatagatgggcataccagaccacctgacctgcctcttgagaaatctgtatgcaggtcaggaagcaacagttagaactggacatgaaacaacagactggttctaaactgggaaaggagtatgtcaaggctgtatactgtcaccctgcttatttaacttatatgcagagtacatcatgagaaatgctgggctggaggaaacacaagctataatcaagattcctgggagaaatatcggtaacctcagatatgcagattacaccacccttatggcagaaagtgaagaagaactaaagagcctcttgataaaagtgaaagaggagagtgaaaaagttggcttaaagctcaacattcagaaaatgaagatcatggcatctggtcctatcacttcatgggaaatagatggggaaacagaagctgactttattttggggtctccagaattactgcagatggtaacttcagccatgaaattaaaagatgaatactccttggatggaaagttatgaccaacatagacaacatattaaaaagcagagacgttgctttgccaacaaaggcctgtctagtcaaggctatggtttttccagtagttatgtatggatgtgagatttggactttaaagaaagctgagcaccaaagaattgatgcttttgaactgtggtgttggagaagactcttgagagtcccttggactgcaaggatatccaacaagtctatcctaaaggagatcagtcctgggtgttcattggaaggactgatgttgaagctgaaactccagtactttggccactctgatgctgggaaagactgagggcaggaggagaaggggatgacagaggatgagatggttggatggcatcaccaacacaatggacatgggtttgggtgggactccgggagttggtgatggtagggagcctggtgtgctgtggttgatggggtcataaagagttagatacaactgagtgactgaactgaatgtccccaaatttatttccacagcagtcttgttttcaaggtggattggctacaggtttcatgagttgtcaaggtgggatttttccctaaaattacacgtagcaccttttccacttgtgtcttccagtatttcaactgagtgtcaggttaacctgcactgcagtagtcttataaaaccaaattttaagcttgtgggttgttgcttctaatatacctaatgagccttctttaatcatcctattttgaaatatttttctatgcgcctatttcatttctaaatttccatcaaaaaatacagtttctgaaacacccacaaagcctaatcactttcatttgcatattttataaaagtttctgagagagaagcaaatgatgaatgaacaagtgactgtcactagtttgtttaaaatagggagtttggggctactgtattgagtgggaagaagtcaacccagtgtcctatatgtccttctgtccttcagcctggctcagagcaaacaggtaccagtgacggtgacctccaaggcacttgaaattctcaatcactgaaaattcttcaagaatgtcaagagttctgtaatcactggcgtagtggaaataaacatcgacctaaaaatgaaaagatctgggttcagatcttggctgcattactaattagctgtgacttcacaaattatgcctaatggggcctaaatgtcctcatctataaaatggaagccatagaccagacaatctcagaatattttaagattccacatgcattccatttatctgaaaattgtgatccatatgtgctgcataatgatggaaacattcaggaaagcataatgttcaattaaccagcgcactgccgcttcccagacatcctgaattagcggaaatgtacactcctacatgcaagccgcctctctcagtcactcctctaagtggcaatttttgccaagtctaaccagcagttagacttgttgctgtttatttttttttcctctaagctaactaaaagattatacctttcctttcctgaagcttccaccaaatgctttcctcccaatcataaaaatcaggaagaaaatgtctcttaaaatcagtcattgacc

SEQ ID NO: 35372 - DNA, 2112 bp, Bovine  19866880574600
  misc_feature (1)..(1): n is a, c, g, or t
nattgagaaatgcctataaataactccgtggagctgtgatcaattcattagcagccaaaggtgttgggaaccataacatgccatatgatttctgatgaatattaagagagaagggtcatgtatattccaatagtgcaggctccactgaaactgacaatggaggcctgtgtcctttactcttactgctattctgatctgaatgccattagaggcagtctagttcaggtcaataggtatctatgaattctaactcctgtcaattccaataatggttttagataaggaccatactacttatctctcctggaataaaaatttggattttagcttcttattttctaggcatttgaaagcctttctttaatctttctgcatcatacatattcatctgtgcaacagctatgcatgcctgttaggaaaggctgaagaaattttagatctggattatcacagtggttatagaaattatattcactgctactaatgattgtttttacttccagatatggtcacactgataggcattaatgtgtttgaaaattgaccaggcaactatggaattggatgatactaagaaagattaggtgttagaaggtaagattgtttcgattatctttgaaagtcaaagtccttcagtcaggtccaactctttgcaactccatgggctatacagtccatagaactctccaggctagaatactggaataggtagctgttcccttctcccagggatcttcccaatccagggatcgaacacaggtctcctgcattgcaggcagattctttaccagatgagccaccagggaattaacataaataagaagtctttacaaaagaaaaagtattaaagagttcagatatattttaatatgacataactaggaatggaaaacaatatgcctctaaattatatatttttaagagaagcacaaggcatattttctatagaaagaaggactactgacctttaaaatatgtcaaaaaggtaagaatctatggtttaatgtcatcaactacaaacataagttttttatttataagctcataagaaagagaaacaatgtcaacttcaattatttctttaaaaacccagtctttaaaagagcaaattagcaagttatatgtattcaaattgctcagtacaattccagatgcacaacaaatacaataggggcactttttgtgtgcttaaataaaatgcctcaatacacacattttcaccaatgtgagaatgttttatctgttattgtggtccatgtccaggagttaggagtttttaagtgtatgtgactttccatgctgcacctataagatatattaattaaaataacatattttgaaaaataagtacctactaagaagcaatgcccatataagtgagaacaaagggttttataacataaactctaagaaaaagctgatctccttgacactgagctcatctcatagactaaaggaaatctggagtgttgattttcatgtaaaacttcccaaactgccctgaaacaagttaagggctagcaatcagagtcaaggtattatgtgcgtgcgtgctcagctgctaagtcatatttgactctttgtgactccatagactgtagaccactaggctcctccgtcgatgggattttccaggcaagaatactggagtgttgccatttccttctccaggggatcttccctacccagggatactggacttgaacctgggtctcccgcattgtgggcagatactgtatcctctaagccacaaagtaataaagggaacgggcaagtccgttttgtttatccacttctctctctgcctccagccccctttacgagttccccagttccctgtagagagaaaaatgttcacaggcaaaaaacaaaagacccgaagcagccttttcgcagcctatgaactgatctcgaactttccaggggcttgtccttcataggaaaaaccctgaggcacttcctctgtgcttttgcatctggaaaggaggcccccctctccaagtgctgagtgacatctcagagcttctttctttccagtcaaagtggaaaatatcaactaaggtttcaaaggaaaggaaatgttatgtattttctcatcaaatttggcattat

SEQ ID NO: 35373 - DNA, 1034 bp, Bovine  19866880575288
  misc_feature (1)..(1): n is a, c, g, or t
ntgggttaggcccaccattcctcattctaccccatccctcaacacccatgactagcccaggcaccaagacctgagctcttgcccactgcccattggggaagaatgtaattacctgggagctaagaaaataattttcactattcctttagagttaaatgcaacctgcaagcagaaggcagtggctggtaaaacctgagagattaaagatgcaaggagagagttattgataggaaaacatcacagaggaaatgggggaggagatcaggaaaacaggtggagactgaacagtgatttccaaaaactcagtgcattttatcatttttgagcttgaactcagcagagaggaccccttagccaaatttctagggtctctccagccaccagaggcaccccttcagggccattcaccctctgctttggtctctttcctcttgtgctgcccctcctcctttctcccacctgactcgagcttacctggctggactgtggttcagccctaattggaggcacgaggttaccaaagtcccacatccactgacccaggagcttttttccagtttctgtttgccatgtcattagtggcagcttcaagctgagccgaaggcattctcaagagtcattcattgttcctcccctaaaagtattttaaatgtggacctaggtgagatggtatctttttttttcctacctccataccaatggctttccttttcacacgcactgagtttcagaaaactaagcaaaggacaacgattccctcttgctgctactcttggaccactttacggctaagacattacctaagcctcctgtgattatgaagtgccttttgagttgaaactctttcttcattttcctcttccttcatgatctgattgttactgccagtgtaattgttttctggacacatctacaaaagacatttgagctttctttaatactcttctcaatgagcccttcaagtaaatgccataattaaaacgcacacatttgcttcatcagaaagcacagcatgcaggattcaagttcagagg

SEQ ID NO: 35374 - DNA, 1589 bp, Bovine  19866880605550
  misc_feature (1)..(1): n is a, c, g, or t
ngaaaaaaataatgatttttaagaacttttaaatttgaatttgcataatgtgcattttattctacctatatttcttaaaaataatgcttaatgacctccaaggtaaggttcttcgcttgctttccttccttgcttgttttattttcagaagaaaggagtgaaaatggatctacccacctggccaggcttactccctattgtgatgaccaactttctgcccctaaatcagaccaagaaatctgtggccacaaaacagtgaatgatatgtaaagaaacaagttgcaggcttttcgcttcagtggcaccacatattaattgagttcaactggccacagtgataccaaacgagggaaaaatgttctaactgcttcaacgccatgcagactttaaatgcgatgaagccttgaagattgctgcaggacagcatcgtgtattttaccatatttatttttcatgagttctctcttgccaggctttgtaaaacattcgtcccaataaatgatttaccgtggcagaaaagttgcaggaaattgctctgagctcatcttcagacattatgaaggctctgaagtctaatcagattctagagaggattcagaggtggcagacatttgtgaacagaaaaggggaaaacacactaggaaaacatcataaggactcattatctgtctttcattttaacatatgcctattctgaatgctcctgctttgaaggaaggccattcacttgaaatttatttttagttaatgaaggtaaccttttaaactccattagcagcttctttctcagcctaagtgtagagaagcctgtgggatttgggagatacccagctgttctccaggaagtgtgtttttaatagtgacctggggcttccacaaaagcaacattcagaataaaccagagagcccacttggactttccaagagccagagtcttaggtttagaaaactgtctaatcaggatttccctgatagttcaatgacaaaaactcctcattctccatgcaaggaacctgggttcgatctctgtcaagtgaacgaagtctcacatggtgcaactaaaaatcccacatgctctcatgtgccgcaactaagaggggtgcaaataatatttttttttttaaagaaagctgtctaatctttgagaaataaaatattaacatcccagacacccagattttctttaccttttaccaggtttcactaagaagtctcatcccaaggggcaccatgttttcagggagaaagaagagttgattcttagagtagctaagtactctttcactaagacctccggatctctggatgtagaagggtaagcagggttttagaacttgagcttgggagagaaccaaactcctgaatgtgatatgcagaacacggtgtggcaaaactgagtcacacagtgtaataagacatctgggtttggaggtcagacatggatacaaatcacagcttgtccatactaaaaaagttatcattagatattcatttgatactctagcttaaatcctatgcagaaagccctcaaagttatagaggagtccacataggataatgaaatcagtgtgccttaaaaaaagaaaatt

SEQ ID NO: 35375 - DNA, 1511 bp, Bovine  19866880614429
  misc_feature (1)..(1): n is a, c, g, or t
nttccacccctttaggtcatcacagagcaatgagctgagctctttgtgctttatagaggttcctaccagcttgctagtttacacatagtagtgggtatatatcaatactactctctcaattttccccaccctccctttcctccaccaatgtctacatgtccattctctacaactgcatctctattcctaccctggaaataggttcatctgcattatttttatagattccacatatatgcattataatgtaactaaaattaataaggaatagtataagaataataaattaggagtttggggttaacatatacattgctatatataaaataaacaaccaagaaagacctgctgtgtagcacctgctgtgtacacagcacacatattattattatatattaatattccccttattatcttgtaattaggggaaaaatctgaaaaaagaagatacacacatacacatacacgcacacatatatatatataaataaaaaactgactcactttaccataccacctgaaactaaaacaacattgtaaattatatgtcaataaaaaagagtaatgtaaaatcagtttaacaaaaataaatcatgttattattatttttacctctgagccaatgaatatactatactatcttgaccttacagagaagaaattggtgttttaacttatataagtttacagagacaaagaagcacagtgtcaaaatgaaaacctatctaccctgaaacagcacagggtatgtgccctggatcaatccatcgtgcctgttacatagccagcacactggcagctagcatctcacactttagatgcggggggcgatggcacataggcacacacagacctgctcagccagctccttgaaaataaccaagactactatctgaaaagagtttttgtgtctctgagaatcctcaaagacgctttgaaagacttgaagagaaatgatcttaacaaaagaaccaaaaaaaaaaagaaacttgaaagtgaacagaagttctgaagtgtgtgggggtggagaaagctatctcagagagaaacagggaagggaggctaactcaaagcaaccagaatagcttagtgagctaaggatctgtgacttggtgattctgtgccccagggagaccactgcttggcaaaggaaggatggagcttactgcgctgagatggtcggtttctgcacttcctactgtgcacaaagggctcgacccagctggctaggggatttccatgtcacttaatctgttgttcttagaaaaccaaagaccttgatctgttgggtctcctggctgaccagaagggttcctttgtgagaaataaaattaccatgaactccaccgagccatgtgctctgccagattctatgagggcagccatccctgctaacttctgccctcctgaccagcctcacttccacctgttggctttccatcaccccttgcaagttcaagcacaagccccttttgttggccaccgggcttatgccagtagtcattcctttt

SEQ ID NO: 35376 - DNA, 3085 bp, Bovine  19866880614681
  misc_feature (1)..(1): n is a, c, g, or t
ngagtgatttataggctttctaattattcaattctggagggaagatatcaaagcaaaaaaacaacatgtaagaaatccttatataactttaactttctctcatgtttcccctctctcttcctccacctgctccctggcacttccaaaaacaacttgcagtcaaattgatgaaattgatttccaagaattgataatatagattgggaatgaagtttaggagccatgtgtcacagtcgcaatgtcaccactgattcagcttttggaaaaacacacagctttcttggacatcagctttaacatttacaaaatgggtaaaattacttcccatgtgagtttcagtggtatgttggaacagtaaatagtacattagcaaagatattacaagtgcataaaccaaattcttcagacatgtcaggcactttgaagacagtttgagggcaataatagatatattatctcatgtcttttattatcatgcatttttgatgagtagagttctctacaaactcaaaagaattagctgagatcatcttatcttttataatctatggtctctgaactcagtcttccctgccttccactctggaatcttcttggacagtccacctggtagggtactattccagaaagaacagtgattcggcatttacaaaatccaggttctgatgtcaccttagtcattaattaactctgtgatctttgcaagtgtctctgttcctttgtcttaatttctccatttatatatttggcaactggaataaatgtagctctggtatgttcaacacaataagttattgtgtattcacatacactttatttggaaatacttggtttatcaaattgctgtagataatttacttttccttattttttccatcaaggatttttaaaattgagtatatattaaaaacagagataaacaataggaaataccataaaatgtgttatgcaataagatgattgctctctgtgattctgtagaacataagtgcttaatttctactagtttctcaaagtaatagtcaaatatagattcctgatcctctttattgccttagtagccctctgaagagacaagaggcagtgaaatctatgaaccactgcgctggcctgcctttaaggtcccttctgggtcaaataacccatgattctctatatcagacttgagccatcagctttgtgttttggtgctgtgtgtttggttctagaaaactctctcttgctctttgagtgatcgaagcttgacttttggatgttcaggccaggttaagatcaacagccttcccatttggtagctaactgctcctgtgtattctagaatcacagactcactcaccctgttcataataataaaagatacttaggcagatggtgaaattagttaaataatctgggtacaaataaatgcaaaccaagccccaagatactatttataaccacttttcccatccttagaaaatgttcctgaaaaatacaattttaggagtaagcgttaaaactggtgaagtcttcctaataagacagtagaggaaaccaagagttcagaggttgccactctcactattatgtgaactgccttagctttggctgcataagttagagagtggaggtcctagtcagtcctaggtctaagaaatgctataatttcacctcaacatacctcacctcatatttgcctgtattcctccttatacactgcattctcaggccaaacttaatagcctgttgctcttcaaagtactaaaggccttaatgcctttgctcacactattccctacatctagatataagggtgtgtccaaattcaatccactcttcaaagccctgctcaagaaattagttcccccatgaagtcttactttctgctcacagcataatgtactgtactacacaatgttgtgaactcatagtcctttcttataattccccctcattcttcccagttaatatttcttgtatattctctgtatatgtgttccctctctttctctctcctccctggctcctatctcctctaacatagaagctacatcatattcatcttcctagtcttataataccttgtggttgtgagtcacacaattaatatttgttgagtgactaaaagaatgccattcaaccagaagctggattaactgattacggttagaatgatttagaaaggaatcactccagagctgtgtatctacttactcttcctgatgataattaaagaagacccatcaattctcctttcctttaatcctattccccacttgggtagttttgttaacaagaatttgccaacgaagccacagagcaaatttgtgagattaaggaaaaaacacatcagacttaacagcactccaaaaaaaagatgttatcacttattctccagtcagtcacttgtcctccttgccaatttgatataagaagaagtctcttctctccaccctatactaactcaccacattattttctttgtaaatgaaagtggaaggaagggaaagagatagttcacatttaagatagttttagaaattcagtgatgtattcatagctgtaatattgtccataaagataaagccaagcacacaggctgctgaaagtctgtgctggctgagtagtctgtcctgatgatttttccatatctgaacaatttatacaattgacagtttttcttttttatgattagaaaatgtgattgaaaaacatacaatcacaattttaaaatcatattaatgaactaattgaaagcaacccagatataatatctcatttaaaaagtaataaaattaatccatccattttttgagtcactgaggtgtgtggaaaaaagggacaataaaatttttattacattatctgtctgggggatggttcctgaatgacttattagcagattattatttttcccatggtgcttttctgtcagtcatttgaaattggccttgtgcttaaagaaatatgcaacagtgatcagaaatccagagaaaacagtactaaccctttctgatgctgtttctgatgctcaaattgtgccatcccttccttatagctctctttatttgactcagcttcacttagcatgatcaccactattagg

SEQ ID NO: 35377 - DNA, 3716 bp, Bovine  19866880623354
  misc_feature (1)..(1): n is a, c, g, or t
ncttttctctgttccttttttcttttctttccttaatggccggagcttgaaatctatctattatgaaccttggctccttgatttgagcttaacatagtactgggcagctcagtgctggccacactgcaaatgagtccccgccccctcctctcccacatcctgctcatccctctactcttgatggctgtgacatcaccactctgcttgggtgaggactaatccatcaaggctttaaagggcatgaatttactcctccccgccaactccccttcctgtacagaattccagaaaaaccatgcacacacacgcccatcccccacaaaagagcatcaggttattttaaaggttttagatcagaacacatttgaatgacattaagttttcttttctcatccatgtgcccagttttgaaattgttctacttgaaaaatatttttattttgctattttggtttcctctttttggccggcattcatttctgtcaaaggaaggaagcaggaaagtaatgttctacatgtcagatggaaggaatctgctaagtgtcactgcaataaaagacaacagcctatattctgcagctgctatgcatgagcacgccatccttaagaatagggttagggttagagtaaataattcctgagaaatagcttgggcaaacactgaaatctccaaatagtgtctcataaaaattaagtaagcttcttttttaatctcatttccaagtaaataggtgtcttgccacttaatattaccttagaagtaaccctgtcatatcttaccaactgagcagtattataacttgtcaaagtagagagcagagatctgcagcaagttcctcttgtaaacaggacacactggctgacagtttgtgtggttcttattaggataacatcaatcagtaatttatgcctaagcttcacaggtaaatgaagagagtcaaatgttttaaaaatgcctgttaagttattcccctgacttctcatgtgatgtggtgttaagataaaggggttcaactgtcctttagttgaaaaagttacatgttttactcaatggagtcctccaagaagagtttaagcactgatgtgcctggggtggtgctaggtactaagaagccaaaagcaagctaaaagacctccactttcaagtataaagataaagcacaacatccaagggagtattttcacaagacagaaaatatttataaatacttgcagacttgatattgtaaatatgatccctttgactggctgttcctaagatgccctaactgcaatgaaaactcagaagttgaaggcaggattccatgcagatggcagtctttggccagggtagagcaggcagatgtcagccctggccttgtgccctgccctgaggccaagtgggagagataataagcctcctcaatgtgaaatcaagtgggccttaggaagcaccattatgagcaagctagtggaggtgatagaattccagtggagctcttttaaatgctaaaagatgatgctgtgaaagtgctgcactcaatatgccagcaaatttggaaaactcagcagtggccacaggactggaaaaggtcagtttccttccaatcccaaagaaaggcaatgccaaagaatgttcaaactactgtacaattgcactcatctcacacactagctacgtaatgctcaaaattctccaagtgaagcttcaacagtacatgaaccgtgaactttcagatgttcaagctggatttagataaggcagaggaaccagagatcaaattgccaatatccaatggatcatagaaaaagcaataaaattccagaaaaacatctcccttattgactatgctaagcctttgaccatgtggatcacaagaaactggaaaattcttcaagagatgggaataccagaccactttatttaccaccagagaaacttgtatgcacatcaagaagcaacagttaaaactggacatggaacaacagactggttccatattgggaaaggagtacatcaaggctatatcttgtcaccctgtttgtttaacttgtatacagtgtacatcatgtgaactgtcgggctggatgaagcacaagctggaatcaagattgcctggagaaatatcaataacgtcagatatgcacatgacactacacttatggctggctgaaagcaaagaggaactaaagagcctcttgatgaaattgaaagaggagagtgaaaaatctcgcttaaaactcagcattcaaaaaatgaagatcatggcatttggtcccatcacttcatggcaaatagatggggaaacaatggaaacagtgacagactttattttcttggactccaaaatcactgcagatggtgactgtaaccatgaaattaaaagacgcttgctccttggaagaaaagctatgaccaacctagacagtgtattaaaaatacagtgcattaaaaataaaaagtactttgccaacaaatgtccacatagtcaaagctatggtttttccagttgttgtgtatggatgtgagagttggaccataaagaaggctgagtatggaaagattgatgcttttgaactgtggtgttggtgaagattcttgagagtctcttggactgcaaggagatgaaaccagttaatcctaaaggaaatgaatcctaaatattctttggaaggactgatgctgaagttccaatactttggccactgatgtgaacagctgactcattagaaaacagcctgatgctgggaatgattgaaggcagcagaaggggccaacagatgagatggttggctggcattactgactcaatggacatgagtttgaggaaactctgggagatggtgaaggacagggaagcctggcttgctgcagtccatggggtcgcaagtagtcagacatgagtgagcaaaaaaaaccacagcaaagcgagcaggcacaaacttatttctcttgttctcactagcctggcatctagcacattgcaggcactagatacaaacaagaaaacaaaggtatagaagctttatagatgctgccactgcaacagtaatttacacactcacgtttaggcaacccaggagaactctgcaggttatgatggcaaactgaagtcatgttcccgttgacagtaaataatgatcaatgactaatagaaccctcaaatattggaaatcaaaggagaaaacatcacaaagcaagaaaccaaccagataattattggtgccacccgtcaaacagcttttaacagaattttttaaactgatgatttacttaatatgttttcagtgcagtctggttggaaaacatgctaaatgagtcaattaagttgaagcacaaagagctttcttaggactgaaacaatagagtaaactccaggcattaatcacagatgactacagggaaaaagtcaaaggaaaagggagcagaaagcagtgacagagtgaaaacactctgagaaagaatgtattcttattcaccatgatgattaatttctgataaatagcttgcatttccctctcagttctttttatctaaaggtctgctctactataacaaaactctgttctactaaaactaactgtgggtgtcatttaataattgtttaaactccctctaatttgcacagattaattagcatatatacagataacaataaattctgaggtatgtagccatgtcatctttatatgaaaaaacagaactgatttacagaattgttactcttttttacttt

SEQ ID NO: 35378 - DNA, 692 bp, Bovine  19866880662258
  misc_feature (1)..(1): n is a, c, g, or t
nctgcctttatattactgtctacatatatttcttccacagattttaattttctatttcagtcactcagtcagttcagtcgctcagttagtcatgtccgactctttgtgagcccatgaaccacagcacgccaggcctccctgtctatcaccaactctcggagtttacccagactcacgtccatcgagtcagtgatgccatccagccatctcatcctctgttgtcctctttttctcctgcccccaatccctcccaccatcagagtcttttccaatgagtcaactcttcgcatgaggtggtcaaagtactggagtttcagctttagcatcattccttccaaagaaaacccaaggctgatctcctttagaatggtctggtttgatctccttgcagtccaagggactctcaagagtcttctccaacaccgcaatttaaaagcatcaattcttcagtgctcagctttcttcacagtccaactctcaaatccacacatgactactggaaaaatcatagccttgactagaagtaatcttctatttatgctggaattattgctaattcctctttatagatctccattccttgaatttctttctcttttgaatccaaatgacatatttctaccaatgttaatcttcaaaaggaaaattaatagacagtcccagctgacatggctatctaaccctatctctag

SEQ ID NO: 35379 - DNA, 792 bp, Bovine  19866880709217
  misc_feature (1)..(1): n is a, c, g, or t
ngcagttttagaatctagaataccagcctgtacattcataagtcttgatttagagaataagctgcttaactttcagagaagagccaatccatgtagctcacacccactgtagaaactaagcatcttatatattaagccttatatgctaagcagcctttattaagaatgactggagatgggatgttctggcactaagaatattcctcttaaccagtgaatggaaattaccatttattcacaaattaccatctctcaaaattttgaagttgctgtcacataaacttgtattagccttctacaggaggatgaaggaaagacttgatgaattttcagattataaaattctagacaaataaacattattatcatgtatatcatgttcctagttttcatcacaagctaaaatgctcagcatcctggaataaacagtatcttatattgtttttttttatttttggaaagacagtttatgtagacatctctgaaagaaaataaaactgttgcacagggatatcatacaaagaacaaatactgtcatgaaaaagagacttaaggactatacaacatattaaaagcacatttttcttggaagatattttgctgtatgaggaccaagcatacagtgatactcattctgcctgaccatatttaagctgagccattaatgatgctattgcttcatccagctgttttaggacaattagccatgtgacagccagacgggagagtaagatggcaacagccaatttcagtaccgacatatgtcttttcttcattacaaaaaaagggggg

SEQ ID NO: 35380 - DNA, 2039 bp, Bovine  19866880724730
  misc_feature (1)..(1): n is a, c, g, or t
nacccaaatccgatgtttaaaaaatatattctcaatatcaatgcatgcatgtgtatgcattttaaaactattacagaatggtacttaattcttgcataaatggtactgttgcttacctaaaaaaatacataaataaattgcaaaataattatgattaatacagtgatctgaataacacagtgatctagacagttcaaagcaatggcttacactttttctgagaagtagtttttaaataataaagtttttagaatttagtttatttcaacccaccttttacaagaaaaaacaattcttttttttatttggaaaatattgcaatcaactggaagatgaaatctttccaaatgaagaaacaatcaaatttcagagctttagaatagtgtaagctaaaaaacaagaagagcctatatgtaggatggctgtgagctactaaatattaaatacattgaccttacactaaaaaaggggaaaaaaggtgttacttatattactcaattgttttgaacttactgcttttttacctaacatttttttttcatttgtttgtttgtatttcaatactgaattggatccctctctacacttcagtgatcagaacaattgaaatatttgtatgcatatgaatcagaagacacagctaatggaaaaaaaaaaaaaaactcttctagtaagaaacaatggaggagctgttgaaaaatgctggcaattagtgttttcctttgttgctagattttatgacctatgtgattgaagataaatactgtatgctcattcatttaacattttgaagcacctactctggtccacatggactcagtgctccacctggggatttcatttcaccatgcttactttaaacaacattgtagcaggggagaaaaaaaagaaaaagagagctctggaagtagagctaaaatgaattatttgagggcaaacatatttctaacttcagaatctctatctttcttttgaaatgtccaaagcgaatggtatattgattttttacagcataccctgcacttttcactgattggtatcaaggttgtggaggcatctgttaagtgagctcaaaattctcttctatgtgtaaacaaaatccacagttttaatcaaatttaatgtactctggcctatatgtgtcttgtgaaagtcagagcggtctatgtaacagaattgaaagcatacgttacaaaaaccctcacttttcagatctcttgaaagcagagattatcagaggtagtgtcggtatgttcttttaagtcacctctgaagaggcaacaggggcatgcggaatgagatttgcatttcagagctggaaccaacatcggttacaaagatacgatgaattacaaaatatctatatctgaaggacaatgagatcctgggcacaggagtttatttcctatggtaaagagcaggggtttcaggtattcatatctctaggtcccatctcaaaaagctcccaataagggggtaaaaatgctactcgcatactgatgaattctcctggtccaaaaatgagccggccctaccccaaaggaaacctgtgaatgacatccaagaagaaccacacttgtatgctcctcaaattctggaagtgctaatttaatgtaccgtatcaccaaatatgctttacgagtaaacttgatactatgaagaaaacttttcagtacaattacctttaggccatttattaaaaagtacggtacctatttagtatacatcataaattttccctaaaaatttttactaacaaaaatgtctattgacctgaacaggagaatggccaagtattgtcaacaggattatatagggaggatctgtgaaaagaatattaagtactcatgtaagggaaagggattttggagtctgttcaagaaagatgggaatatggcatagaattagagcaaagataagcattctgtattaattttttatgtaacccaaggcaagaggtgaatacttatatgaatctcagctttcttatctgttaattttgggtgataatccaacagctcaacagttacagtgagaag

SEQ ID NO: 35381 - DNA, 1190 bp, Bovine  19866880725546
  misc_feature (1)..(1): n is a, c, g, or t
ncttctcttagtatgttgggccaattgtttagaactgaggattaaggcgaaatattccatagtatatagtcaccttcaacactcaaattcataccctcaggcacaagttacttcattttaagccatctctcccctctgattataatctcagccaacaaaatattaaatatatgaaagctgacttcagtcaaacattttttgattagttttttttcccttttctgagcattccatcaactcattgttgtaagagtgtgtgtataaatgtgtgttaatttgagtatcatgcagggtttatctacaccaaaagatgaatttactaaaaatgattaaacctctcttagttgactcattattaaaaaccagcctaactctattacaagaaagacattttggcctttttgcatttgtcaaatgcaaaagggaaaaataatcaacatcttgcaaaaagcaattggtcaaagttattaatgaggcaattctttctacataaggcatcatagaaaaactaatgagagaaaatgtgacaataaattgcaggctactttagattgtgtgacattctcattaatagtcaactttagtgggcgaaatcgactttctgtatattacaaatacaaatgtcatactttatgcattatataccaccattgtcttgtatcttgaaccaaggacagagttttatggattctgaggccttcataatttggggatctattcagaaattgcctttgaaaaatttacaaaaactgaactttttgctagacattttccatgatcttagaagggacctgatctagttaagggccctaaaatgcaagtctcattggcttagttacaaatctcattccatcttcattcctttacttaaataatcaaaaattaacctttagtagatagactgccgctaagtcatgtccgactctatgtgaccccatggactggcctgccaggcttttcttttgccatttcctacatccgagaatcttcctgacccaggaagtgaacctgtgtctccttcatcttctgcattggcagctggattctttaccactgatatatgatatcatatatattaccactgatacctaatacatgatattcatattgtctatcattaatcagccaattagttaattaattgaagtatatattcattagagttactagcgatgtctcaaataggcatg

SEQ ID NO: 35382 - DNA, 1189 bp, Bovine  19866880758608
  misc_feature (1)..(1): n is a, c, g, or t
nttctcctcctatacttattaatgcagctgtgagtacatttccgcactcttcacctgccacagtgacgagggatcaggtgccaggtagggtaatcaatctggagggcttttagcagcgcatcctgccactgtttgacagcatgtctccgtcaaggagactgtcttccctagatcgataaatcaatcagttctttttacatcttatgaaaccctcctcacaccccgtgtcactcacgctgcaccacacacaaatagagaatcggggttgggttggcccaaagcttcccatttcacattctatcccataatcgcgtatccttccccaaaatcaatccctggcacagtggtaatggatcaaagtccagttcttcattcctttgaactgacgagtgaatctgtcttgagtgttagatgttgtagtgtgtttaaaactaaatcacaactgaaatgcagaggagactaattgtttgttttacgattagaactcttcaaaggagacaacagttgcttcactaacacacagtagattccctgattctactcaaagagatcgtagacttttagaggctgtcaaagttgggaaggggctcagagactagctagggaatctaaaccaggtgtctgctcctgcgtactaagtttccagctactttgctggcattgtgttggatgagggctggtaatggattctgtcacccagagaaagccacttgcctttgtgtatatgttgggtttgggtctgagatatcacttatataatggcttctactgctttggtggaaaaatgaaaaccagtagtccatatcatgtcttgtgtctttgtattattaatacaaacatagaatctgaaactcatctttgttgtgtaacttagtcaagggcccacaacctgtccatggaaaagctgtaagagacatcccctaccctgacattgtgtgtgcttcatcatgtctgactctgcgaccgtatggactgtagcctgtcaggctcctgtgtccgtggaattttccaggcaagaatactggagtaggttgccatttcctactccaggggatcttcccaacccagagatcaaacccatgtctcctgagtctcttgcattggcaagtggattctttaccactgagccacatgggaagcccaccctgacatctgtccatagcaaatcccttccagaaagtgactttgg

SEQ ID NO: 35383 - DNA, 4769 bp, Bovine  19866880761505
  misc_feature (1)..(1): n is a, c, g, or t
ncattcattacttgctttgtctttagtgctctgtttttgcccctgagactgcttcctctgtcactggttcaccaaactgcatttctctttacttcctaaatgcactccctaaagcatgtcatgtgtcccactcttcattatatacaattttttttcaccctaatgatttatcaattcccctacttaagtattatctttttgaatatgggcatgaaatctgtatatctaccctaactcatctgcacacctctatccatggtttgcaatgttttttgcaaaaaaaaaaaaaaaccttggtacacaatccattcaccaaacactccaagctaaactttattacttctcctcttattatctcctgctattcattttcccatcactatttcaggcatcagttctaaactacacagcttttaatctcagatgcttccttttccccctgtgttgtcacattccacataccaccacagttttagcagagatctgtaaaacaggtttctttccacattagaatcactgtaattgaggcacattttgtctcttacctgaaatacttggtcttcttatttctacacactgctgacagattaatctccttagagtacagctatcatcttattatcttatgcttaaaaaccatcattagccactcactactttcaattataacctaattactttacctgacacttaagacccacatgacatagaactgaagcagtatggccaaaaattccagctaaataaaatgacagagtctttccaaaaaaaaaaaaaaaacctaaaattttattaatttcagtggctttcttgatattatgaatagctaagaaactgctcccaagtccacttaacgaagtgattttcatcattctgggccaagctacatacccgttttgtcatcacagtgtttctataacttcaaaattcaatagggttccccttctgagctactgaaatatttgtgtggttcatcatgactttgaaatgacagacatgagagtgaaaaaaatataaccatactcacatgaggagttgtcacagttttgcttaaaaaacagcttaaagtatgacttttgtacatttcatagcatgtgacaaataaatgggttctcaaaaaacactgaatattttgttgaattgtacttaattaattttctccagaaataaatctccatgactgggttgaacatatctctcagtgatacttacatggaagcctgcattctaatcaggcaaagggctagcagtcctttattaaataagtggggttttgtgaagtgggttggaaagttattctctgttactgcctagctttttttagtgtgcaaaggggcttcttccatgttgctaaattcatgctagtttctttcttgtgggcttaaggaagtgctctttctagtttagtagtttttggagaaagctcttctgagcatgcccatcttacacatgtctgcacgcagcagccatcacaagtgtgtcacatgtaataccagcaggatgccaataggtagattgtaacctgtcagtcccaaatgaaatatgtgactggctcaagctgagcccaaattcattgtcaataagtcagcagttaactccaggagaaatgaatagagatgaaggcatcagcttccttccattttctataatccactttgagtctactttgcttggactgacttaaattgaggtgtgtgtatatgtgtgtgtgtgtgcgtgcacgtttgtagtctgagaagaagttggctgaatgctatttgaaatgagattagaaagcactgtaattattttgctcatgtagaaatacgcagagagcatctgaccccttgtaaacaatgcagtttgggggggacttaacagagggctcagttcttcttcactaattagcacctcattaagctatcctaatactaaaactcttgttaatgcagaggctgcttaagaaatcaacagagaaatgcccctaataacagtatcttcagaagacttgcctctggttacactctcctctcatcactttagtttcaaaacacagtcaggaccacagggcatacttttcttcccattttgccccatacaaagccgctgcatatttaaatctgaaatgcaccactcactgcatgctgatttaatgcagaaaaaggaagagccgcaatcctgactctcagtccttctcaatatgctaagagcataagaagcagaaaatgagaaatgggaaactctctatgggaagacaagctcatgcacctcaagttcaagccatcagccaggctgctgtggtggttttcagttctgcatccatgtgtgagaaaagccgtgggttttaggataagtgacactatatcacaagagattagaatcagcaactgctgtttctctgtggaaagccgaagataaacagcaccagatgactttatttttacttttttaagcaaatgggttgtgacattttgtaccaactcagggccagttctcctggataagtgctttatgttcatttgactaaaagcccgatgacagagatgaagtggctgtacttcggggaaatgagtgcattggggtggggtgaagctgagagtaaaaccaagggtaaggacgagaaaaagcagaagggggcatggcaggtagctgttgagttgagctggcgtttgattgtgagggacctgataaagcagcacctaaggcttcattagactcttccatttatgataccatggagggtggtaaatgtatgtgatggagggacttcagcagtcatggaaccctcatgtttccagctaatataaaaggactacagaagggaagagacaagaaggaaactacaatttcttgtttatctgtgaaactgtctgttcttttgtcacacactgcactttctaccattttacattcattttagttaacttttaccacaactctaataggtcagcattaagagaagcagctgagatccaccatcataagcagtcacacttttatgggatccaaggagaagcaaagaggtgcctgtatggctgctgggggaaggaagcatgtgtggggatgctagtgttcaaggaagactgctcctaggaggtcaggatcaaatagctacttgtgtttccccattccccaaggatggcggaagctggagaaacaagtgttatgtgaaatttgtttaaaattataattgcagttgaaagtaccagagtgggatttccttgtggtccagtggttaagaatccacctgccaatgcaggagacacaggttcggtccctgatcctacgtgtagtggaacaactaatccatgtgccaaaactgttgaacctgtgctctaaagcctgggaactgcagctactgaagcctgagtaccctagagcctgtgcttcacaacaatagacgccatagcagagaagcccgcccaccacgactgcgagtagcccctgctccccccaatgacagaaaagcctgcacagcaacaaagacccagcacaatcaaaaaataaataatcttttttctttttaaagaaagtatcagagtggatcctcttttccttagcaaaatataatcagagagtgctgatattcaggcctctatcatatatttggtctagggcaatacatggagaaggaaaaggcaacccactccagtattcttgcctggagaatcccatggacaaaggagcctggtgggctgtagtccatagggttgaacagagttggacacgactgaagtgacttagcacagcacagggcgatataataaagagacttctgtgctatttatcaaaataatgataccatcatatgcccctagaaggccaggtctacacttagaatcctcagctccttgaagctgtgtgtctgaggcaggcggggctggaagagccgctctgactactgatttctctgcttctcatcctgtcctggcttcagctctagtgtgaatttgggagggccccttatccctacgttcatgctctttaatggcccagaagaggggccagtgcagatgtagagaatgggtctaagatactctgggcagggagttctaggataccagatgcatttgggtcatggagggtattcttcactctttaaggagacctgtgaccttggaaggaccaggcagagtgtggaacccagcatagggttcctcttccctgggtctaggaaagaattaataagactgttaccctacctcaggcaatcagtttaggcctacaatcagaaaactgctcagctaagaaattcctgtataaacttgtataaacatgaaacagaactttacattttcattctaggttgataagacagagcaccacatatcatggatcctattcttcttagccacagataataacttaacagagaagacatgtaatcatggatagattttccccccaaaaatctaggaaaatgtctatattttgaaatagagtaccctgacatcaaatctgctgttcactattttcttgtatggttttaggtaaacaacttaatttattggagttccagtttccatagctataaaaatgagggctgacactacttatttctttctgttgggtgggttagattagctattctgtacaaacacagctactcctgtgtttgaatacatagtagatgcttaataaatattcatttccccttcccttcccctcactatattttcttaagttacatttcctaggaaagtccttctaattaagtgataaaaatatatatttttcttcctaagaatcttgagggctgacagtacacattgtgtatctatgtaattaat

SEQ ID NO: 35384 - DNA, 1523 bp, Bovine  19866880768447
  misc_feature (1)..(1): n is a, c, g, or t
ngttcctcctaactagttaacctgtgtcagaacatcatggctagtcagatcttttcctaaagactctatccaacctggaatcagataaggatatgtttccttcttattctgttacaaattaaatagaagtagtaaaaaagggaaaaatgctgttggccgagagcctatgagtgggctctccttcatttttctgaattactccacggttagaaaagagattcacagaaaggtctccagttgactgcattttcctcatgtctccacctcaagtgagtgagagattacaaaaggggaagatgattggcctcaagaactagatggtttcctctcctgtaaacacttcttgtaaagaagccttgtggtgtttggcatcacctcctgtacatttgtagatcatgagacaaatcttcctcagtgaattttctccactgcattgtgagaatagaaattagcctcatgttctctctcttaacaccaaagtgtccccacaatggtagctatgaaaacagcactacttaatattttctttgattgagtgatccaaggggagcccaggtgcatattgcttgactttgttattttcactccttaggcaaaaggacatttgcttcagcatttaggcaaaaccatgtggaatgtggagtgcagagtagaaatcccaatttgtcaattcagatggcattcacttagagaaaacattagaatactttcatctatcttagggcatttaagcaaggtacatacactctagtgatgctttatatttcttccttctcaggagaaatttgagctctgttaaatagatcctgagcagagatttgaatcacctttaaaggcacatgcactttgtgaggtggaggaattatacgtggaagaatgagggacatggagaactgcttcttcctttgtatgtttcctgattcttcaacttgatttaacttatttcttctcttgtacatattgattacatgtatttgtacattctctgccctctgcttacagtgtattccctagacaacttgtgggtctagacaacctgtgggttgtctagtgggtctttctttctgggtcatcttgtggatgtttcttgtgggtctttctttttggttagagaagcatccccaaatcctaaaccattcagattatgccctccattgctattctttcaattcatggttaccttttcctttgaacacttagaacagttagtgattttacatttatctttgtgctcattggtatgatactttttctttaaaccagactgtctgcatgtgaagaaaaggaccacatccacaattatctctagggtgtaccataggctcacctactttttgataatattcagtgttatttataacaaatatttaatactgtttataaaaatatatatttatttataacaactaaatgtaatatacctttattatcctgaattgaatttagtatataatataacctacccacacacacaattttttaaaaagtcaataattcactgtaatagaaagaacatgtaatta

SEQ ID NO: 35385 - DNA, 2607 bp, Bovine  19866880798006
  misc_feature (1)..(1): n is a, c, g, or t
ncaaaacaaaagcaagatatgccctacaccagtaagtaaacattgtcacaaatgatggagcgaggttaaactggctgttctgacactattattctgagcctcagctctctctccagttagtaaaccagagacctcctgagacgcatgaaaagacagccttccttagccctccattgcactggtgggcaaaaacaaaaatggaggtgtcatattttcttattcaaaggagacctgggtcctcctcccaaactggctacagatccaagtgtgagaacactgagctgcatatcaccttttcacattttcaacacatcacacagccttatatttaagccactcctctcacttagaaagtaaaacccttacataaatattaatgggtagacgacccaggagcagaaaggtatcaatctggcagaacttcataatgatttcaattctctccttcaaaagccacaattaaatcccagagggaaaattatcttttgtggataatgcaaataatggggtttttaatatattcacagattcataatgatattactattattaatagtgacaataatgaataaatttgctactagaaaataagtagacagtccagattttataatcctattaaacatctctgtattttatatgttgcatattattttttctttatgagatgacctgagtcacatatgcacttttatagcttcctagagatataagaaaatgaagccataacttttcatttctctctgtcacatgtgatatgtataagaatatgcatatgtataaaattttttcttttgcttcagctctttgatctgaagagttgaaattactttccatttgattttattcaaaaaagccatattcccctccagagatgtttaaataaaaaggaaattatccaccaaaacaaaactatccacaactaatgtgatgtttcttaaataacttttgtcactgaccaacacaaatagggtagtcagcaagtaatgttacacgaacattagtaacagcaagcaatgttacaagactgcagaactaatactgaagtcaggcaaagtatgagcaatcaacttgttgagcattctaaagatataagtggacatatcacattgatatgatttcctaaaatagcctttaataatctgctaaactccccttgttgctgctgctgctaagttgcttcagtcatgtccgactctgtgggaccctatgaccagcagcccaccaggctcctctgttcaaaggaatatctaggcaggaatactggagtgggttgccatttccttctccccttactatataggaaactatcagaagagacatgaggacaggaaaacaataaaacaaaaacaacactatcaggaagacagaatggaaaagaacacaattgaattgatatttgcatttaaaaagagacagatatcgattgcctcaaaggtactgaagaattcatctcactatctcattgatattgtgcctaaacatgtaaatttgccaactatccagtggttttatcattgcatatgcagtcacatgggtttcccttgtacctcagctgataaagaatccgcctgcaatgtgcaagacctgggttcgatccctgggttgggcagatcccctggagaagggaaaggctacccaccccagtattctggcctggagaattccatggattatacagtccatggggtcacaaagagtcagacacaaatgagcgactttcatgtagtcatatatcatgcaagaagattcaatgtattttcagtcatctttaacttgaaaaacttactgtacaagttttctattcttagttattctaacacttgataaatcaacaaggtcaggtattttttgaccttttgccatacatgataaacagttcttgatgtcttctactgtcaggaaaatgtagactaaatcaaagtttggcactggagaggcagcatggaaatatactggcagttcccagggaaagttcaaggttagaagatcctgaggtcctcaagtgccatagccacctctgatcttactacttggtgctctgaaaagtttattccaataaatttcaaaatttattttacataagaattacctggatggctttttcaaatacagattgcctgggcccatcctagactttccaacttggtggaaagagacctgacttgactttctagagaagctgagaatttgtatctctaaggagttgctatgcaacacccatgcttctggttcaagaattacattttgcaaatcactgttctattaaactgtgtgtggatttccaagaaaatcttgtcatagcttctatgatacttaaatcgtatctccacattaaacaaatactatacagtcttggattgaaaattaaacatctaaagagttaactgtatctgcctgatattaaatattcaaatggataaggctatttaaattcactggtaatgatagccacaacaggatacattctattctaaaggtatgggattttgctgaagaacatttaattctacggacagaataaagaaaatacagggtatagcctcatcctttataatgtcagttttttatatgtaaaggaaatattatgaccaatctgtaaaaata

SEQ ID NO: 35386 - DNA, 1274 bp, Bovine  19866880812796
  misc_feature (1)..(1): n is a, c, g, or t
ntgcccgctctttcttttatagaatttcttgccttaatttactccctaaatcttatttttaataccttcctttgcttcccaccccaatattttcactttcttcactcccttctgccttagcattctgcattccgattagatgccatatgtataacaaggtagacagatgctttgctgttaaactaaagggctttttaatctaccagaacagaaaccacgagctttctttttgtttggggacatcagcaattcatggcaaagggcttaggaatacaaatgagggtttttttcttccagcagcatggagtctcagcatgtctctcttactctctccttacttcacttgatctgcaaagtaaaaccctgcatatgggagggattcataaataccgctaatgacacttaaatgtctgtatacacagtgctttcacgagtggaaccagtggaggtggctggtgtatgtccatgactgtcaattcattttacctattgattcatttacatttttttttttcagtctgtgaccattgacagtgtctattttgatgggcttcttaggttgcgatttccctattctttattcaaattgcagatgttttcttttctttctggcagtcgctttgtaataaggcatgtcttttgaggaaatagtgaaggcacacagacagcctgtcagaccacataaccaggtaggtcatgctagggtgctttttatgacaaccatgaccctgtagggttctcctgtggtaactctgattcaaaagagaaaaatgtgaggagaggtgtcagcagtttgagggcaaggcccctcagccgaagcctcttctgaccccagagtgcttggagaggaagccaacttccacctctctttggggtagcatggcttatctcccagggggatggggctctactgctcttaccagtggatgacagtgtggagttatgaataaggctgctatggaggccagatgtccaagtcacaccctgagccctttgcatagagtctgtgtcctcaagtcaccaagagtactgtgggacttcaagtaagatgatatttcagggtccctcatccctttctcttcttgcttttctggtaaaagagtataatgatgtcaacttttctgaccaatgtgctgatgatcttccttaatggcaggtatctggttgtcccccctgactacacacacctctttttttctatctgccttcttggtacctcctgaccctactagccccagaagtcttcactccctggtactactggaacaccagtc

SEQ ID NO: 35387 - DNA, 1804 bp, Bovine  19866880919763
  misc_feature (1)..(1): n is a, c, g, or t
ncaggctcctccgttttagttattttgttctccagttcgaactgtttttttcttatattttctagttccttattaagattctcactgcgtttatctgtttattttcccaaattcagttagcatttcctattactaatgctttgaactctttatctggtaaattatttgttttgttagctgctttttcaggggtcttctcttattctttgaattgaaacagattcctctgtcttctcattttgcttaagtatctctgaaattaggtaaaatggttacctatcagggttttaaagggatgttcttgtgtaggagaattcttacacaatctgcatgtgctgagtgcctttggtggagagctggatttgatgtgagcatgagtgatatcttgcccctggatgtgcttgaatatctattctaagatggacttcacatgatgataacacttgcaaccatttgctaagagctcacaatatagccagtattgcactcaataaatttcatgcactatcacatttacagtcttcaaaaataacccaaagaggttaatgcccattttaatgaaaatgggggggggggttaaatactcacagctgatgagactgacatttgaaccagactccaaagctcatgaccgttcaattggagcctactgtgtgtgagtcatgtgttgtaagagctgaatgagatgaagagagattgccatggcttgatgttaagtgggttagggtgaagaagaaaactccaaagacagggcaacagcaacatcaggagtaatggagatatttgaaggacaggacttcagcatgtcattttcagtttggagagaaactgtccccgtagttttcattgattgctttttaattgatagcagcaggggtagctctgtgtaccttttgataagctttctatagtctggaaattttcagatattgcaggggattggagcacccgagttaatgcactttctactcatgctaatgtgtgccctaggaggcagaagaaggtcagcctgaaaagagaaccaccggtagctgaagttagaattgttctttctaccagccttcagcaatatgtcctttttaactttctctagccctcctcttgcaaagttaaaacttttggtttaagttttaatagaactcgagcaagtgttcaatcctaaaatcttaatatacgtgtctaaaattcgtccacgtctccctccacaaaggcatgtgaagaaagaaagcatttcatgtttcattgcatattttcctcaattcctttcccgaatgataaccccggggtctaatattaatagcatgttttctgcttctttacctaatttgcatggtgaatactttatagtacaaaatatccactgatgggtaaggaaggatgaaaaggatagtgacggtttcatgtcaacaacaggggaatgtgggtttgggtttagcttaattctgaacagtgatgagggggattaacactaagatgcaacaacaccaagatgccacaacgctgatgttaccagcttctctgccccttgagacaaggcagaagtttataggcatagagtttagaatatggattctttagccagagactaaattcaagtcctggcttcattagttcctaattctgggacttggctagatacttaatacacttcagtctctgtttcctcacctgaaaaatggaaatagtagtagcaccaatttatttagtaattatgattagaaatattatatacgaaatgtataaaacagcctggatctttatgtgattggagacaactgttattaagagcaaagaggctagacag

SEQ ID NO: 35388 - DNA, 954 bp, Bovine  19866880937292
  misc_feature (1)..(1): n is a, c, g, or t
ntctaggcctggtaaggcatacccaggctttctgtgggaaatttatcattcatgcccaagatggaaattacgatttctccacgatgtgtgggaaccagaaaggcactgagcatctgaaataaaatgaaaacaatttagctctgttgaatgtcaccctctgttgttgatttccacacatctgtgcattttcccttatacgagacttcatgtaaatgtgctagtttttgagaaagatgaagaaaatccataatcaaaattatctggctcacggcattcctagtttcatagactcggtatctctctgaagggagttacctcttcagcaagtccatactcagacagataacatgtgtgtacatatgtgtgggtatgtttcagaatatgaaagagcaaatgtctcagctggaaaagtccctatttttcaaagactatcacttccatatcatcctggttaaccagaagccagcacacaagcttcagtggggagaaatacaaagaccctcatgccagaatggagccaatgcagcacaggattcaggcctctcttggaagctggatatgggggtgtccttcacgtctccattcgctgcttgctcatgaggccaaggtgtgtctcctttctaagtcctgacaatctgaaaacgatgagaaattcatctcagcccccttcccagatgacaagcaagttgtacattgtattcactcccactcttcccggtttatctgccctgacagttcactgcagctctgtgtagctgggagcccagagggcatccatgacctttctcaagctgttcccagctgtcatcagtgcctctgtccctctttcatttttctatctgttgcttctttcaggtgcttcctctcttcttcatttctagtctctctctgtgcatctctcttcctccttcaaatcaccagcatctttcaactgtatcactttacaaactgcta

SEQ ID NO: 35389 - DNA, 1306 bp, Bovine  19866880945773
  misc_feature (1)..(1): n is a, c, g, or t
natttttattacactagattacatatcataaaacatgttatacatatacacgttatcatatttaatatcatattgaactatattttatgtgttcacaatattatactgttgtagcacagtatattgaactaagtacattttataccttgagatggcacagctcttcactcatacaatgaaggaaggtctgattgtttttttgccccactgctcattccttccatctccttattctatatgtgtctgaagaatgtctttctcagacatttataaacagtcatcttacagccatgcttatttctagacatgctgcttcacacattccatgggacaggttaacaattatttttggttttagatgccatctgttacagcttctctgggccaaagatcctgtttatgtcaacaaattacttaattaagcaaactaggtgatgacaatgatgaggttttgaaaatgatatggacattcatgtaaactatgtaattcattattatgctttattttaaagagtatcaaagagctggggtagtggagtggtataggggagaaagggtacccataagaggggactggcaaggcccctcagagaagtgggatggcaagtgatgtagtatggaaaagtgaggaacttagaccccttcttatgagcgaaaaggaaaaaaggaaaaacaggaaagaagtccagttgagttctccctgtgcactaagcacaatagtgcctactatgtgacaggccactgggaataaaggtacaacgaagtttcgaaaaggccacattcacttgaccctgaacttgacttcagagtactctgctcactcccaagacactatttctcatttaattcatgactccatgatgccctttcatacctaataaggacaagacaccaagttagagtacttctcacatatccccataaataatttttgtaaaatactcacaaaatataattttatctcaattgagaaaatttgctaactctaaaattatcagataattcaaaaatgctttttgtttgtaaattcatagctccctcagattttctattattctagttataggcagggatagggacacaagtattaatacagaaaatccttgggtttgctgtaattctaataatattaaagggataggatagacctaaacccggagaaggcaatggcaccccactccagtattcttgcctggaaaatcccatgggcagaggagcctggtaggctgaagtccatggggtagctaagagttggacacgactgagcaacttcactttcacttttccctttcattcaatggagaag

SEQ ID NO: 35390 - DNA, 1213 bp, Bovine  19866880975154
  misc_feature (1)..(1): n is a, c, g, or t
nctcctctttgattgcaacttctaggcacctgaagcctccaacaaagcttaacttctacctcagaaccaacatctttcattacactccagggtgaacaagcctttcagctgcctccttgttgtctggcttagattttaaccttcctttcaatcacatgtgtttctctcactcaaaaatagaacagagtagtcggaggacactagggctttatggttcttaaagatgatgtacagagagaccctggggcgctggtccctcacagttcaatttcagaccacattgcccgaaaggcaagtaggaaggaatactattgtcagcatttcaaaacaacatgcagtatcaccttttgttttgacctgttcagccttttctttcaagaaattatcctttgattctcagactcccttgcccttgtctgagaatagagattccccacccacccctcacttcctttttagtgcataaattgctttagtcattttcaagttatgaagtatgggggaaattttcatgcagagacaatacttatgattttttatggataattcaaatgtagttgaaccttagaactttaagatgaagaatgaaattattatgagttgggaagaaaaaaactgagcaatcaaaaaccagtcttcatatgtgcacaataaaattgagttttaaactgtgtaatcatacctttgtgtaacatggcagggatattattgtttgttttgatattgtgctctactgtaaaatgtacatagttatgcaaataaagttaggtaactcaatcaaggtacaactttccttttttcttaaaaaaaaattgccatcttagtttcttaaatccaaagcacaggaaaagtaaatgcaaaaagtcaaaaggaaataattgaaatgttgatgttacctcttcaaaaaattatatatttaaaattttcatcaggacaaggttaattaacattacaagtaagtgatcccataagtaaaagaaaatgtttccaaattgcgtatgtctctttgactctccatcatgttccagcttccacatccccatgcctctagccttggcacaatcacttttccagcctggaatgccctttattcctcttgtctatctggctaaatcatatttatctttcaaaactcagatcggttgtaatcttatctcattccccttacccttgctggcctggaaaattatgctctgtcttcacatatttttat

SEQ ID NO: 35391 - DNA, 2675 bp, Bovine  19866880979443
  misc_feature (1)..(1): n is a, c, g, or t
nattattaagttttcttatataaaacatataagtaccttcaccagaaattcaagttaggaacatagctggagaattcagtgtcccggagtttccctgccctgccctccaacctccaggccattgcaatttccatagggacctagaataaaacaattctcagccctcatgtccctttttagtttgaccactctgaggctgtattggtagaaccctatttattcttttttttttttttttgcttcttaattttctaatggaggttagtaatattaatatatatagacagtatatttcagcaaagggcaatgaaaaatatggggaaagatggcaatttgattatatgccagaagaggaaacaaagcaatgaaacatttttattccaacctgtcagttctctatacaatttttgaattgtatagtttaaagagacaaaggagcttttctagaacacaagatattataattttacatggtctataactgtcaaaaatggttatgcaaaggactattaagagcacatctttaccagtaacattgattgtgaacttaatcacacaaattaacccttgatccccttactttcctgctattttgttcatattttaatttcttcatttcttctctttggggcttccctgatagctcagttggtaaagaatctgcctgcaatgctggagacctgggtttgatccctgggttgggaagatcccctggagaagggaaaggctacccactccagtattctggcctggagaattccatggactgtatcgtatatgggatcacaaagagtctgacatgactgggtgactttcactttcactttcttctctttacctacacctcagaccatttgcctccctggctagatttgaatttacttctcttagaggtttcagtattgagagatggaggcccaatatcagccactgtaaaggacactctaacagaagaaagagggtgctccaagtccataatgaagaaatacatgcaaagattctttataaagtatctatacaacatctgtccatgaattgattacacatttcattgtaatgtctcaatattgttaacttcctattcaatattattttagatatattcaatatttgagctatttgcacaaccatattaacaacagggaacatttttacatgatatttaggaatatatgtgtggtaaacagttttataaccacattagttttccctaaaacatatttaaaagggggaaggcaaggtattttaatacacctggaattaaagcagtttgaagttgaattaaaagtaacattacttatggtacaagcaactacagtgcagaatctgagcaatttgagatggaaagtatctaacttgacatcaaattttttcattgcttgctttgcctcctccatcactctcttgaatgtgtttggaagatatatttcagcatttcacttcaggtcacccaccacttccaaatcaatgtcacttccaaattagtctgtccacagagtagatgtcattaaccaccacccaatttctacctgctatctaagctagattctcttttcaaaacccatttctctgtacagatctacctgtatcctttttatcagcgtaaattatttcttcctccattaagtgtttatggttttcaaacacgtacacacataccttccttagccaagttgtacagacataattctttcaaacttttcccataagtcagcctctttcccctaatcaattgtgaaactcttctttggattccttccaatctgtctacttattttcggtagtcagacaaaccaaacagaatggggcattctagaagaggtctcatgaatgtcattgggagtggaactgtcaccctctattccatgatgaaatgctctcaatacagtgcatccaaaaataatatttcccttttgggtcccacatcacactaaaaatgtgtagtcttttctgtttttcagctttgtatctccaggtgtccctgctagcatctcaggaataaatcctgaccagtccagattcttaagaaagtatgctgtctaatattcttcataaacattccccatcaacttcttacattttaagttttgttttctttatgtaattccttaagctcttcaagactctcctgtatacttgtgtgcttctacaacagaaaattccctgagggattttttttttaacagttatttccccattgcttaagtcttttgctaagaatatatttgttcctttgacccttttttagtttaattcaataaacatctatcaaattcctccaatgtcattcactatattaacagaaatagagaggatagcaatggcgaaaaagtatagcaaaggagaaagagtaataatccctataggagagacaagcacacaattatcatttgaatatcacttaattctttcctggacatcctgagcacaagccttcctttgacttactcaaaccataaatgcaccaaatgggtttccctggtggctcagacagtaaagaatctgcctgctgtgcaggagacacaagttcaatccctggatggggaagatctcctggaaaaagaaatggtaacccactccagtattcttgcctggggaatcccatggacagaagagcctggtgggttacagttcatggagggcaaagagtcagacacaacttaacaacaaaacaa

SEQ ID NO: 35392 - DNA, 1428 bp, Bovine  19866881084958
  misc_feature (1)..(1): n is a, c, g, or t
nctgagcgctgaagaattgatgcttttgaactgtggtgttggagaagactcctgagagtcccttggactgcaaggagatgcaaccagtccattctgaaggagatcagccctgggatttctttggaaggaatgatgctaaagctgaaactccagtactttgaccacctcatgtgaagagttgactcattggaaaagactctgatgatgggatggattgggggcaggaggagaaggggacgacagaggatgagatggctggatgggatggacgtgagtctgagtgaactctgggagttggtgatggacggggaggcctggcgtgctgcgattcatggggtcgcaaagagttgggcacgactgagtgactgaactgaactgaactgatgcatgtattagaaaaataccagatgaggtagatttatatgccgcagcaatgacagttgccgtgaggggtctggtcaccaactctgctaaaatgaaggaggtgaaccaagaagatacagtaataataataggaatgttaggacaatgagaaggatcataatagtagttgacatttaaattctagactcaacattatattccagtttgtcttccctttgtgtctcttcaattccttgggtatgccttcattcaaatcatatttagatcccagtttaaaaagaataatctttgattgtagtataatccagggtcatactggatttgtggaattattttcaatagatttagcaccttcaattgagactagattagtggccccctggatacctagttaccttttatattatgcttgtggtctttattgtgttttaatcaggagctttcatgggaatattctgaaccaaggttagaattttatgtgaaataatgagaaagggcatgggaggaatagaatctgatgaaaataaagcattgaaaaacagttaaaattcaatataataacattaaaattaaagcacctggatattcattctcctaaaagtccactgactttttcacatccagtcatgtgagccaaatgttaggctaatgatagtcttcctaatctgtcaccagactattaaagaccatatggggcaatgacctttgtaattatgctaatagcaaatccttccttgtacagtctacctcattttattgcacttcacagatattgtgttttttccctaattgaagttttgtggcaaccctgcattgagcaagtctactggtagcatttttccaacatcatttcctcactttatgtctctgtgtcacattttggtaactctcacagtatttcctactttttctttattattatatttggttatgggggtctgtgatcagtgatctttggatgttactcttgcaaaaagattatcacttgtaggctcagatgatagcactttttagcaataaagtagttttcaatgaagatatata

SEQ ID NO: 35393 - DNA, 1620 bp, Bovine  19866881099367
  misc_feature (1)..(1): n is a, c, g, or t
ntgcactacaaggaaagcatttcactatttatcctaccaactgagaaatggactatttgctgccatatcagggaacaaaggatgccacagtcatcagcaattgtagccaccacagatggtaagcaggtgagcccagagggaactcaggaaggaaagaatacctgccatctaggagccatcaacttgcagccactccctatggtgagccctgaggaaacttaggatgtgatgaaaacacaagatactgaccccagataggtgatgtgcatatcaaaggaatgatttcagggagccaagactcttgcatcttcccattcataaaagtgctgaattctttaacttgatatatctggttttaattaacaataatcttttgattttcagactacctgccctttcttttaaaactcccatatgatctggcttctccccttgcctcctgggagcagttctctttgcgttactggagatgctgccctatgggcttgaagtcctaataattcccaccaaataaactgtaactctcaacttttaggttgggagtgttctttaaggccatgcagttaagggcacatcttgctcttaaagttgattcataattaattatgtgaatatcacattgtaagactcaataaaatagaccaggaagaaaagaaagtacttgaaatattttcttagcatcatgttttccattgagaacattaatgaagaaattgtctaaaattactttgctgcacagtgattctatcagttttcttagaaagcactttgcttgggaaaatgttatgtctgcattactttggaggcattttggattaatcagacggttgatgatccagaagtgttcagcaggcccagatttcactgccagtaaacacagagaaatactttcccccaaactcaacttgtaacaaagaataagatttatcagacttttttctaaaatccaaagttagggactttgctcaagtaggacatttttgcttaatcttcacaccctcctatttcagagtgctgaataaccaagtaagccaagagaagattatactaaaaatggtgctctcagaattgtgaacttattcagtggagattttacaggaacctcaggggattttattcaaaattgaacttgaatagttttcaataatactttctggttttggaaaactgcctctcaaagtttctttcttctttttcaatgtgaataaagaaaagtaacttatatattagaaaaaatgtagaattaaaagaatcttggggatttaaacccttaagctgtttgagttgatgacaagatttttgataatggttgttttgggaaaagtatattcaaatataggattctgcaaaatccattcatgtgacaaaactgtgtttgacagaagtgtatggagtgcctggtctgtaccaggctttttcagtttccaggcacccttggtaataatttgcagtaggaccaatcagttcatcctttgtggtttctcttaggtagaacttagaagcccggatgtagagaaagaaacctgtggcattacccaagatgtgtagaagaatgagatagtaatggattcaaaatggagagtgtgcatggggaagggttagtctcatttgacataaata

SEQ ID NO: 35394 - DNA, 2092 bp, Bovine  19866881150971
  misc_feature (1)..(1): n is a, c, g, or t
nacaaatgttaaaagactgtgtgcctggaattgtacacccaactttgccacacactaggctatgtgtccttgtgtaaattatctaagatttctgtaattttatatatctaaagtgtagacttggtttaatggcataataccaaatttcacagtagtgaaatagacaaaacaaagaatgtagatcattctaaatccctccacccagagataggacctgtgaataatatatgtatttcttttcacatttagcatataagtccgtacacaggcacacaaataaacacaatagaatgatgtatctacacttttatgaccaacattttcttttgacatcacattgtgaatatctttctttgattccatgtacataatcaccatcactatttaatgtattcagtaatccttcttaaatatattttcataatttatttagacagtccccatttattgaacatttagcatgtgtgctgcattttgctgttacatacacagctttagtgaatgctttcaggcaaactttgaaaatttatcttcatataataagttcctagaattcaaaatgctgtaccaaaatatagtcacatttttttagaaatttaccacagattacaaacaatcaaaaagaaaaccatgaaaaaagatgtgaaccatcatttcacaaaagaggaaatgctgtaatcaaataaatatattaaaaaattaattgttgaagaaacgcaaagaccacgatgatacacaactttgtgcctattcaactggcaaccactttaaaagtcaggtaatatcacatgatgagtaaattccactcgatcttttagattttgctattggggagtttaaactgatataaccactttggaaaacagttcaactttatattctaaaattgaatatttgcatacctgatgactcagcaactccactcccaagtaataagggaattcttgctcatgtaaagcaggataatatacactaatattcaccatgataaaaatttggaaacatgtcaagtacatcatctggagagctgaagaataaactacatcatattcttccaatgcaaccatatacagcagtcaatatgagtgacatgcaaaaatatagctgattattggcaatataatagtatatgtaaaaagtaaagttttactactaaagaacaaaataactaaaattagttctctctttacttacatatttatatgtacatatatgagcaataatatttaaaaagaaggcaatagaatgattcatatgggatttagattcaaggaagaaggacaatgtagacacacaaagagaggcatacacaacaggacagtgtatgccaaaagaaccccaccagcaagaatgtaagaacacctgtttcactagactgtagaaatccccaagaagttatactgtttccctaatgtttcccaagttgatgatttaaaaaggtattcactggtatttttatttgcctttatcactcactagttactttgaacattgtttcaaatgttaatttaaatgagggagtgaggctactgataattagaacagcattaatatggggcaagatctgggtttgtgctttgtgctcattattgtctcaagaatttcaggaggtgaaatcattcttcttttcacaaataatgaaattcagagtgtaaaatggcccagggtctaatggctaatgtggctaccccaggatactgtctgactctaaaatgtgaacacatgaagactaggccatgctgcctcaccatttctacagttttatttcactaatatgacatgagagtgatggaaattgttggctgtgaaattcctatcaaggggttattaggtcatgaaagccctggaggataataacagtggctcatagataaaatagatggaattaagatagttaggaggatgaggagtggcagagaactgttaaaattagtacaattattttccatgggccagttatatattttgaagaatttaatagcgttgaatcatagggaaatatgaaggtctctgaaaacaagcccacaataaggagatagtgacttccatgacagatgagaacatttgaaaaatgatttgcagatacaggaaa

SEQ ID NO: 35395 - DNA, 984 bp, Bovine  19866881170894
  misc_feature (1)..(1): n is a, c, g, or t
ncaagatttttcagcagtctagggctcttcctacaaagtcttccctcctgtgtcatcttttagcactgcaggaccaaaagcacaccttgcctactttctcctttgccctcttttatccacacagacctttcccacataaatctcttcacttccaaatcctgttttggcatctctgcttctgggatgacctgaactgaccccaaggggttgccctgagggctgaggatttaaagttaacaagacaaagcttcaatctccaaagatactttaattcctcagtttctgatgaaatgtaagggcatacatcttgattctactttagtctctaaggacagaatggtctccatttgcttctctttatttttcaacgcgttgctttgatatcagcacacctgaggattcctaggatggtttggctcctctctcaatttaactttgcactgattcccttatacctctgccaagatctgtacctttatgaacaatcccatcatttatggctctgcagagctaccccttggcactgtggcagaaagtgagtcatcagacacccatgaagtccaagatgattctgagataatgcaggaaagattagctatcacacacctttcccttcattctgtgttcaattctggctctctgcccctagctgacaaaatgtgcctgtaaccatcctcattctgaattgcattctgagaggagaatgcctcgacacccacctgcctctcatcaaaatcctaacactgatttgaagtgcatgagtcattttattcatatcttgggttctgtttgggaaaatgctgatcctagaaaacagggaagtctcatttcctctccccccttcattttccacaatgcattatagcctataaagcacttctagcccacccttcacaaggtgatagctttacaacatttctcagtcacctgatacctgccagggttggtggcattgccaccgatctggtgtacccaggcacaggc

SEQ ID NO: 35396 - DNA, 1257 bp, Bovine  19866881224214
  misc_feature (1)..(1): n is a, c, g, or t
nccctgtgggtaaaagctgaatggggatgcagataaaacaacaatggtggaagggttgaagactagaggaaaagctacatattcccattgggaggtagggaatattttaaagatttcagccatgtgatgctgttcattatccagatcactttagagaagtttgaagactgcatcaatctaaatttaagctttcttaaaaattgatttattcattcaataaatatttattggatgcatacaatgtgccaagcattctggaggatacaaaatgaataatccagtcttttctctcaaagagtttatgattgtatagaggatgatgatatatatatgcaaaaaaactgtattattttatttaggactctttcagttgcaaatgacagaatccaaaaacaaagtcacttacacagaaaaggaatttattggttcaggtaactaaaagtttttgactagctctttaggcacagctgaattcagggactcatttgatataaagttgctcttattctcatcctcctcccctccccactacttcaatttctttgaatttggactctttggacaattcactggatgtcatactgtgacaacgggaaaatggtcaagggagtagaggctatggggagattcagagcagactgaaaaggagtgagaaagtaagagatgttaaagtgattgtgagacttgatggaaaatgagtctgatgcagtgttgctaggcaactgaagtggagaaggaacggaggtcatgggagttgaagggactgtggcacaagaggtcaaggttgtgggtgagtcttgaatttgcaactgtaaactatgaaatcatacagacagacccaaccctcagggtaagtagttaagtagtggggagcctggtagtgaggtgagagagggggtaccatccatgggggtgagtgacctctggggctgtgtgttctgtccatcaccatttgtaaacagtgctaacagtactatctgggtcagccctggccagagacaggtaaacaggttcttagacaggaggtgtggaaagggtgatcagaccttgcctggtgcactgagaggctgtggacagagtgggtggctgtataggtaccttgttttgtgttttgagcctttaattccttaaaataactggcatatcttctaccccacagtcctaaaaccagcccttgctaggtgccccaaaactggggaaaatttctctaatcgtgacttcctaagaaaagttttcccctgctttaatatttacatt

SEQ ID NO: 35397 - DNA, 1081 bp, Bovine  19866881225361
  misc_feature (1)..(1): n is a, c, g, or t
ncaattcattaattagggttctgtctggagttctcctgtgaaggataataatttgttagcttaactaagatcttcttccttcctgagaaatgtcattctgagaaaatattgattgagagtggacccctgctagttaatgtatatacaatttatacatacttgaggatattcaaatgcattatctcttttttgatagctagtaatgattttaataaactaaacccacttcattttaaatagacaaatgttttcagctgacagtaaaggcataattcacaaatatgctaataattatttctgagttaggagattttaatcctaacttaaatgggaacctacatatttactttatattgttttatttaactgatccaaagcaagtgccttttttcatgcagtctcctcagtatgaaacgctatcctgtttcttcaaattgaaataatgattcaaaacagtcataagttctgtcctctcatgtcctctctgaaagttcttacagctatgtatcttgaccacctttagtcatgaattagtaagtagaaaacctgtcatattatccctgccatatctgattttgctgttgcttttctttttttaatatataattttatttatttatttttggctgtgctggatcttcattgctatgtaggcttttctctagtttcggtgagtagggggatactctctagttgagtgtgggcttctcagtgtggtgtcttctcttgttgcagagcacaggctctagggtgctcgggtttcagtagctgcagcatatgggctcagtagttgtggctcctgagctctagagcacaggctcagtaactgtggtgcgctgggcttagtttttctgaaacatgtggtatctcctgaatcagggattagacctgtgtctactgtgttggcaggtggattctttaccacttgagcaactaaggaagccctatcgttgctttgtaatggatggccgaacatggcttagtgtttggaaccttaaggtaggaccattaagcaatcttccaggctgcctcaacccttcagccttgagtgggtattatactatttttttaatttatgtat

SEQ ID NO: 35398 - DNA, 2438 bp, Bovine  19866881261507
  misc_feature (1)..(1): n is a, c, g, or t
nttgaaaagccccctagcatatctcctgaggaaaacagtcaccaaaatgaaagacagtgggaaaatcccattcctctaaacatttaatatcagtttcaataaccactctgaattccttaaaataattctctttcacttgggtaattttctgttaccttaacccaacataacaggtactctcaaaacacacatgtacatttctacttggtatcacatggactctggaaccagtctgcttaggtttgacttctagatctatataaggtctgtgatcctgaaaaagtcagtttatacttctatgcctcagtttctttatctctaaaatcaacataaaaatactgacctcaaaccattaatataggcttaaatcaagtaatatatgtaaaatgctgagaacattcagttcagttcagtcactcagttgtctgactctttgcgaccccatgaattgcagcatgccaggcctccctgtccatcaccaactcccagacattatctgacccatattaactgctatgcaaacattctcttaatgaagacataaattcctacactaactttcttactagactgcatgactactcaatttcaacatagttggccaagattaggtcaatatcacccaggaaaaatatccttagttataaataccagggaaacagaaagagtaatggaaacatacaaaatagagaagcacagaggcgatatatgtgtctgcagaaaaattagaaccaagggttccctacgtgaatgattagtcatttcatgtctacaaatgattccattatctcagaaagtaaagcacttggtagacattctgacacatggtaaacattcattaagtgtttgtttaagtactagttagctaaaaaatgaaatagttgtttgactataaacaagttacttgacacatctaggtttttgttcccttaagtataaagtgaagaaatttaatgtaatttcattaatcaatgaaatcatttgagaatttggaatcattttggaatcatttgagaatttgacaaaatctgatatctcaatcatatgcctagagtctctgatttaattcatctttggaatggctgaaaaatcagaatttttgaaagctctccaacgattctaatttatgaccagggttgagaaccacgaaagtaaccaggcgcagatcctggttacctttgtatacaaacacacagtaattatcagacatttcatatccaatccaaatatttaaactgatgtggagatctaaattctgtgggcccacagattaaacttctgtgagcccactgtgaagggcttcttttattcacttaggattaagaagatgaatgtgttcagttttaagacagaaatatacaaccctctgtacatcgctcaccctttcccttctgcacattctcaataattatcctctgctcatcagattaaggttattcattaaacaatgaggaaaagttaagagacaatgaaaaaagagaccacatagaagagagaagtagagtgagaacaagtatctccattaaatcattttaaacaaacccacataaaataactacacaaataaacaaaaaaaacagtctcttaacctcaggtcctagtgtctaatttcctggaccatcagggtctcaaagacaggagtggcttttcttagggtcagaccttttcatgcatagatacagcaaaaagtcccgaaagggtagggaggagagaactgagataggaccatgagaaattgttattctgggggccagaggggtttgctgtccctcctcttgggttttcccatgcctggagggttacaactgggccaaatgatagtactggactttctcctgtacacccagaagtcacaccctgagctctgatctccttttacctgcacaggttctgggctgtcatttcattaaaaggatggttttcacctcaagtctttgttcctggtagagagttagacctaaaatgcctcaaagtcttgaaagaactaataaatcatatttaatatgtagaaaagaatctgttttgattaacaatatgttatatcataatcaaatacagttataactgaagggcaatttgttctctggggtatcacttctttgagttaaagaaaatactcctgtttgttctaaaccaccttcaaatttactttgatttgcaaattcagtgtactttgtgtaaacaaacactgccagtgaattaacaatactgtatgaccctttctttcattatacaaacattttttcatgctcagggtattttgtctcccttttatacattttacctcagatcttagtaggtaaccttgagccttaataagttttactttatatcaaactcccttgtttctctttgatattttcctcaactatatataatctctattaaatgaggaaagtagagggtgcctgatgagggcattcgttcacaaaggaaaa

SEQ ID NO: 35399 - DNA, 1663 bp, Bovine  19866881313486
  misc_feature (1)..(1): n is a, c, g, or t
nttcttcccctactcccaaacctgtaccagtgatctttaaagaaaaagtgtaatttgattcaaatgcattaaccttctgaaagttctctagggcagaggagctgaggctgtaacagaggtataggaaagataaggtgcaggataccttttgtggataaggtggtgatgaataagtgtagcattctgggggaaaaaaagagatatgaattgttataaacatataatgaaagataagagagtaacagtctgggttttatggctctgatgtttcactatatactgagcctccaacaagtgctaaattacagttacaagccacgatagttattcagagagctgatacgattatttaaataaaaagtgattatttaaactttcaacattaaatcagtatgcaccattcacatattttttccaacatttgcttggcattctaaaagtacaagtcaacttaattatggacccatgtaagtaaaggaagaaacaaagcaacaaaggagtcaaagtcattgaggaaacagcagcttctgatagtttgcatcattattattatggcatgttattcatcgtttattgtgcatcaggttggcctactctgaattgcaaattaaattttcaaaactgaaggacatgtacttgggagcagagggtttttaatgtaaaataatattgctgtcatcctaaaaatcacttgtccctaaaggaaacaaaagtaaaatctctctaagaaataattaattgtactgcttagcagacttaaatgaacatgctatgttagcttgtgtataccctaagcagtgattacactcctgccctctttgcatgccagaaccttaactgcaattgtcatttagggtccccctggttcagtcattaataattgtattacaataatacttggtagaaaccctcaatttagggacttaaaaagactaaatgcaccgtatggattgaagtttcagtatagcttgttatactattaaagagtaatataatacaataagcaatatataatatgaaatgggtttctgatattctaatttcttgctcagtctgaaatagctacagtgcattgtatcttggtttcccttgtcttttcatcatgttggttctattcattttttccctgtctcctacattgtgcccagggtggttgctagttttagtcaggatccttgttattaattacagagaaacctaagccttggcttcagcaattgagttcagcagagttctgatctcttaaaaaaaaaaaaaatccttaccagctattgatgaagagggtattattgtgccttccactgattagagattaggggtgatttctttttctttttgtgaaacagaaattctgtggctgttttagaacattttctgttgttgtgtgtatgtatgcagctgctaccctgcatactttattcaacatcgcttcttcttcatctgccttcacactcttccccatgcttggcccacgagagagatggtgtgggatttacccaccttggaacttatccactttgcttattacaagcagagtcaattcccaactgagtacggactaaacaggatttgtcacgagcagaggtattgtataatatttgaggaacaacatggaaagagttgcttaatctgtccctacaaggatctgttttcacacccgcaa

SEQ ID NO: 35400 - DNA, 2025 bp, Bovine  19866881322428
  misc_feature (1)..(1): n is a, c, g, or t
ntcagagcagtcagggtatctgacattcttagcagctgtgattttttccttaagggtttaaggggtttgtataatatttgtacaaagcaatattatcattatcataaatgttttctaattatttcttgggattaatggaagcatgttgtattattgatggattaagtacaatatttataaaacagtaataggattaaagagaaataaatatgtatatctttttgcatgtgtaaataataaatattaatacccatcatcaattttgtgcaaagtggtttagtacatattaataactactaaatagttcagttatctgttgcggatttgaggtatggatagatgtttatctgcaagctgaaggacttgggtaaagtccttgaagactgcaggaagggcaacgatctggaaaatggaccccaaaaataatgcaaaggtgtaagagttgcagaaaataaacaaaatgtacccaagaagctttcaagaggaaggacactgataaacttctatcaaaaacaaaaaaaagtttatcaaggaaaaaagtcataaatccatgtagcaaatattcacatttatacagttgttggtttaaatacacatgtattatttataacatagtggctctttaacaccattcctttgatttttgacttgtgtattcatgatttttctctgtcccatttggctgtgtaagccccctgcagacaacaataaagcatctatgtgacaaactgtaaagcaaccaaaattggaagacagaagacatagcttggaatttatactgcaatttactgccagagagatgttagaagacagtaatggtttgcatcaccagctcattctcttgccatcattttcaataactaggtcaatccttaactgcaaccaaggacttggtttgatataaatgtaaagcaatttctcttccagaactgaaaagtataatacattttaaggccaagatatgaaccattcaaaaaacatatgtttgctgatgaggttttaaagaaattataccagtgaactgatggaagtcacttaagtaaatagaatcataagagactacagaagtgatgatacacttctgaatcacaatgctacctttgataggtatagtaagttgtttttcctttggattaatttattctaaggtaagagacaatggttcagaaactgaaaaacaggaaagctctcgtctattctagtatataaaaaaatacaactgagcaacaactttctgaatttctcattttactagactgatcaatttaatatctgttttaaataagcctgtctataatacactattcttttttcctatgggcaaagttattgccagtaactctcatggctcattatccagtcctaaaagatttgttaagaatggaatagcatcaggtaaggagaaatcatttacaaaattatagtcttagtctcagtatctaggttgatttttaccagaaaatgatccagacagtgtggacttttcagaagttttccagcatgacaggtggctatgcaatgacatgcacagatgtctgtgaatacaggaggcatctccaggtcaacccagaagtctgaactttcactccaggcatcccctaaggtgaaagaaaccttttcaaactttcacctgttccaaaggatccagaatacccatgaccctgagtgactaaagcatctgttcttactgcattgcatcagcagtaacttcattatattgccagaacaatatgaaaataaatatttattcttaatgtaaatgaatttgcaaaaacctgtccaaggaagtaatgactatgtagtatattccttgaattatttatgctttctgctgtttcttgaaagcagggttagcatcatatttctgtaagcaattttaagtgttatatatatgtccaacctaattcagtccacaaaagttattcctaactagcttatttgtgttccatggtctttcaacctgagaataaaggcactatctaagcacctaagattcccggttaactggtgcccaggcaacaggag

SEQ ID NO: 35401 - DNA, 896 bp, Bovine  19866881329533
  misc_feature (1)..(1): n is a, c, g, or t
natcccaattttaaaagagtatgccatggatggtgatgttgctaatttaatccaatgtgctgtctgaccctcagtataaagtttatagtttttatgattggattaaaacaaataagtagtagagggtagtgggctcaattaatatgtttttgtcttgctgttatgaagattaaaggagtcaatacatgaaagccttttgagcagttcctggcacatgttatgaccacaataattgtttgtacagggactattttaggatcaagtgcttgagtagagaaaacatggtgatgatacttagaactaggttgcaaatgagtcagaactgtttaaggggcctctgggatttttttctgctctttttaggatttctcctcagcttagatcagttcctcaaactccaggaagaattacatttacataaaacacccaaatggccaaaggcatcttctgagacaccaggaattcagagacattttctacctgaactacagttctgctcatttagcaaagtataattgcagaaaattatccgagacttctatagctacagtacccacttctgcaaaaccttgaggttataccacagtttttaagcaaagaacacaaaagtgcccttaagatgatcctggctagtctcctctttattaaattagtcagttaatagaaccaaattactattttctgcagtgattataacccctgaaattcattatgatttgtcctttatcctggatcttttgggtttccacaaatcaaaacagatattatatttataatcaaacaaatttcttttcttctcctctgaaaatgaagagggaagaaaaattcataatcactaaaattcacaccatcatttagatacattacatacattagatcacttacattaacagatt

SEQ ID NO: 35402 - DNA, 1573 bp, Bovine  19866881384123
  misc_feature (1)..(1): n is a, c, g, or t
ngagatgacatacaaggagataataatccccccaataattttgagaggagcaagaccaaagaccaggaaggtcaggtaaaagaccttcacaacatcctcaggaagaggagagctgttccctagtttgtgaacaaagaatttaaatttgaaaggtggatgccagagactagaacataatgctttaattttttccattagattcctgacaatgctctctaggtaagtgatgacctagacaatggaattaatgaaaatgatgctcaaggtctcacaacttacaatgttttccaaaaaaaaaaaagatgtttaccttaaagtaatagacattggatttgatgtcaaatgagatgaattaacaagtcaaaatgtgctcccccttgcagtttatgaagcattgtcagtgcacattattacttttaagttacacttagacagttttgatttctcctcagtaattatcagttctctctgaacttaatctaaccctcatattccttcctaggactaaattacaatttacttttctctttctgtaaaagccaggagccccggacgatgccattgacagtgggacatctaagctagttccgattttgcttggaaaatccccaccagctgctctgcctgatgctgagttaattgccttcattagctttcttacaatacccttcttaatcagtccttgtgaagagatctgaaactcacatcgtggttcctttctgacctttaaaaaaaaaaatccattcattctttttgcacaatggctcttgaagtctaaaatgcaagatataaaagtaaggggaaaaacactatttttttctgtattcctccccaaactgtgacccttaacttctaatcaagataggttattctgacttcctaaattaccaacagctagagcttactttctctttcttttcccatggctcccttagccttcttttctaatgaatgcttaattaacatcaatacatatcctttctgatgaagcttgcagttttcacagtttgcaacctgctgcaatcttcctcataaagaggctaaaagctaaaagtttttagttataaaactttaaaacttgtaggctggtgaaagcataaagacaatgttatttcagtttattttgtagtatttcatgtagatcaaaatcttgttggtatctggcaaggccatctctctcattcccttacaacctgtgacattaacctgtcattcatgaaaagtgattaaattggttcagaagacttgattttcataaacctgtcatctttggtattgaccactaatgctttttttgttctgtgagatttatgtaagttgatttttaaaaaaggtttatgcattcatgattgttctgggtcttgttgctgtgccggcttttctctagttgtggcaatcagagactactccctggttggaggtgtcttctcttggtgtgaagcaaggacagagcacatgggcttccgcagttgcgtctcctgggctctagagcagaggctcagctgtggcacatgacaggcttagttgctccagggcatgtggaatcttcccagatcaaggatggaacctgtgt

SEQ ID NO: 35403 - DNA, 845 bp, Bovine  19866881399092
  misc_feature (1)..(1): n is a, c, g, or t
ntttttatgttgggaaaagtaaaggcagaacatatcccaaagcagccccatgacagctcagaggtgatgagaacaaagatttcacattttccaacagagtaaaactcttttgagctcctgagttgcagttgctcagctctcttaaccaaagagagtgtcccctcagtcctgtcgcctctcctctgtcctctttgttgtgattctcatttaatcaattcaggttattccagtgaggatgctaaatttaaagtcctgggttggcgtctcatttatccataagccaggtagtgctaccagggcccaggctgtgggctccattcccccaggtgcttgggctccgacccacagaggctgagctattaatgagcaggactcagtctccctgcctcactcagcccttgtcttctctgctgatattgccaacaagagaagcaattagggccaatctggtggtggttggctgcattttaaaatagaaaccatctcaaaatccatctacgagcttggcttacttttagcttccttacagactgcagagccattcggtgacaatgctgagaattacccagattatccatggaagcctgtaatagtccaattaccaacacttgtttgcagtcttattgtgaacttcctctgaagtcaggaaaggatacgccacagtaggaatgctacgtgtcgggggagaagcagggagagagaaagctgttttgagggtgaaattgttttcatcagcgactcaagactgcagcagattcggggactaccagaggctctgatgtgttttaataaccttaaccattgtggggaaaggcttttccataggctgggaatcgcccaccaac

SEQ ID NO: 35404 - DNA, 2428 bp, Bovine  19866881561343
  misc_feature (1)..(1): n is a, c, g, or t
ngtgatgagaaacgtcacctccatgattatgtcacattatcgaagacctcatttgctgacactgatgccagagactcctccggagtgtgatgaagtaagcagtcatgccgggaatgcccacatagaaaggaactgcaggcagccttcgggaaatgagggcagcctctagtcgttagtcagcaaaaagttggggttctcaactacacaggttgtaaagaaatgaattctgccaagaacctaaaaaagctgaaatgtggtagattctttcagagttgagcctccagagagagcacaattcatgtggcaaagtgactgtagtcttgtgagatgaagaacagggatcctaaccaaaatgcccaattttctgacccacagaaaccataagatcataaataacgtgttgttctaagcttctacatctgtggtgattcattatattactaaagatagctaatataattaagtatagcaaaatgttaggcaacaggaagaacatacttcttacataaagaacatactgcctaagacatttgaatagatatgtaaacagagctggcaaaacttaaattctcttaaagcgttcacagaacttcaaggtggaaaagatgcatcttagacatgatcaggtctaacccctcttcatatcacgttgcaagtaaaacgaccaagctccaaaatggctatataacaggctggaaggcatgggaccagctaattgcagagctggaacttgaaatcaagtcttctgacttaatatttcctatcacgacactgatgccaaagctgtgatttcccatttcagtaagaatttgttgatttctgagttagtattatttaaatcaaagagcaaggatcaatgctgactagatcttaaacgatcatctgacttattgattatgcaacttcatctccagttcacttaccatcattctgatatggcttgcttttaaggtaacactgggttgctgtggtatctagcaagccccaactgtagaagaaacagtaaaaatctcccaaatgcagagcaatcaaggctctgtcagagagtataaaagcactgagatgaagggtaaaaggttcagttaatccatgaaaatgtcaccatctacttggaatctcagcctgaaggttaagtgtcacagactattgtcagatggtgccagcagccagaatggctaaattgactcgggtgatgagtgtggtaacagatgctataatcaggctgcctgtatgctcaatcagatgatgtgaccatattaaaatcagaacataattcaaaacagcatattttgtcccaatttttatagcgttttgttaatcagattctccctatcacaaattaaaaagtccaatgtctctccatttctcctccaccaacatctccccagatgaaggtgttccggagatcaaaagtacaacattgtgactagttaatgctgtattgtatatgagaaatttgctaaaagagaaaggtaagtatgtgaggtggtacatatgtaaagtagcttgattatggtgattatttcactatgtgtgtctgtatatatgtgtgtgtatatatatatatatatatatatatataaaagcattaagttgcactcattaaacacatacatttttttaattgtcaactataccttaacaaagctgggtaaaatgtttaagagagattatgtccagactatattaaaaggtttaagagatattatatccagactatatctgtaaatttttacatggaacatattctaaaaatataactgaatatacattctgacagtgggacagagttttggaaatcaggattattctgaacattattgtcatgtatcttttttcttactcttgtatctgttcccttcactagtttagatcacacctattttacttactatctgggtaatttaagagttattttaccaccctaactttgaacctcttcatgaataccttgcatgctagaagatgctctttggtataaacagaattcatatatatgtaaaatatttagtagagtactgattatataaattgttgcctttatcttttcttctaattttccccatggaaagcacctttctatttctctgtagtcttctggacctttgaacagaatagcatagcaatcccaaacgtattaaggtatatttacattttttgaatcgagaagcatgtgttattacagggaagcttcaagttagctatgtcttaaaggtttacatggtgcctctgtggacagcgcggagtcaagcatggacctaccaagcctgttttgtccaagcatggtgaaggacaaagatccattcccagctataagacagccaaccttttagcaaatgaaggggaaaattgaatttaagtcagaaaggggaaacaaatcctcctgtccagtaaatttcttaatcaacaaagggtttctcgagactca

SEQ ID NO: 35405 - DNA, 1176 bp, Bovine  19866881817253
  misc_feature (1)..(1): n is a, c, g, or t
natatatgagatttaaccatatgatgtaactataatttttaagggtcaaaatctttagaatatcagaaactatagtaacaaaacatttgataaagaataaaatatgtgactacttatacatcaggctgcgatttcactaataaagaactggtttatcagtgtatatagttagggagtaatttcagtgacaaatggtgcacacagattaaagtctttattagaaacctggaaaaacaataaacaaccttgatggcacatttatttgaaggacactgaccgagaaggtattgcaaacacattgaagcttgagaaagcaaaaattatttagggtcctagaccaaatagactaagatattttaaaaaacaagccaatgcatttgagaaacattttactctttggtctgtgagcaacagggagatgaatgcctgttctaacaaaaaggcaaaataaatagtatttataaatgtcctaatatcagtgttcagtaggcaatggggtaggcccccaggtcacttttaggtggttcatgtgtgactctttgcgaccacatggactacagcacatcaggctttccctgtccttcaccagctcctggagctactcaaacacatgtccatcgagtcggtgatgccatccaatcatctcatcctctgtcatccccttctcctcctgccttctatctttcccagcatcagggtcctttccaatgagtcaatactttgcatcaggtggcctaagtattggagcttcagcttcagcattagtccttctaatgcatattcaggactgatttcctttaggatggactggttggatctccccgcagttcaagggactctcaagagtcttccccaacaccacagcatcaattcttcagctctcaattttttgctttcacaagcatcaattcttcagcactcaattttttgctttcattcattcaatgaaaattcattatgtacctaatttgtacatttttgtttcatttaatccttaaagaaacaaaggcaaattaaccaaactaagaacctgagaaatgtgtgctgatattacagatcaggaaagtgagtcccacagtgaagagaagtgtacaactccacatgcctgtggaaggacagagcctttctttcataattactttccactgagtcatgtcccaaatggagttctctgat

SEQ ID NO: 35406 - DNA, 812 bp, Bovine  19866881936533
  misc_feature (1)..(1): n is a, c, g, or t
naaaaagaaaaaacaggaaatgtgttaggaaacattttgtgttctatctatgaccctctctatttgcccctgtgtctgtctgctctgagtgtgtgggtgtatttgtatctctctctgttcatctttggctctttttctccatttctcctgaaggtctcctttcccaaccccttcttccccacagtgaaactaaagtggtagatttacactggattccacattcactgctggaaataccaccttgagcctggcttggaatatgtctgttctggaaggctcgctcttacaggtgtattagacccacacagcccctctgtgacctgacgttctggcccccatgattccctgaggtatctcatgtctagctgctgagcttagtgttccagacggttacattccccagaacaggccaaggacacgggcattgatttccaatcgttacatgccagtgcagtcacctctctctgtcatcctgtgtcctagtctgtctcagggccagaaagaaaaaagaaaaaagttttggacttgacagtgaggggaaaaaaaaaaataaagagattttttttaaccccctagaagggaaaatacattatgtagaattatatcacatcaaggaaaacatgattaaaatagcctggtatgaatattcatctgtgacttgacagaagggagggagcacagggagtgatggcagcacactgctaacagagatctcgtttagagaccaggttctaaaagaatgtgtgatgagatttgctggcctgaactatggaagtcttttttttctttttgcttgtttccttttttttttt

SEQ ID NO: 35407 - DNA, 2713 bp, Bovine  19866880245012
  misc_feature (1)..(1): n is a, c, g, or t
nacttgccattctctgaacatcccccacatcctcccgctcccaagtcattgttcctgctgttttattttgttttctaatcacaggttgaagcaaagcaaagtgaagtcgctcagttgtatccgactctttgtgaccccgtggactgtagcctaccatgctcctccatccatgggattttccaggcaagagtactggagtgggttgccatttccttctctagaggatcttccctacccagggattgaacctgggtcttccgcattgtaggcagacgctttaccttctgagccaccagggaagtccgttttatcttgttttctaatcacacattgaaccctatttattctataaggttcagtttagatgtttccacctcccattgataatattggaattgctatgactaaagtcactgagtcatgtctgtctcttttgtgaccccatggactgtagcctgccaggttcctctgtccatggaatctcccaggcaagaatactagagtgggttgccatttttttctccagggtattttcccaacccagggatcgaacctgcgtctcctgaactggcaggaggattctttaccactgagccaaaagggaagcacaatcttggaactggttgttaccttttccacacttagagttgtcgtcaacatcctgctttaggaaattttcatgctttgcattaaatttgttttgtgtctgcttccccaacagaccacaggcttcttgagatgatagaccatggaccttgtcttaattatatactttgtaactagtacagtgctccatctggagtaaggtctgaaatgaatatttaattcagttaaaatctggcactaggttattttgaaataatagctatcaagattttgtttgttattcatttttaggttttctatgtttttgtaagagcactaatgtgtatgaaatattacagctacacacacaccagccaaagtgagcatggtatgactatggcagataatcatcttgaaacagaattgcagattagtctgaaactgatcatgaagaaaatctggatatacggaatgaaataacattgcataaatgtgttgcataagtagcttattgtcttgcatttgcaaatttatgggtgtagcctcacatactatcttttgatcagcaaggaactacttcacataaatagattgagtccaaacattttagcacaacatatgtcatctaattaaactagtaatagtgctagaagagagctgcggtagtatcggcatgtaaagagattttcacaagtatggaagagaaatctaacctttcatattcatgtagtttactctgttttcacataaagaagccaaatgttattgtagcttatatttgcaacatttgtctctggagacactcttagtatttttctgttccacatatccaacttctgaacgtttttctaagtatgagctgtctcatatcacacatgctccctggctctttcacacactgaaaattcacaaaagctgtgtttctggccaaggtgaaaactttatccatgcttatacttgactccataccctccaaaggagacacaggcgggtgtaaacagttatgctgttgtccttttccttggggaaaatgaaaaagctaactctatactttaacataagcctgggtaacgtttaccctaacacctttcatattgttaccaaaccaaacttggatccttacttacttgccttagtgcagtaaagcctatctacggacaccaggttgtggtgaagaaaagtgcagcatttattgcagggtggccaagcaagttgttcaggacagctagtgctcaaaaaagccagaactccttcggcctccccctgcccccaggggtttcagcaaggcatttaaaaaggcaaggtgagggagggacatcccaaggtatgtgatcagcttgtgcacagttctctgattggttgatggtaacagggtgatgtcacatgggttaacattattgattcttaggcaccagtaggttgggggctacatgcttatgatcatcaagtaattaatttcttccatttgggggtgattttagcatctatacaacagctcaggaaatgtgcatcagctactgttatctaagtacttcagagaggatatgggggagaaatctgcctgggaaagcctcgtaaggttctacttagttacagtatcttatggtccagtgagtttaaaatttgcccaaaattacacaggtaggtccagaacacaagtcttctgacttccacccagtgaggtgtaattgttcagtcacagatttgtccatcatctattttgaagcacatattatgtggaggaaccatgctagttggagagagcaaatgatgctactctatcaacgtggcagggaaaataagacattcacatcgataattagttattccctgagaaaattaatgtcctgagaggtatgggaatataaaaaggagataatgctgtattagtttaacaaaataaaaattgattagataactcatttagatatttcaccagattaaccacaactgtggaaatctagctgtttgaaccacaaaagccatcacagtattactatgtacctaatgaaaaatgaaccaacttataaaataaataacttcctaagggctaaatttgcaaattcaagctataattagttacaagaaatgtcacagatatctatggtagtgtcatccttataaaagg

SEQ ID NO: 35408 - DNA, 1294 bp, Bovine  19866880417474
  misc_feature (1)..(1): n is a, c, g, or t
ntgaacatgtattacctttaaatgaaaataaaataaatttgaaacaatagagaattttaatattctggaatatgacagataaatattttaaattcaatatatactaaaagatttcataatctttcttacacagagtgtagttagaaagaagttgtggaaaaatactttattgcttcggatcccttcatgtttatatcaagatgacaattatcctgcaaatgttattgataataagtttaggaggccatggacaagaggtatattttatttgtattttttaaaaatttatttttaaaagtatttcagagtttagcataataaattattaagaaaattcactgttttctcattatataaaaatatattcatatcagacttccaagaagtttataaattaatatttttatgtgacaaagtatttaggtgacaaagttaatatttttacgtgacagagtttaggtgacagagtaaggaattggaaagcttatactagatattaataaaacaaaagatatgtaaatgatgaagtcttaaaatattctgacattctactatttgtattacagtaggatctttcccaactgtatgaaggctactctaagttgtaacgatacactgactataaaactattttttaaatgaatatgtactaagtatcatcttttgctttgaaaagtgtcaagtaagatgagaacagaattaaccattagcttaattaaatgtagatcgataacctcgatagaagtggtttccctggaatattatgtatgaaaacctgatcagagtattttgagaagagaatgcccagtgggatgtgagatggtggacatagtgagctcttttgaagatttttgctatgacagtacatagaaaaatggaggtgcactagctgaagggagaaatgagttaaagaggattttttttaagatgtgacattaaaaatatatatatgaatgataaggaaagagactatgaaatgtttgtttgccaaaggaaataatcttggtaaaaagagagaaaatgatgatgcaggaaagaaaaaagataactcagtaaaagagaatagaaccaagagcacaactggaggagttggtgttagaagccaggatggttcctctactgcgatagagaggaaggcaaagtttgtaggtacttatgccagttagcatattcaaaagcagagacattactttgccaacaaaagtccgtctagtcaaggctaggtttttccagtggtcatgtacggatgtgagagttggactgtgaagaaggctgagcgctgaagaattgatgc

SEQ ID NO: 35409 - DNA, 4000 bp, Bovine  19866880427176
  misc_feature (1)..(1): n is a, c, g, or t
ntcgtgtccactctgtgcgaccccatagacggcagcccaccaggctcccccgtccctgggattctccaggcaagaacactggagtgggttgccatttccttctccaatgcataagagtgaaaagtgaaagtgaagttgctcagtcgtgtccgactcttagtgaccccatggactgtagcccaccaggctcctccatccatgggattttccaggcaagagtactggagtggggtgccattgccttctccgagtcttctatgactaatttgcaaaccataaagaaatgttcaattttatttttaaaaattctacactatcaaaattatcatattttacctcattttatttgtaagcatggtgaattacgattacaataaagcttctagtatttgaaacattagactaacctggcgttcctttaattaatgcaactgagtcttgataagttagttggtttttttaggatttttgcatcatggtcatgagtacgatgatgtataatttagtatccttgtcagatggtggtattatgactatgttagcctcatatcaatcatattccattgttgttgttttttaattgctaagtcatatctgactcttgtgcaatgccatggactgtagccaccaggctcccctgtccatggggtctccccagacaagaatactggagggggttgccatttccttcttcaaaggatcttttcgacccagggattgaacccatgtctcctacactgcaggcagattctttaccgctgggccactaaggagcccatgtagcattagaaattaaagcgttatctcctatttacacttatgtgctcaatcatgttcagctgtacagactgcagcctgtcaggctcctttttccttggaattttccaggcaagaatactggtgttggttgccatttcctcctccaggggattttcctgaccagagatcaaacccacgtctcctgagtctcctgcattgcgggcacattctttaccacttgagccatcagggaagactaaaattaagtttatacagttaacactttaaacagacagcatttcatgtacatgaaggacataggattaactcaaaagacataaaaatgtatagagaaagttccacaaattccttaagagctatgaaattaaaactattttaaatagtgaattgaatttcatttaattaatgaaaactagtttaaatagagagatgtaccatgtcatggatttaaaaacttaaaattgtaaagatataaactcctccaagttgactgatagacttattgcaaactcaatcaaaatccagcaggtttcattgtgagagttaagaagaaataaagatctaagaatatccaaaatattcttgaaaaagttgggaggacttgtttgaccagatatcaagacttattataaatctatagtaatcaagatgagcttcctaggtggcactcatggtaaagaatcttcctgccaatgcagaagacacaggttcaatcactgatgcagggaagatcccgtatacctcagagcaactgagcccctgctgctgccgctgctgctgctaagtcgcttcagtcgtgtccgactctgtgtgaccccatagatggcagcccaccaggctcccctgtccctgggattccccaggcaagaacactggagtgggttgccatttccttctccaatgcataaaagtgaagagtgaaagtgaagtcgctcagtcgtgtcggactctttgtgaccccatggactgcagcctaccaggctcctccatccatgggaccttccaggcaagagtactggagtggggtgccatagccttctccgaactgagcccctaccccacaactattgagcctgagctctagagcctgggaactgcaactactgagcccacgcgtcacagctatggaagctccacgcccctactctgcaagcccatcctctgcaacaagagaagccatcacaatgtgaagtctgtgcagcacagctaaacagtagccactgctcaatgcaactagaaaaaaagcccacacagcaacaaagacctagcacagccataaataaataaataaaattagtttttaaaaaagaagatgagactctgaaatctaacaaacctagttctaaatccaactccatctatcagccttgtgaccctctgctggttaatcaactgttctaaaagtcagtagttctaaacttcacccacactttgaattcagctggagaactttaaaaaaaatacagacacccaggttccactttcagggtttctgatttaactggtccagatggacggtagcctgagtactgatagttgtaaaagttcccaggtgatgggctgagagctactgctgtaaggccagttaccctatctgtgaatcggtgatgataacgctaataataatagcttattggaaggttgttataaagagaaaaatacgacggtgcctgggattcaataactttaaactcttattaaactgctcactctattaggttttgaagtttgattgaaacgtatactgaagagtcacatagatgatatttttaagacataggatttgatggcaatctgtatgcaaaggaattaaagacgagaaccccagttggcatgctcagggtaggcaggtggggggaggggcaggggaggaggcactgggagcgggcagcagggcagagagaggacaggacgtagaaaaggaagcagaccagtcttttgacttcggttatctggacacaatctcatttactctctgttgtaattttccaagtttatacaagcaattcaaaatccagtgaaaggcttggctttatgttgactggccttactgtgggtggaatcttagcaatgctggtgtcttgtagatataatgttctctttgtttgaagattttgttttctaaccaaggaaatgattaattaagcatggattctcccatccccctctatgatattctgaacagctggtacttatttgggatatgataatgattttgcttggaatccatggtgataaagtatttgtttactatcatgagtgtattatattcatgttatatgattttctaaaccaatcaataatcttgcattagaaatttaccttcatgcaaacaagatttttgaaaatttacttcttaaactcagacatcaaaaaaaaagattctctaaatcatgtaatgagttaggtacccccaagtcctaaaaaaaatagtgtgaaatatctataattcataataacattaaattttctttaggtaaactgatctggccttttcagaaactacttttattgaaataggcattatatttatttctttaaaatgtcacttagcaaataaacactcaagtagaatgaccactaaaataatgtgaagaagagatgccttaaacaagggaggcccttgtgggggtggtgagaaccattaagggaatctgttgactggcttggctcccagctagattccatctagaccacctgtcaaatgccaagaaaaataagagcattctgcagaggccggtatctccagctctctcctctgaccacccctccctcctgaccccttgaccctccctgcaggagctgctttgagcaactgtgcccagcacctgggagagaactctgcggaggccagcaagtcagcattccaccaggagcaccgtggctagagctcaacaaattcagctgtgatccttccacgccctccatccaggcctgcaccaagcccctcctcttcactactgaacattaccctgaaataacccagtctctcttctcatccttccccagttgctccctactcttccctcttccatgcctcacatctgtaaggctctccactgtgccttgagaaactctcgtttctataaggaactaactccctttggtctacaaacaattccttgagcattccccccaaattattaacaaatgaaattattagctttctttccaaaccttatttcattagacaccaaccttagatcaccccctaaatcat

SEQ ID NO: 35410 - DNA, 2002 bp, Bovine  19866880578546
  misc_feature (1)..(1): n is a, c, g, or t
natgtaaattcttgctgttgttttcgtttagagctaaacatgaagtttccggagagacagtggtgtttcagggaggaagccttggcaaaaccccctgatgggtaagtgtgccaaatccacccatcattggagacgccttccgtccagtggagaggacactcaccaagttgatttccagctttgtgggaagtgttgtgtgttagcggaagaagacccttcaaagaaaaagcataggtttttagattcagtttcctggaaaccagactgagatggaactctgtgtgctggaattgattgaaggggaccccggggtcctcacctggggagtaagggggcaggacgcggccaggagccaagaaggagctgaactgctgcccacatttacgaggtcctgaccccatcaaggagcccaggactggactgggagggcgattcaaaaaagttcttatcactctagcttagaaaagacgtaaggaagacagaagttgtctttagacggctctgtcaggatccacagactttggtgcacagtgtactgaaggattatcgctgcctcagaggtgacgagggctccacccgcacgggcatcgtatgtaccttaggtcattcaccagctgttgctgagaactgaattaggcgacttcttagtttctcttcaccctggttctctgcctatgtggtaaagagataactcaatattggaaatttagtgaaaatgtaattttaaaatgtctagtaatattggtagtgtaatttttgttagactggaggtagagaaatacattactgtgtactttttggttcttgttttcaagccagggcctctctacttataaggagctctgttctctggcaagtgatcttagtcagccggatctggtgtataaatttatgaatctagccaaccatcatgcgatgtggaactcgaggaaggtaagtggctgttgcccaacagttttatttttttttcttcccttcaaatcaaacctgcctcactggcagatggtgacaattgataacacagtgtgttttgtacacgtctgtggtgagagagctccgtcccaccccagagctggtatagtgttgatactggacactcggtaaatcaggatgtcttcagggacaaggctaggaggggaacttgtgtggtatttaatgtgttaatattttattgcaataggtgtgtctgagccacttcaccttgctactgtctttttagggccctgcttttggtttcaatgtaattgctaccagagctggagaacagctggctcctttcctgcctcagctagttccgcgtctttatcgttaccagtttgatcccaaccttggcattcgacaggccatgacaagtatttggaacgcactggtcactgacaagtcaatggcaagtatctgtgaacgcttgtcccagattacaggcggggtgtaaacccaggcttaccttcctttctcctctgtatacctgtttgtttaaacaaatagactttctttcatctttttgctttcttcctcctttcaaggtaccaaagacgctcatgacaacatttactgaaacctcaaaaatagaagtaatgaaatgtctagtgggtggatggctaaggaactggcagtgtatccacaccagtggaagctgtgtcgatagcagtgatgcggtggagaacaggaggtggatgaggaagcaggcagttaccgtgtttggctgcttcttgtattctctcgcattgttagatactaggatttctcaggacttgcctctgagtacctttttctctctccattttctcctttgagatgagctctcaggtccagggcttgtaaatgtcaccttgattgtgatcgttcccagtcttaatcttctgacccaggcacgacttatgttcctgacttgtattgctatatctcactgcctgcttgacattgtcacttggatgtcatttcaagatatgttagacataacacattcagaacaggacttaagaaaaacggccttcccttggga

SEQ ID NO: 35411 - DNA, 1546 bp, Bovine  19866880630050
  misc_feature (1)..(1): n is a, c, g, or t
nattttaattattttgttatttttgtttaaaaaaggattgtggtaagatacacatacgtaacaaaatttaccatcttaaccatttttaagtgtacagttcagtggcattaggtactcaatccatcttattttgatgggtttcaaagtgaattggagacaacagtacacttcagtatttcagcactagcattgttttaagtgctttgtatatattgttttattcgtcaatataatcctaaggggtaggtaaagttattactgctgttttatggcatgtaaaacaggcattttagactcccaagatcccacagctagtaggtggtagttagagttggatcgcagatggctcaatggcattggtagccagcctttaggctgtacctcggtgtaccatagagcagcaggcctcctccttttgggcaccagggaccggttttgtggaagacagtttttccatggactggaggtggggagtggtttggggatgattctcataaagaaggagcaaactagatcccttgcatgcacagctcacagtaggatttgcacttctttgagaatcatatgctgatctgacagaaggcggagctcaggtggtaatgtgagtgatggggagtggctgtcaatacagatgaagcctgcttgcctgaagctcacctcctgctatgtggctggcttcctaataggaaactggaggctggggacccctgtcatagagtgttcatgctgatgaagagatgaagtcagatgcattcctaaattctcagctacatgttactttaatccagttatctgactgctttttaacactgctgtgggcgacaaaagaagtctgctgatggaattaaaatactattgagaagaaagaggaagactacatgtaaagagatatgtcaggaccaaactgtatgagttgttacagattatactagaaggcagtggcaacccactccagtactcttgcctggaaaatcccatggacagaggagcctggtaggctgcagtccatggggtcactaggagttggacacgactgagcgacttcacttacacgtttcactttcatgcactggagaaggaaatggcaacccactccagtgttcttgcctggagaatcccacggacaggggagcctggtgggctgccgtttatggggtcgcacagagtcggacacgactgaagcgacttagcagcaacttagcagcagcagagtaatattaacagttttggtcctcaggtgtgttattttgagatgtgtagctggtaacactgcctttctatagattttaaatctttgcgttttaccattgcacttggagtgatatgcatgttaaaaatttaaatggcatctggagctgtcagtcgtatctgctaccacactctaggagctcctgaggaggagaactgatgggtaggcttgtcttttactcttctctttctcttctcttttcttttcttcctctccctctctcttttttttccgagtagtgtcatgggagtggtatcatgtatgaaggttgccaaaaggtaagcaggataatcttgg

SEQ ID NO: 35412 - DNA, 1612 bp, Bovine  19866880657429
  misc_feature (1)..(1): n is a, c, g, or t
nactcttggcaatttgaagtgaataaatgatagttaactgatcttgcttatttgatgcttagtttaatttgcatttctttcattattagtgatgttgacattctctttgaaaattaatggttttcttctgtgaattatctgttcatgtcatttgcctttttcttttaagtcttttcatcctttaaaatgatctgtaaaacttcttgtgtgttataaatattagtactgacaacatttgggcctttgtttatctttcttttgtgtccaattatagctgaaaatttttatgtgataaaatttcatgattagaatggcattctcccctccaaaattgctagaatatttattcacttttccttatagtatgttatattttatcttctagaaatttaatttttattttggagcaaggactaaagtgtttatgcttcaaatgactagcaagttataataccatttattgaaatcttatttggatttttgttgggattttaatgactttatagattcacttaggggaaacttatttacaatatttctctccaagcacaaggtatatatctcttcatttatccatttttgtctcatggcctaaagttttcttcatataggatgagattgaataatagtgaagtagatcatacttccatgctgagggagagggacagtgagagaggaaatgttgaggactcaagagagaggaagggctgagagatgaagggcagcctctgaagaagagaagagatgatgtccgggtcaccttgagccagaggatgaacttctcatgcttagagaggagtgagtgaggacagggacagatgctggaccagttgagaattcctctctgatggcccatattgttttctcaaggagagaccagtggctattctgatggagagatgtggtaggctatttgatcaaggactatgaaactcagtgccctttgtggacactaaccatgcagcatacagactcccttgaaaggaaaggggtctcacgcgtctgaatgtgctttctgtttcagagttgtggaaagtaaaaattcagccttcccaacaggaactattgtgctggctccttctggctggacaacgcattccatttctaatggggaaaaactggaaaaggtgcttgcagagtggccagacacgttaccactgtctctggctctgggaacggttggcatgcccggggtgagtttcatgggtatatttcactcgtttgaatccctgacgttttggttttccaaaatggttggtccagagcttgaataacaagaagagacttgaggcattctaagctcaggagtggattagagaggatgatgggactaagaagggaagaagaggggctggaggggagagaggagggctcaggtacaaggaggaagtgccagtgaggaacagcatgcagcatggtccctctcaagcctccggcaagtggtgacacaaagaaaccagctccttcagtccctggaaaggtcttccttcacccctcactcatctgcctctgtttcagagcttaaaagggagagaaagttcaatgtaccttggcctttctgtatcacctctgattcctcaccatctttcgacatctagtttccagaggtgtc

SEQ ID NO: 35413 - DNA, 1116 bp, Bovine  19866880663545
  misc_feature (1)..(1): n is a, c, g, or t
nggttagtatggtccctggcacactgtaaggctaaataggagtggctactgttgttctattaatctttggtttatgaccatagtaatatgttaaacacatacttcaggttggtggtctttgtttctctgatcgatatttttccttcccttcatttatctacagtgcaaattgggtatagtgaaattcatagaagctgagcaggtgcctgagctcgaagctgttctccacctggtgattgcttctagtgacacacgccacagtgtagccaccgcagcagacctagagttgaaaagcaagcaaaggtgagttccttccccctctttaaactttagaaattgaaaagatgctagatttctaaaagcttgctcagcacatattcttttcagcttttgcgtaatgaggcattcaatttatgagattgtgaaatatacctaatttgtatgaaagacagtttgctgaggagcagaattctgtataaggcaaagaggaaaagctgtttggagaagcagtttaaaattggaatggataaggataattaccataagaactgagacctttgtttaggtaaatgaacttaaagaactaatgttaagaaaaatgtcgaaacccaaaagttactcatttttgattcttcctctaaaattctttgagatggcttttaataaaggatatgtaggtattatggttaatatgaaaatcaggtcccatgaaaagagatactgaataggtcttaatatacacaggagaaaataagtgtaataaatagactcatggaaaaaattgtatataagaaatcaaatcatgcacaataaaacaatagtatgccaactggtaaataaaattgtgtaacagctgattactccatttaagtttctgttgaaactgctgtgcttataccctgttaattgacactgtaaactgaaataattttggcaaagcagtttgtagtaggtaatgaaccataaaaatacttacttttttttatgtgaatcttctgggacttcatcctgagaatcattcaaaagaagagaaatatttagaaaaatgttacagattcattaattgtattatttcctataattgttaaaaaaggaaacataatcagatttctacag

SEQ ID NO: 35414 - DNA, 558 bp, Bovine  19866880668049
  misc_feature (1)..(1): n is a, c, g, or t
nggtgtgtattgcccatgcatacatatacacatacacagatgtacatgtacctatgtatgtagatgtgtgtatatttatgtgaacagtatgaaaagaggacacattaaacattaatatcgtgtatcagtaagtgatattttcacctctcttatttaaatccaaattgtttgacttcaataaatctttaaatcttggagttttaggaaagacagtatttatttgagaataaagtatacttttccctccaagaagtacatactacttctttgtaaaagtgataagaacaagagtagtcaatcaaattagaaattactgactgcttgctatatgtaaacattattttgtaccactgtttattcaagtagtttatgtaagaataatagactgtccacccaatcattcttaagttcattaggaaaaggaatttataaacatcatacttctaacataaacttctaattgtacacgtatatttttggttttgtcttggcaggtgtattttggaacctctcatccaaggtcctatatctctgccaatgtcactggtttcaaatgtg

SEQ ID NO: 35415 - DNA, 754 bp, Bovine  19866880726947
  misc_feature (1)..(1): n is a, c, g, or t
ntagtatcgtataccacaaccaaaaaagcacgactttatgtgctccaggagggtcatcatgggtttgttttatttgtgaaaagaggtattgagaaaggcatcatcatggtaattgggtattcctaattctgccaatttgacatgcactgtgatggaaaagccgttaattctgcttcattctgaggctgagcaagaatatggtgtcaggttcactcttgggtgacactggatagtcctgtgattgaagctctaaattcagattgtaattctctgatattatgagttcaacatccacgagtacctgagattttgtagcttcggtccaaaggtacattttgttgctgtctttcaatttaactactggattcctcttcgcccagtcatgctactgtttcttggtgtgtactttgctgctaatggtgtatgatgccttaattcatttaggtggaattttgagtgatgaaatgaatggaatattttgtaaaccaaagttcaactttagaataaacttgagtttatttttgctatttcacatatttttgttccataacagaaaagtggaaaattgaaaggttgggtaaagggtttaggagagaaatgaggacattatctgcgcctagattctttcttcgagcttttgggcctacatggatagatgtgttaatttacaatagactgaaggcaagcaggtcaaaccacaaatgctgggatttaaataatgacttaaataaaaagctttccagagtttacagat

SEQ ID NO: 35416 - DNA, 924 bp, Bovine  19866880796927
  misc_feature (1)..(1): n is a, c, g, or t
nacgcactattactgtacttttctctaagtctgaaattatttccaaatacaaggttttaaaaaatactgatcacaaaggctattctaatctagatgttgaaatcctaattagtttcaggttaatactttccagtttgggggcacatactgagtctactaaatagacgagttcagtagttggttccatgaatttagttcccagcacaaggcaggacaaaaatgaaaacccccttatccatgtcaaaaagtgaaagcgaaagccactcagtcatgtccgactctttgggaccccattgactgtacagtccatggcatctttccaggccaagaatactggagtggtagcctttcccttctccaggggatcttcccaacccaaggatcgaacccaggtctccggcattgcaggcggattctttactagctgagccacaggggaagcccaagaatactggagtggggagcctatcccttctccagcagatgctcctgacccaggaatccaaccggggtcatctgcactgcaggcggactctttaccatatcagtttaccactcacctaaagaatatgtgattgatttacaagtttcaaggagaatttcagccagagcctcaggatctgcatgttcttcttctaaaagcattaatctgtacaaatcagagagcaagatccaaatactagttatttcagaaacattctaaagcctttctggcacaaacaactcctatctgtatgtattactttatgatgtcattttagctttttgaaatttaacagaattccactgattatacataagatgctaaggggaaggggaaagtaaaataaatgactgaactatgaagcgaattacccctgaaaaaaggcattcatcgcctgtaggactcccagctgcactttccatgtgctgagtttcagccgt

SEQ ID NO: 35417 - DNA, 1360 bp, Bovine  19866880826555
  misc_feature (1)..(1): n is a, c, g, or t
ntattcaatctaactggctaaaatgaaacacagactgaagaagagattcttagattctgctaagaacttcatgcaacatgaagaagctatgactttcactacaaataactgcatttaggataaatatacctgcaaaatgaaattttacctttaaaatcagttacataatagttctcatgtatatgaaataggactgataaagttttcaattattaatactacatgacaaaggatgcaattttaaaaagcagacaaagggatcataaaaatgcctgccttccctctgtgtgttcaatacaactgacttgcaacaagagctacaacagagaagatgcaagcatttactgcagctatgagagtcactacataaagatttatagaaaaagtgttcaaaggaaactgagaacaatactcatgtctaggaataggagactagtttaaaacatattatgtgatttatgcattatttaatacagacatttaaaaagacattattttaaaacttgacattttgtttaaaaaaatgaagctcaaatagtatattatataaaaatgtaatgtgtaaaattacatttgtgtacacacacacacacgtatatagagctggtgaaaggtgaatgacaaactaaggtggtgggattccaagtaatttttaatttcttgttataatattctgtattatttgaatatttacactatcactaacactatcatttgaaaaaaagaaaaactgtttcatctgaaagaaaaaatgtaaaaaacaaaagggatgtttaaaaattagaggaaaacatctttcatccttgaaaccaaactcttcaaggctcaaccatgaaatggacaaaagacatacagaagcccttaggaattagcaaatcatgaccagtgtaagattaccatttaatgttaacactgattctccagcactgagagctttaacactcagagagacctaaatgcaaagcctcctcctaggagtgagactgtggtaaatctccaaactcagttcttcttacaaaatggaaccaataatttctatgccttgtcagttctgctgtgaggattaaatgagataatgtattcaaagtactcagtatagtgcctgtcacataggccacactttaaagagtagcttctgctagtatttacctttctttctttcttacatcacagtttaagaagaaaaaagatctataaaatatgaagatttaatctaatcacacagaacccttgctgaacaaatcattctataaatttgtgagcggcaagaatgcccacttcaattcttccctttcctgggaacactgtttgatcagtgatcacttacatgccagaaagaaaaggaccaaatcatttagac

SEQ ID NO: 35418 - DNA, 1480 bp, Bovine  19866880852254
  misc_feature (1)..(1): n is a, c, g, or t
ntttagctgtttctaataaaattttccttaaaattccaagtatttttttttctacagatgcatataataattctagcatgaactattgggcctgaatgaaaactgcacatgtttgttaataattttccattttcccctaattatgaaaggaattcatggtcatggtagagaaattgaaagttacagatatctataaagaacaaaatagaaagaatcactggatacttacatacttatgtctatctagttgagatcatacagaatgtagttttgtatattaatttttatgtgatattatatcctgagcttttgctgtcatcattacagatatttcaaagtatgaattcagtcagcttataatatcgtacagcagttttttccttcacagttttccataaaatcttagggattcatagagttgtcttggggccaccacagagcttgggaagtgaaagtgaaagttgctcagtcctgtccgactctttgctaccccatggactgtagcctaccacactcctccatccatgggattttccaggcaagagtgctggagtcggtggccattcccttctccagaggatcttcctgacccagggattgaacctgggttttcccgcatcgtaggcagacactttaccctctgagccaccagggaagtcctacttagaaaagtcttcttgccacatgcctacatgtcaaaatccaatacctctttaaaagtatagttgaaagtttctccttgatgaagactttttcacctacacatctagaattattttttttctgaatttatacaggattttatattatacaagaatttcctccacatgcaaaagctgacatttggggaagagaaaagttaccttttgttcagctatcccatacaataaagatctttagcatcaccagtccttgtccactcacctaaaacacctgcctgtcaccatggcaacccgttattcttatttccaaatgccctctaggaaggcctggcaggttgcctgcccttgggaaccattggcctaatcatccattatcagtcagcacttatgatctttgatctctactgggttataagtccctaaaggacaagggattaagtcctttgagtatcctaaagtgtgagtcacacacaacttcctctgcaatcaaaattcaaagctgaatgaattacaatatcccaatatggtaaagtagaaaaagcactggatttataggacaagaaagttacttgacctctttgattcaacatctgttaaatgggaacaaaatagggtaatatctgaatagaaccttccaccgcctaacagagactgcgtgcatggcacaagctagcttcctccagtttcttcttcctctccccttttcctttatgtcctttcacattgtataaacatgaatatcctttttcaccattaagatagggaagagaggcaaaggggtcactaaagtcccatttttatatcagccactggaccca

SEQ ID NO: 35419 - DNA, 1207 bp, Bovine  19866880923373
  misc_feature (1)..(1): n is a, c, g, or t
nggggcagtgactcttggttgtctgatcagtcccttttcagttgtttgaggcaatcacaaagaaaggagattaagctgtaacaagagacattcagtaaaaactacgagaatagttcacaaactcgctactgtagcagagtccattcctgatgtgatacctgcaatgttatcaaataacaatattcaggtcatcattgctgcaccattttccctgttccccccatttctcagccattcccaatatccaacttctacaagaggtcaactagaccaaactcccagagatgaggcaaggtctgctgtgtccactgctaccttcccagtgcacactgtgggtgtcaagtgagtggttgttatggaggaagccacttaccttgagcttagcgatctgccccacaatagagcccactgctcctgctgccgcactaaccagcactgtttctccacccttcactccacagatgtccaacaggccaaagtaggctgttaggctgagggaagaaaagcaagactatgtggataaatgtgtttctttcctctgtatctcatttatttataccctgaagaccttctcagcagcccaatgccatgggtccaggtaaaagacagaaaatataggaaatggatgttaccagctaccaatggtccacttcctccttccttacctctaggagaggaataaagatgatgggaactatggatggaacagtgaggtggctcaaaaagagcagtatcttgtccatccccatgagagagtcagttcctaggcaggttgatagggagtctaggggtccccaaagagaggggtctggaattctcaaggaggaaaaaaggacaaactttttttctttctccacattccttaggattatataccaataatgtatcctgcctaaggacagtctttggattcaaccttctgttattttaaaatgttaattatgggagtatacctggtctttacaaggatgtatcttgcctgaggacagtgttatcttaaaatgtaaattatgggagtaggtcggaggaggtctttacaacctccagacattctttggattatataacctcattgttaacactagcaagcgggtactctttctgcccccttctgatgcctatgtcagaagctttctctatctcctttatactttaataaaactttactacacaaaagctcgagcgatcaagcctcatctcggccccg

SEQ ID NO: 35420 - DNA, 1964 bp, Bovine  19866880941930
  misc_feature (1)..(1): n is a, c, g, or t
ncgcataacactgagcaccgtccgtagtgcctcttggtgtttcggtgcggtgacgtgtcccctctctcctactagattgggagctctttgaagtcaggagctgtttgcttcgcctcaggctcctggtgcccacatagtgcccgcattgtgatttgcttctagcctgctcattttttaggttgtcctgctgccagagatatttttctaaaatactgctttcgttgtgcttcttcggtaatctgcaccatgagcgtggcatgttgggctccccatcgtctatccctccctcagccacaggagagttgacgctgttcactttctctcctctcccatttgttctcctcctactcttctgatttggcagttttattttctggaccttccattacctctgtaatgtgtgtgctcggttgcgtatgactctttgtgaccccatggaccggagcctgccaggctcttcagtccttggaattttacaggcaggaatactggagcaggttgccatttcctctccaaggaatcttcccggcccagggatcaaacccacatctcttgtgtctcctgcagtttctttgtcatctgataacatcctgtgctgttgagcgtgttgtgttgttattttctcagcttgctccagtcggtagacagtcttacacctcctgttgttcctctgtctggtgtctgggatggtagtctgtacgatattagctgttcagtaattgattggtttacttcctgtgtactgtcagtcttgcggtaacttaagaaataaatgaaaatctccttttacagttgttaaatcaggaggcagccagaattggcaggtgatgatggctttggtaatttaacttggaagtccagatttaacttaggcacacaatgtacccaagccagtggtccctcatgttttccttcccagtgagaatttgcattgtttatatataaatattaaagtggtccttcaacaagtttttaaaaaattagatgaatttaggaatgaaatgaatatgatatatagtaatgtggaatagtttactgtgctgttaggctcctagtgtttaatttttactataatggatattttaatatcaaatctgggaatttgtcagcttagaattttagatttcagagggacttgaatcattatttatatcaaagttttcattttgtagatgagaaatgcttaattggtttaaatgtttaaccagtttaattggttcaaaatgaatttaccagaaatcttatttttaatctgtagaagctaaaaatgaaataggatgataaatcagtaaataagtatttgtgaagctgtacgctttgaacgtataatggaaaaagctggtcctcattatgatttttctcctttgggtccttttgaattttttcattttgggggcagtatatgcttctgtggtaagtggtttggaggtttcagtgggtgttgtgatggagagatacaagaagtttaaggagaattgaacagaaatgggaatgaatataaaattattctctgctttgggtataaaacaatagcttttttttcttttaatttccattacaatcaacaaaatatagtgggttcatagtgatttttagaataataatttatggattgagtgtgaacagaatacttatattcattattggtaactgttatggttcatttgtagtcaaattgagcagatatactccagtggttaatttgctgaggatgtggataccttttaaagatacctatctttaaaattctcctttatgatgaaattttaatttcaagtgtttattcttcaacaaaaattctgtgggaggaaagtatgtaattgaatgtattacatatacatgtgtttgtgtgtgtttttatagaggggttaaattcccatttcctttccagatatgtgttaaatgaatcccagagtcgccaaaattcatcttcagcacagggttcttcttcaaatagtgggggg

SEQ ID NO: 35421 - DNA, 969 bp, Bovine  19866881011464
  misc_feature (1)..(1): n is a, c, g, or t
ngatttgaaaaatacatggagatttgcttccatgaaaaaaaaaaaaaaagacttaaaacagtgcttgttgaaaaatagagaataaaaatgcatatttgtgaaggagtactgattttttttcttttggcattttttggttataaattcacattgctgatacagccaatatacaaaccacagttgtagcaaccagagcaagaaacaggatatgaccccctttataagatgctcataatattcccaaggagtcagggcaaaagtccattcatctgcattttattcagaatgttcctttcttttgcttgtcattttggaatgggcttaactgttgctaaaaagttacaggaacaacagagctagaaatcatctgtttcttcacaaaacaagttcatcccagctcagccacgtgatcttcccctgcagtgcccagccctctgacctgagtcttgctggaacagcatctctttggggaccgaaaaagaattcctgttctaagttcttcatgttatttctttcaagtttggtgcctgctgcaatactgagtcctcctaaaccagatactgaaaagtaaaactaaaagcccaaatccattcaacagagaactcactgtgcagatttgagataaaataagccacaaatatttggggcagtatcaggatatacattgcacaatttaaaaaaaagttggtcggggatgattggaatcttctcaccggcagaactggggtagttatgtgaccatttaaattgcttccaacattttattcacacaaatctcagaagattcttaatttcaaaaaatattttttgtattaatagaatcagctctgtttttttcccatcaacacttaatacagttatgtcaatttagaaatattttaggaatgatgtgctcttattaatttccactaaaaagcatttattaaaaacatgcatttgttgatgcagttattatacacaaccagtttt

SEQ ID NO: 35422 - DNA, 870 bp, Bovine  19866881049422
  misc_feature (1)..(1): n is a, c, g, or t
ntttattgaaactagaattgacaaatagaattgtatatgtttaaggcatatagcagaataatttgatgtatgtttaaatgcgctagactaggtcttgctccctcctgtgaagcccatcttaaagtaagtattttgagtaagtggggctggagttcttcctgagacagattggttggccaggctgtaataggtgataagcaagaggaaggaggattcagtttcttgattataagataactacctaggctatcaaccatacgtttttgttgaaatccttgaatacttcttttatactaacttgcctttctctcattgcatcagaattttactataatttatgttaagatgggctatcctcggctaccggtggagaaacagtgtgagctggcccctacgcttcttactgccatggaaggaaagcctcagccccagcaggacaggtatgctgtccccggttacctggttccccacctctgagagtcagtgctgccgttcaaaaacagatccacacatctggtttcacctggccaaatgcaaaggcttaattaagtcgaactctttcagccaacattgctgtgttacctcaacatgactgtttggttaattttgtaaattataaaatatcttgtgagcatatgggaaactgtgcagaacaattaacatttttttcaatctaaatgcattttcagtttggtcagttattttgaagcaactgattttcttgattgcaaaaattagagcttgtgattgcaaaaattagagttctaatatgcttttcatcaaacctttctgtcttggaggatataaagtttccagagcagttttcttaagaaactgattacgcgtttgtattcacgtgggaattgacga

SEQ ID NO: 35423 - DNA, 1519 bp, Bovine  19866881087663
  misc_feature (1)..(1): n is a, c, g, or t
nctaccaaaactacactcccatatacatttttaaccatgtttctaaaccctactgttcattctaggtccttcctcaaattttagccttgtattttaaaccactcaattgtcattctataataagcacactgctataaaacttcttctcttggtggtctagatgttaagtttagccttccaccctgagatttcaagcccactgatgcccacttgaggtccctaccatggatattctcaagtcatctgcccatctcagtcaatcagtgcctgtatatgcccttaacagaaattatcagcatcctatcccggtgtattcagtgtaggaagagctgtattttaggtactgtcacaaaggaatgagtggaaacaaaagaagctaacattttatcaacccctaaactaacccacttgtgatctgagttcatatgtaagttgtagttcattttagttaagcccatcttcatggtaactggttaattttttgctaaagtgatttatatccatttcctcttataaaatcatctgcccctcccataagtccttttaggcaattttaatccccaatgttttctcttgggacctatttccttcggctttcatactttctggtatactgaaatagtaagtaaagcttccaaaagtgactaacttcagatgttacacatgaaaagagcagttttcagaactgtcttaaacagctcgttccttccttcaaatgatatctaccacagaaacttgatgtacaaaatggctaaaagtagagtggctctgtcttcagagatgagagaatctggatggatggggcttgtgcttactcctgacccttgggctgcccagaagaacctttccagaaatctagaaatctacagaccacatttcgaaaatacttgtgctaaaggaatccgaattctttacatatcttaaatatgttgatgatttttactctaatttggagaccatgccatgcatgcatagaccaaatattaaaatcaaatgaacagcaaataaattgatatagaatcaatgaaaataatactgcaacaaataaagaagccaactacaaggtgtgaaaactcaagagaaaaagtagactcttaaaaataataaaacaatttctagaaaagtgaaaggaaaattctggcaactagttgcatgatgttctcaaagatacatgaagacatgatttttataaaatagcaagccttaatgaagaatatagttaaatgacaaaagagattccaaagaaactagagaaaagcacaagtccattatagcataacaaaattaaaatctccattgaaggaagtaaacagcagatatgactttgaataaaactataacaataatattgaagacaaacatggcaagattccctgcacagaaaggtgatgaaaataaaaattataattatgacaatgaaaaaaataattttgaaaatagggaacgaggagagatcatccagggagaaaccaataagggaaacatggccttaaaagacacgttagagcagatggactta

SEQ ID NO: 35424 - DNA, 1844 bp, Bovine  19866881130119
  misc_feature (1)..(1): n is a, c, g, or t
nccaagggagcacaagaattagggaaattatacaaaaagcagattttttccccccagttctctttgtttacggctgattgttcaacattgcaaatagggcatgagtctcatccagttggaattcaatgccttgaccttctaatttgaacctggaatctcttaatgcaacaactacaagccatgaggcaccaatgtcatttgttggtcagtaccacacagttacaggagtcatgactgtatcttggacaattgaagaaaaactaaaacttgccctaggttttttaaaaattctgtaaaatacttctggattacaatgacatctggctagcagttccccattgagcttgtctgcttcttacataaaagactatgaaataatggaaaaaaaaaacaagaaaaacaatatagccactttgctgtacgctagaaattaaacccaacattgtaaatcaactatacttcaataaaaaaattttttaagactgtgaacacactggaaaaagatgaaacgatcaagaaccaaaattaaatcaaataactgcctcttttcaacaggtcgctcactgcttctagcaatgcaatactagtgaatttcttgggcacatactctgtgacatctttcaccatttgaagtaacatggatgggcctggagattatcatactgcctgaaataagtcaggcagagaaagagaaataccatatgataccatttatatagggactgtaaaaaatgacacaagaaaacttatttacaaaaacagactcacagacttagagaacttaggttgggggagggatacactgggagtttaggactgacatggactcactgctatatttaaaatggataaccaacacagacatcctgaatagcacatgaagctctgctcatgttatgtggtagcctggatgggaggggattttggaggagaatggatacatgtatatgtatggctgaatcccttcactgtttacctgaaactatcacaatattgttaactggctatactctaatacaaaataaaaagtttacaatataaaattaaaaaaaaatagatgaccaacaaggacccactgtatagcataaggagtgctactcaatattctgcaataacctaaaagagaagagaatttgaaaaagaatagatacatgtatatataactgaatcactctgctgcacattttgctgcaacgcaacactgttaactaactatgcttgaatacaaaataaaaatttttaaaaataaaaataaagcaaatgtgcagtgagattatgggggaaaatggagaaagaggatgtacagcacagttttttctcaatttctcctgaaacatggcatcatactgctcttgaatcccgtaagagttccctgctgctgctgctaagtcgcttcagtcgtgtccgactctgtgcgaccccatagacagcagcccaccaggctcccccgtccctgggattctccaggcaagagtactggaatgggttgccatttccttttccaatgcatgaaagtgaaaagtcaaagtgaagtcactcagtcgtgtccaactcttagcaaccccaaggactacagcctaccaggctcctccatccatgggattttccaggcaagagtgagttccctgcatcatacagcaaattcccgttggctatctatttacatatggtaatgtaagtttccttgttgctctttccatacatcttaccctctcctcccctctccccatgtccataagtctattctctttgtttctccactgctgccctgtaaataaattcttcagtgccatttttctaggttccatatatacgtgttagagaatgaagtgagtcaaaaagag

SEQ ID NO: 35425 - DNA, 3507 bp, Bovine  19866881155001
  misc_feature (1)..(1): n is a, c, g, or t
ntataaaatgttaatgatatgggaaattaggatatagaatacagggtatatggaaagtctctgtactctctttggaatttttctttattctaaggtaaagaatggtttactattctgtattattactgtaacacaaaaggggggagggagaagaaaaaacaagtagatgagagagaaagacaattcgcttgttagttagaacaaaattagtgaactagtaggttcactccgttagaagaaagcattagggacaccggcacagtggtgtctgttgtcagctgtgatcatatttgatttcaccaacagagacaaagaggctacacacttgggaactctaaaagcatcctgctcttcccagatccctggaaagagcccagcccagcactccaagagtgttagactgggagagatgccaaactccaggggctgccagacgagcagtctatttctttaatttggagacaatcataagccagaagttagaaagtgtgggaccacttttctccttggaaatgaaaataatgcaccttgggattcagatttctgttgactaaagctccacgtggtgttaggtgggtaaatgatcacagcataggacaacggggctggcctcctcctcaggacctatgaggtgtgcctatgagaagactgcattctcggacctggaagagctgtggcccaaacacatgcccctgtaatgctcattcactcagcagtattcatctagtgcctatattgattcagaatattctaggtgccggggatacatcatgaaaacagaatgtgtgaacactgatgccctcatggaggttacattcttgtgaaagggagatgggcgataagtataatatatgagttatagtatatattatgtcaaagatgataattgctatggatcaaagtaagataaggaagatcaatgagtgaaggtggattgcaatttgaaaatagggtcattttcaaggctgtctcattcagaaggcagttttcagcaaaaacttgaaggtgtgtgtgagacagaattgagtaagcaattacagagaggtggaggagtgtggggatgaacaaaaagaaatgaaattagagaggtaatggagaccaaacagtatccagccttgcagggtttattctaagagaaatgaagagttttgtagggttttgaacataagaatgatttggtatgaagctcactctggctgctctgttgggaattgcctgcagggtaaaaaagtggaaaagctgagtagaggccaccgcaatatctgggctagacaagatggtggcctagaaggatggtgggaattgaggaggggcaactgggcagattctgaatgtatttccaaagttgggacaccagaatttcctgacagattagatatgtgtatgagagaaagaaaggagtcaaagatgatttcaaggtttttgaattgagcaactgaaaggattgtcataactgagacagtgaagtctgtacacagaaagcaagtttggcaggaaaaatcaagacataatttggtttttaatacattaagacagagatgaaaaagtgtgctacacatccaagtgcagctattgaacggtccagaaatcagagaagagatctcgactggagacagatagttgggagcgagcagcatattggtgatatttaaagccaagagcctggatgagataactaagggctgaaaagagtatggacagaggtgaaaagaggcccaggaaccatgtattggaaagctctgctattaatttggagagaagaaaagaagctagtagaggagtctgagaaggaccgatacagtgaggaaaaccaagagccaagggaagcaaggagagagagtgatgccctctgtcaccactccctacagccaagtgatgctaagagctgaacacaggagtttacatgtgaggggcattggcaaccttgacaaaagcagtgttggtggaagggcaacagtgcaaaacccgacaggcatgtttaagaaagaatgaggagggacatccctggaggaccagtggttgagacgttgcctgccagtgcaaatgatgctggtttgatccctggttggggagttaagattccacatgcctcgcagccaaaaaaaaaaaaaaaccagtatattaaaaaataaaaaacaatattgtagcaaattcaataaagactttaacagcccacatcaaaaaaaaaattttttttttaaatggagaggaactgcagacagtgagtgcagacaagacttcaaggtgttttgttataaaagggggagagtgcaatgaacccatattcacagcggaagtgaaatctgcaacccccacaggaagggcatctggtgtcacagtggctccggggcccctcacctctgagacccacttcagcaagtctctcagagccttctggcggacttctccttgccagcggtagacgacgaagccttgcaagtggagttccttaaagatgatgatttccggggatgggcctgtgaagaggagggcacgtttgagcagcaggatgcagggaggtggccgtgatgaaaacgtgcatggtacaaggcatgtcagcattcccctagtgctctccctcctgtgtcctccactcttcccgacccacagggctgccccaaaatcaatatgcactctgtgcaggcagagtaactgccccaagacgtccatgtcctagatcccagagccttaactatgtgaccttacatggcaaaagggactctgcagataggaccaagttaagaagctttagatggcaaaattattctgcattacataggtgggctcacatgagagtccttgtaaggaagaaagggatacaggaaaattagaattgagaaaaaaatatgtgatgatggaagcagagatcatagagatggagggagatttgaagaatcagtgctgctggctttgaagacggaagaagggaccatgagctaagagatgcacgtggcctcgagaacttaaaaaggcaaggaatctgagccttcggaaggaaagtagccctgctaacccatttcgagttctagaactgtaagaataaatttgtgttgtttcaagtcattaagtttgtggtaatagacaggactgagcacaactcacagctggaagactcaccccagctatatttctcttgggttaaggagtggaatcctcatctcctcatcttggaagaggatgaaatactattcctgggattgtccacgctactggggatgtcgtttctttattgtgagcggaaaacaaatatggcatgaaagccgggggaaacaattacttgtctctgagctcccctaatagtgaaacatgttagagttcctagagatcaccggcaggcagactgtcacctgcttaagatggaatggacaataccagctgacatctcataacctgtctgagcagatgaatttcaaaaggctagatcaagttactgtatccaaaatatttggctgggtcaggaaaatgcaccctggagctctgctcaatggcaggagaaggattccccag

SEQ ID NO: 35426 - DNA, 924 bp, Bovine  19866881183575
  misc_feature (1)..(1): n is a, c, g, or t
nccccttggagtgaatatgacctcctcttcgcatttgactcccatatccaatctgtggccatgtttacaattctaactatgtcctcacctaaatgatttaaaaagaaaacggcagtattattttatttattgtgtttttacactagaatgctgtgttctccatatcttaattttttaattaagaaataatttcctgttgagtgatattcagatttttgacagcagcacaaagtcttcaaagaatctcttatttctcaccaagaaccatgtatcctagtcatatctgaatagtctccattgtacagattcactcccagacctttaattatgttgtttcctcattatatgggatgctctcaacctggagttgtcaaggttttttggagacttggctgctactatctgcttttacacccatgtctccagcatttagcacaatgcacagaaagagctcaagaaatgtttgttgtattaaaaaaaataataataaaaataaattactcattccttggtacagcatgttttctttaggttgatggtcaccgtagaaacaaattcctcagtttacactgactggccaagaaaagagaagatgtgaagaatgacaaggaagaactcatgacaattgtcatgctgagaaagaatgagaaactcttagattcttctttctcatggggttaaagaactgtcagaggtggaatgaagcaactgcaaatagtttgcttccctattaatccttcaggggaagaaaacctgttctaagtagaagatggaacagctgctgctctaccaagtgcattccacaaaagtcacaagaaaattgatgagaattcaaatactctgataacagtaggaagaagctgccaacgaaaaacaccaggagaagagagttggagacttttagagaactaaagaactaaacca

SEQ ID NO: 35427 - DNA, 1301 bp, Bovine  19866881231116
  misc_feature (1)..(1): n is a, c, g, or t
naagtgactgggtagaaaccaactctccttatgagacctaaatcccaagctacatatgtatcaggagcatcagaaaaccctgcccccaggctgtttcagagcagggcacctggtgtggatagtgatgttcactctggagctcactctgtaaagcttgtgcttcacgcagtctgtgttctcactctggtttataactccctggcctttccatcagaggattactatcaggagaacacaaagctgcttcctacaacatacagtatcttgggagaatgagaaaaagggcccattctctggggccttagcctcatggattattgagcagaacatgggctagatttctaccccaactcacctccttcagacactctatattcacagcccaacttgcacagccatactgggcagtggcagtggccctctgttcctccttcaaagagcctaggtaagttaggggagtcttttcatccatgaaccttaccaaccaaatgcggtggaggacagggtgttactcaagcagatgcacactgatgggaattactcaattttaatggaaatttgttccactcattcctgaggtagagtctaacaaaaacccacttcagctcctgatgttggggtctttcagactttcctaaatgggaagttggcatgttattcttagcaccttctctttgaagtagtatctggcacacatatctcaaatgatgtctggtgagtgaaggaaggaaaatgggaaaaaggaaaagagggagggtgggaagagcagggaaggagaatcctctgagacaaagatcatgtctatgtgatgaaaaatatagagttcccagatcaaccttgggccatgctatattcaggtggctgatgcatgattaattgggctgaatggtatgtctggatggtaataatctctatatgtctctctcccctaccctcagtctgaaggtctgccactgccagacaaaacttgaatggatgtgttaggcacctgagagacaggaacacatcacttaatagtaggctttctgtgtatgacgctttgcttgactagtaagcacatggcttcctgaatggtaggttcctcccaaacaccgtgggttgctcttaaccacagcatcaactactaaatggagagaatctctagagtcaggcctatcagagctggtgatgagatatttggaaaacatatttgggatggcagaatgacatgctaagagagtacgaaagagagaccctttatagcaggtagaagccaaggagctcatccccaagggaaatgggcagcggcattgttgacatac

SEQ ID NO: 35428 - DNA, 1325 bp, Bovine  19866881286920
  misc_feature (1)..(1): n is a, c, g, or t
nggcagcagtgaggaaccggaggatgctgattgtaccgcccgaccgtggaatgtgaggtgtaagagatttagcactttatacggaagagggttgcatgaagaaagccattaacagacaaggtagaaagtagaaatgggttctgtgacactgaagttggaggggtgttcatagctactaaataggttccagagggctcagtggagggtttggggggaagaaagagaggttgggtcagcctgagagaatgcacagaagcatgggttttgtagtaccagaatagaaagattctctgcatttcctagcctggggtaaattcaagggtgtcaacagctattcttctgtctgacagtgtgtatagcattgtctgcctatgaatcttccttgactcatagatccagttccaaaggtgaatctgggcagagtcacaatatatttctctgggtggggcttagaattaaacattctttgagcccctgaatacaaaactggactcccatgaaacatgctaggcactcatgacccaggagtcagttctcatctttggagctggctgctttctagacactggatgccagttttgctccaaaggccccactggctggcctctgatgctcttggggacaagaaacaaggacaggctgcaatggggccagatgattttctgaatgtgttgacattacctagttacactggatgtccttactggtttaggaatgttcacctttgcattgacctcagctagctgtgttcctgtttgctttacaacttggatttctcgttaatgacaatctttgttcttccatataacctgtcctatatttaaagtacctatagtactttttgaaagtaagtagataggaagggcagagaaggcaatggcagcccactccagtactcttgcctggaaaatcccgtgggcggaggattctagtaggctgcagtccatggggtcgcgaagagtcgtacatgactgatagactccactttcacttttcactttcatgcattggagaaggaaatggcaacccattccagtgttcttgcctggagaatcccagggatgggggagcctggtgggctgccgtctatggggtcacacagagttggacatgactgaagcgacttagcagcagtagcagcagataggaagggagtggtaatcaataatgtttacttaagtcagctcacatattcaaaacttagcttcttagcttttttctcatctccataccaattcttctaccttgatttgttgttgttcagttgctcagttgtgttcaactctttggatcccatggactgcagcatactaggcttccccatc

SEQ ID NO: 35429 - DNA, 1527 bp, Bovine  19866881287807
  misc_feature (1)..(1): n is a, c, g, or t
ntgactcaatcaatgccatgtctagcacagcccacagctggtactcagtaagcacttggtgaatgaatgaataaaagtctcattttaaaccctcacaacatgcaaaattccaacaataaaaaaatgccttttgtctgaatgacttaacaatcagatagcaatataaatacctccacagaatccatcagaccttgcaagaggagcttctggtgaggaaaatctcccatccccaactggaaaataccccagtgtttggatagctctttctttcatctggaagaacagagaaatttttttttaaatgaactatataacagcttggccccagaaaaatgtcttctgggagaaaaatgagaaggtagggtggaggagtctgtctaactaaatgcatcagtgttttttttttaagcattcaattttacagaattatgtatataatacactggaggttgaaagacatgaaactaagtttattaagggtccagcactacaaaagaaggaagcacagtctttagctcagtaccctacaaaccagaacagttataaatgtagactctgggcccagaagaacctaagatcgggtcacagctagaccatttttagtagcctttgaggctgtgtgacctcaggcaagttacttcacttttctgaattttcctcctctgggaaaacagagatgacaagcatacttactccaccagaccttctgaggattcagttaacaaaagcatgtgaagcactcagcatatgcttggatggtaatgactagctaatagcagccaataaaaattacattgcgatcttctcggtaagttttaaaaaatagctagattgagaataagattacatatttattaaacttgtagtaaactgagtttttctgttcattaaatcatcttacatttcaacactgaggtactcttatcccaaagaaaaattttaaagtctgtgaaggtttttatctaaaattaaaatactataaagatcctctgggcttccctggtagctcagacagtgaagaaactgcccaaaatgtaggtgacctgggttcgatcccttagttgggaagatgccctggagaaggaaatggcaacccattcccgtattctggcctggagaatcccatggacagaggagcctggtgggctacagtccatggggttgcagagtcagacacgactgagtgactttcacattcacattcaaaggtccttttcctcagagatgactcacactgcttactaatgcccaaacttattaaaacccacctggttataaggaggctaagatttagatctggtctgaaattataaaaatcatataactatttaacactttattacctaccttttgcatgacagaagaataaacttgatgcatttaatctttacccaaatcttaacaagttatgggccttaattggagtaactgagtcaaaagggcacacataacaaggctatatacaaatcacccacaactcaaagttaaacagtttttagaagagaagggtaaaagtaagagacatgc

SEQ ID NO: 35430 - DNA, 2088 bp, Bovine  19866881324017
  misc_feature (1)..(1): n is a, c, g, or t
ncccctttcacttttcactttcacgcattggagaaggaaatggcaacctactcccagtgttcttgcctggagaatcccagggacgggggatcctggtgggcttccatctatggggtcccacagagtcgaacacgactgaagtgacttagcagtgagagactttcactttcacaccaatatataaaatagataacaaataaggacctatgtatagcacaaagaactctactcaatactctgtaatgacctgtatggaaaaagagtcttaaaaaagagtggatatatgtatatgtaaaacttattcactttgctgtacgcctgaaactaacacaacattgtaaatcgactatattccagtaaaaaaattaataagaaaaacattcacataagaacatgtcatccccagcttaaaactgtctgatgagtttgcgttagtgttggaatagaatccacgtgcctgaccatggaacgtgtagtctggcccttgcctgcctcactgacctcatcttcctctgccctctctctttctctctaagcatcagctgcctccctaccttccttgctatttctcaaacgggtcagacttgtttttgcatccaggtctttccatctgggcttactcatcctgagacactctctccacaggttgtcattgttgtgtagtcactaagtcgtgtctgattctttttcgaccccgtggactgcagcctgccaggctcctgacatgggatgtcccaggctagaacaccggagctggtggccatttccttctccaggggatcttcctggcccagggatcaaagctgcatctcctgtattgcaggcagattctttacatctgagccaccagggaagccctatcactcagatttctgctcagattcatcctttcaaaaatcacctccccatcaccaccccatcacgctccatccatttcctctgtttgaatttcttcacagaactcatttcagaacttgtattttgaattttacttgtttgttttcttttcccctactaaaataggagcactctgatggcagggatttttgtctgtgtgttctgccttgaatccccaacacataaggatcgtgctagcccacgtaaggacagtgataacacagcaaagaaatatttttgtaatgaacgcatatgaagaccaatctccaaatggccagcgggtggtattggcattgagaaaatgcctggttagttaatgaaagctttagaccaaaaaagaattcaccagctggtgagttggaaggaaatgttcaatttgggcatttcttcccatggtgatttatcaagatgaatagctattcagtctcccactcgttggtccttctcctgtttggatgtttttgcattgctgattcacattagcatttcatatgttttgatttgggagagagagtttcatcttgatgagcctcatttataccttgttttgtacctgaaacacagcctggtagctcacgcaccctgtatctgtgctcatggccaccaggggacactgttgagctgtttgaattcattgagaccctgcctgcctgttttccgtctctatcccactttaaagaatttgcaatttttaaaaagtgtgaaagttctaagcaaacaaacaagagaaaaacagactccaagccctctctttaatgaagaacagatatgcttcgttgcctaagatgtgactcttttagtaaaatcgtaaaatttgaattttaccagaaatgtgaggcaaggggtttggacctggaatacgcagcagctggtttcccagaagaaaagtgcatggaatttccattctgagtgtcttatgttaagttaaatctcgctgatgggaacaagatgaaagcatgcgctttaaatatattgctgacctcagaggagaatgaaagttttcggaatgttgaaggacagaggcaagtgttgcagtgaaaacaagagggtgctggtgagaagggtggtgagatgagaggagagccgcagtgcttctgactcatggcccacacgcttccgcaggcagcctgttgatgggaattcctcagaatagccccaccattcattcatacaccctttaggtcaagggga

SEQ ID NO: 35431 - DNA, 971 bp, Bovine  19866881330499
  misc_feature (1)..(1): n is a, c, g, or t
natgcatgaaagtgaaaagtgaaagtgaagtcgctcagttgtgtccgaccctcagcgaccccatggactgcagccttccaggctcctccatccatgggattttccaggcaagagtactggagtggggtgccattgccttctccggctataacagtataccacagactatatgacgtcagttcagttcagttgctcagtcgtgtctgactcctttgcaaccccatgaattgcagcactccaggcctctctgtccatcaccaactccataaatagcatttatttctgagagttttggaggctggaagtccatgatcagagtgccagcatggtcaggttcttcatcaggaacttttcatggtttacacagggctatcttcttgctttatcctcaaatgacagagaaagggagaactcttgatatcttcatccccttacaagggcatccatcccttacatgtgaactctagcctcattacctcatccaaacctaattgcctccagatcacagtggggattagggctttgctgtacgaattttgggagacacagatattcagtctgtagcatggcgtgttgcagtcatttgcgcaccatcttctgggggactgtgcctcagtataggcctctgtggaatctcaacttgaattaacttggaggacattgtgaaatacatggcctggtaaaattctggtgtgtggattcttggggatagcattttggaacaagattccaatattctatactccctttctgggatgccaaatttacatcctttacaagaaaaaagtaaaataggtaatacttgagaagtgaatttgtttttaaaatatgatcaagaatttcagttcctgccgtcctctattgtaggtaatggaactgttggtccatctgaataagcgcataaaaagccgccccaagatacagctcccagtagagacactcttggttcagtggcaggaccctgctgcagt

SEQ ID NO: 35432 - DNA, 1316 bp, Bovine  19866881367303
  misc_feature (1)..(1): n is a, c, g, or t
nctgggacaccctcactgcactcttacaggtaagacttatctcagaaggacatggaactgtgttcagggaaagagagaaggggaagacacttctagggtacctggagggtggtggacttccacttcagactaaaggagttgactgattcctgatacctctcccccgccttggcccaatttccctccagatcacagcccctgtacctccccacgggcccagccccgccctcggcactgctctcaggggtagctgtcaagggccagtttctggatttctccgcactgcaagcaacagagctggggaagctgccggctggaggggttctctaccctccaccttccttcctctactctccagccttctgccctagccctctgccagacccacccttgcttcaggtgagaggcgggcggatgctgggcttaggggtaggagtggggtgcttgggagttgacattgtcctccctgttccccaacaggtgcgacaggatctgccatccccctcagatttttattctgctcctctgcagcctggtggccaaagtggcttcctcccctcaggagcccctgcccagcaggtactttttattttcccagtcccctttgtgcgctttgccttccaactccagcgttttttgttacttgtttggactcttcctggttttctgacattcctccctgcccccaacacacactgccctgtttctcattacagatgcttctgcccatggtggactcacagctgcctgtggtgaactttggctccctgccaccggcaccacctcctgccccaccccctctctctctgttacctgtgggccctcctctgcagccccccagtctggctgtgcggcccccacctgctcctgctactcgggtgctgccttcacctgccaggcccttcggccctagcttggggcgagcagaggtaaggtacaggagctgaagtgctagggaaccccaagactcaggggtaaggattcagtatcaggatgaagacgtggagaggcaggacgctcatgagtcttttttccttcagttgcacccagtagaactgaagccgttccaggattatcgaaaactgaatagcaaccttgggggacctgggtcatcacggactcccccatctggaaggcaagagaagggaatggggagaagccatccccaaggatttactttctttggggaccagaggggggtctgaaggttgcctcaaatatcctttctccaggtctttctctggcctcaattcccgtctcaaggccccaccttcgacctatagcggagtcttccgcacacagcgcatcgacctcta

SEQ ID NO: 35433 - DNA, 617 bp, Bovine  19866881388755
  misc_feature (1)..(1): n is a, c, g, or t
natagtttctgcctattttcaggattttagattatattacctgtcgaatccacttctactatcccagttcagacctcaagcttctgctaacttggctactgtaatatttacctttcttttagccttgctgctcttggtctctggacccttgcaatcaatgttaacatcacggccacctgttaaacttataaaaggatctactcatgttacattccctgcttaaaagcctttgatgctcctctactgtctacagaacaaagttcagactagttgtgttggcattcctatgcaagccagtcccaagctatcttcccagctttacttcctaccaccattcctcaccaagaataataatttatatagaatttaactgtctgtacagtgcattaacatgtatattaagcctaacaacactgcatttcttatgggaaagaaacagagacttagtaaggtaatataatttgctcaagatctcaaactgtaaaaggcagaaagggccaagcaccttaactccaatctttaactcctttctcagaatttcatgcagccatcatatatcagactcacttggactttctctaaaaatacatatttttcaatctctatgtcttagctca

SEQ ID NO: 35434 - DNA, 1320 bp, Bovine  19866881413057
  misc_feature (1)..(1): n is a, c, g, or t
ngctgatccctggtgtatatgcactggaggatgattcttaacctgaaggggtaaagccagaggaagtggggggacggggaggtttggactgtgtgagtggactgctgtcagtggtacagccttcaggtagccttggccaccttcacaggtggtgtggaccccgagagcaagattctcagtctcccaagggggtagagtttcagtgttctgaatgtctcttttcttatttcagtctcatcttaaagaaatccagagtgcatttgtttctgttctgtcagaaaatgatggtaagttattggtaaatatttgatttccaaacttctttaagcttgtatcgtaaattttgaaaaatctagattatgaccataagagaaggctacaggaaacttgattcttacgtacttattcattgtgtgtgttaattgctccgctgtgtccaactttttgcaaccccatgtactgtagcctgccaagctcccctgctcatggtattctccaggcgagaatactggagtgggttgccatgccctcctccaaggtattttcctgacccagggatcaaacccacatcccttgcatctcttatgtctcctgcattggcaggcaggttctttactatagcgccacctgagaagcccatccattttattcattaatgaatcatttattcattagatcagttttgcatttgaaagtggagccgaggctatctttaacgttcgtagcttctactaataatagctttctcctacttaggattcattttttccctttttgatttaagctaggagagggtgcaaatatatgtattagatatttaaatagtagctttgttttataaattgtcttaaacgtgtgatataatattgagctttcatttaaaaattacccgtgggttctcctgaaatggattacgtctcgtgtgtgcaccttgcatccgctgaccgttggtcactgcgcactgcccactgaggcccagcagggttggcttgatttgtgagttgggtattgtgtgaatgcagttctcatttaagggacttggctggtgtcctgtccactcagatgatttaatacatttttttaacaaaataggttgatggtgttttcatatctttgctttgatatcatttttggttaatgttacaggtttattaaagtttttttcacttgatggctagagaacaaatttttcttaaaagaatattgttttgtctgacttttgtgtagaactgagccaggatgttgcctcaaaaggccttgggttggtgtatgaattgggcaatgaacaagaccaacaggaattggtttccactcttgtag

SEQ ID NO: 35435 - DNA, 1486 bp, Bovine  19866881524712
  misc_feature (1)..(1): n is a, c, g, or t
ntgtgacatgaaaataataataatttttttgtctataaagtgacatttaactgcattgtaattgacttcatgttacaacctaccgttcttaacgatgagtggaaaaatgaaagaaagtgaaagtcactcagtcatgtgccaactctttgcgaacccgtggggtgtagtccatggaattctccaggccagaatactggagtgggtagcctttcccttctccaggggatcttcccaacctagggattaaacccaggtctcccgcattgcaggtgaatttgttaccagctgagccatgagggaaacccagtgaatgggaaactgggtgctatgacattagaatatgagtatttttaacaaagtttatctctgggctctttaaatggtcggctcctctgggcctttatataagatacgactttctcttgactctgaagcacacatgacatttagatcaagcatctgttctcttcattagtgctctgtttatgtgttaacctgcctttcatagttacgaggttggtagcctttttgaaactggtttcccatttgcattttgttttgtggtgtatcagggccttctaatgtgttctagctgtatatgccttgcagtaagtcacattattaggacgtagtaaaactgggttttaaacccagggtgtttcttctttcacatttgtgtttttgacctctgtgctatgctgccgcccagttattgatgatcatcgtggtgacaataccttaagcctcttcagagtgctttcttaaatggttctcatttcatcttcagctgttgcctgtttgacaaattagaagaccaaagcttagaaagtgaaatgtgttaccagattttctgtttagttattggcagccctaggactcaaccgcagatcacgaggtcttttttttccctctgtggagtggtagaaagtgtaggatcacttactcttcctgtggctgtaggaagtaggaagtgttttgtcagatgaacgctttatcagatgaggggtcaggttcactaatttctgtgctctttgtctgtgaggtctgtgtgaaaatgtgtgaccctgccaaaggagcagctggccagagaaccattgctgtcctcctgccctgccttctggataaaggaatgatgagtcctgtgacagaagttcgagccctcaggtttgaatcagcggatgagattgaatacactggatttacttagttcttagccatccagtagaaattggatttcttcaaaggttaagattctggaacgtatggagaagggagttgaggagaatccactggggtgacccaagagtgtgtgtcagaagtggcgagtcagaacgttttgcagagacgctctcttgggagccttgcttccgcccagtgttctgcaccctgcctcagcctcgagtgcggtgtgctcttcactcgtcaccggcctctgcccccagcaggcatatcttgttatgcttctgttaagcaaggtcttgggaag

SEQ ID NO: 35436 - DNA, 1339 bp, Bovine  19866880351355
  misc_feature (1)..(1): n is a, c, g, or t
nctgattgcatcatactgcagcaaaaagagacacaatttcttctgtaatatgttacctttaacattagcaataaggaaaaaagctactcttagggttatacatatctatatacaccatctctattttttcattaaaaatggcattaaaatatgccaaaagatttttacatattcagtattagaagtagattctgtatgttattttccagggtaataaccattaggtatactggcccttaacaaaaggaatttaacttgaagacattaaagtaaggcagaactgactgcttttcagtattgttttgcaacttacactaacatgtcataatcacagagtaaattaattatttcagggaatatcttgcttactgtggaaatgtatacccagacaaagtagcaggtccttggaaacaggaattattttaaaaattcaaaataaagggcacacacacatttgtggaaaagacttacttaagtgttactgaattatccagttatattaataaaaactagtagtaatatatcttagaatagtaacaaaatgcatagccccttcctaccccatgcaaatgtaactgtgttcccagaaaactttgggtttaccaaaattaggtatgatatagcctaaaaaagaattaaaatgattttttataattctatatacattttagtgttgtacaaagtattatttaagcacataatttaagatgataaatatatacattaaaatctaggctataatctagacatgaaaagtatgacgggcagacaagagaagtccccccacccacaaggatgatacgaaagcaaaagatccgaatctctgtcatgtgttttctgggggaaacactccagattttatagcaaatttacatcttatcagaaaagcacagtatttcagtagcagagatgatgacaaccacttgacagtaaaaacatattacaatgtttggctgtgaaactaagagaaatgtagacttaaaaagaatttaaaaaaaaaatttttttttgaagcaacatctgggatatgtaattagaaatttgaaagtaactgaacaggtaatctttcagaaaacttttcttctacctaaagtagagttgaagagagattttaaaaaacataaactaactttaccaactctgtagtaaatacaaaccatgggacacagtatggagattccttaaaaaactaaagatggagctaccatatgatcccgcaatcccactcctgggcatacatccaaagaaaaacatggtcaaaaaggatacacgcaagcttatgttcactgcagcactgcttacaatagccaagacatggaagcaacctaatatccatcaa

SEQ ID NO: 35437 - DNA, 4600 bp, Bovine  19866880490693
  misc_feature (1)..(1): n is a, c, g, or t
ntgaaacactacagttcaagagcatcaattcttcggcactcagccttctttatggtccaactctcacatccatacatgaccactggaaaaaccatagctttgactagacgtacctttgtcaacctttgtgtcctgagttgtccactaaccagtcctgggaacttggacaaatcccttgctgtctctgccctatggtgtcctcactggtaaaatgaagataataaggattatcattgtggggcacgttttaagggagcactgttttcggtagctgacatggatgacttcctgtcatcttcccaacaatcccaagaataggtattgttatcattgtcattcattttagagatgtagaaagggagacacaaaaaggttagttttcttacctgtggtcccagagctatttttggaggcaggattcaaacccaggcagcccagtggccagaacataagctctgttgtgtgccctctgtcactgaattatcataattcagtatttgaaagtcagtgccacacattgttattccctcacttccccgtctatcaaaaggagacaatacttctgtttcagagtgtccctaaggcataaacttgtgtgagaggggtgagattttgcaacttccctctcagcaccacagccaccacacaaaacacattttgcttttcagccttaagaaattgcacatggtcgaagcctatctactgctacaatataaaactgacgtctttccccccttttgcttcttacagatttttgcatatatgaatgaaaactcttcccggaaagaaaagtgggacctccaagctcttagatttttatcaattaactcaataattgacccttgggtctttgccatcctgagacctcctgttctgagactaatgcgttcagtcctctgctgtcgggtttcattaagaacacaagaagcaacacaaacttcctgttctacacagtcaaatgccagtaaacagattgacctttgaggatggtagttaagaagtgctagttaaccaccatctggaagatcattttgaaatggttccttagagaaatggaaaaaaatttataaagacaatgacgttaccctaatgaaacagagcaaacaaacatttcaggagtggtttgggctatagatgtgctgacaaggcacttcttgcaaggtgtcggaaggatctataaaacctaccctcaaggaacacgttcatggtcttcggaggaacaaccaagtgtatttatgatcccgtgtctttggatttaagcgtccttgttgaatgaggaagcatgtagttttgtaatttgtttaaaaccctaaatagttactgtgttttccattttaatcttctaggctagtaccattataaacataacagtgtacagtctaaccagataaaaacttacgtgttctttaggaagtggatttgggcaagcaaccaagcctggtgtcttgtgattgcttatcaaaccctttctttggacaatgagtttgaaaatcataagtactttgtactgtatgtttgtatatgtgggagcatgctcttgtcacgatagtattactcacagaagagtaggctcagttggttaatgtcagcttttttcaccatccatgagaagatgtgtgtcagagtgtcaggttatttattttataacatctgtcaagctaatggtaacgaaaaggactttaggaattttcctctcagcgataaatagtagactattaagagaagtaattctcattaatattttactttttatttccagggaagggtgtatgtggctacgtctgaggcaaatattagaattaaaaactgaaaaatctgggtcagttcttcagctacactgaactcttttaacgctgatgtcgaggctgtgactgacacagtttgtaggatgatggtgttgtagcaaaattcatgtctgtatgtttatctgggaaacatggcttgactcatgctctataggaaatcatacagtgagtcataccataatatatttctaaatctaaatgtttggcattgtataaattcagcatcaaaatatttcagtgaatttgcactgtttaattaaatcttagttatagtataaactcatctgaaatgttacaaaaataagctataaaacaaaagatttgaaaatggaatagtatgtgatgaattccccccaaatagcaatttatagtttgtgtggatatactaattttaaaaattagataaaagtggagtttaaaattttaatttagcagatttttaaagtgtggttgcattgcaaattagagtttgagatattcagtacaatacttgatattagaggaaatttttccccttatagcatgatattcaatatagtggacactttatttattttattttatattttgcagtgagtgttattacaacatagctgtaataaaaaccaaaaaagaatattagttttttcaaagtctcattgaattgcttacacaaaactatttcctataagtagttatcagactagatgatcacttaagagtgattccaaaccaatttagaaattagtgtattatgacagaatctatatcaaattatcccttattttaaaaagaataagtgaatggtttgcttttgtactaatttaaacaaaccaggctaagtttaacttagctaaaatctggatgtgtaaataaagcttccctgtccaccaagataagaaattgttctaaagaagactaattaggctcatgggtaattcctgaacataaaatgctaaagttactctggatctggaagattaatttcttttatcagatgacttttcttcctccaaataaaaatgttacctacaatcattcaccctacctcatcatccccccaaatttttgaataatgcctgagaaatttaaaaagaaaaaaaaaaggacaaacttggatataatatcactagtgaaaacaaaattattcactctgtggtcccaaaatatgagtttaagccatttaagaaccaagatttccagagctttgtttcctagtatattcctgttccttgcactgtgttaaatgactaaatcctaaaatttatttgcactgatatttacatagaaggaattgaaaggtaaaatcctatgtaatagtaaattacttactattaatggaaatttcaaggtaatacaaaaattacttatattggatatgtaaatatttcttttttaaaaatcacatcagacgtacctgtttaagtttgctgactcattttcaagttaaataaaaaacacagaacttagtctggtgtatcagaaaactgaattataataaaggaagacctagattttattctttgtccctgacagtcagtggaatgaaaagagaggaaaactattgtggatattcaactcagtatgccacaactgagacctggcccagctaaataaataaataactgtctttaaaaaaaaaagccaggataaatgcgcatgcatagctgattccctttgctatacagcagaaactaacacgatactgtaaagcagctccacctaactttaggtgtccagaaacaggatgggctgaagcagttctgttctgagctgaattgttactgggtggctcactgtggggcttctcaggtggccctggtgataaagaacctgcctgccaatgcaggagatggggattccatcccctgggtcaggaagatccctggaggagggcatggcaacccactctagtattcttgcctggagaatcccatggacagaggagcctggcgggctacaatccctggtgtcacaaagagtcgtacacgtctgagacaacttggcacgcacgcttcactgtggccctggatcatcttttccaagagaaaactgagaaattctggtactaaattgtgtccttgaatttcctaagatcctaataaggcctgtgatttctcagaaactatagaaagcctctgaaagacctgactctcaaagtggtctggacccacaacaacccagagccagaaagagcaccgacccctaaccgccatactggcggagactacaagtcctgggcaggtggagggcaaatccgagcctcatcactacattctcagtgtgattcagttcagctcttggtgccctggcctgctctcagcagtgcactttcagagacagattgccctcatgctaatgtaatgtcagctctgctttgaaccaaggaaaaatgaacatcttcaagttcagaacttgatgactttgaaaggcaggggaagacagttagttcacatttaagcagaggtttgtttacttcccttggtttagttgctcagtcattcctgactctttgggaccccaaggactgtagcctgccaggctcctctgtccatggggttctcgaggcaagaatactggagtgggttgccatttccttctccattacttcccttagtcaaatctaatattttaagccaaaaataatggttttctgaatttgagaagcgcccctacttgaattattcacagagaaacagtctttgtagacatttattatatgtggacttgccatgcctgctcaggatggccatcttctgcctttatcagacacgactctgctggaattcctctttgattgcacttttaaaacatat

SEQ ID NO: 35438 - DNA, 1313 bp, Bovine  19866880502935
  misc_feature (1)..(1): n is a, c, g, or t
ntccaggcaagaacactggaagtgggttgccatttccttctcccaatgcatgagagtgaaaagtgaaagggaagtcgctcagtcgtgtccaaccctctagcgactccatggactccagccttcccggctcctccagccatgggattttccaggcaagagtactggagtgggatgccattgccttctctgagtaagcctcttagattccaagaaatatttttttccatagcttgtgctctagtcccgtattagaatttgtttccatacttcttttttgaagtatagaatagctagtgcctttgactaacttcaaaaaacaaatccagttttaatactccatgagtcaaacactaactgataaattcagccttgatgttactcttagaatttgtcagatgttgacattgcatggactctgagtccagtcttctaggaactaagccaaactgaaccaaatttgtagtaagcctttaggattggatagaaagttacccaccctctggaaatgaataattgacatgctttctatttgtgtgcactctgtaattgcatgcatgatttatgtcatctggtaaaacttcttaactacttgaattagtgtattttgtaatagcaaatactattgctatttgaaatagtattcaattgatactgaaattgataaacattattttgtgtttgtgagtaacttcagaaggcgatttgtaaacttagttgattgtgttttgctttgatgggcgaattcctgaattttcaatcaagttagctatgtcaaagaaatgtcaattagtcactttgtatcagaagtttagtttctaaatgtttttaatcactggttgatgcatctgttgtagtcactcattgaaatcttaatgtaaaacaataattttcttatgctaaaattgaatggagtactttaattgaaatattttggcagtttgaatgatatgtatactttgaaatggtttactgcttctactaacagatgacaaacattttattaagaataggacatatcagaattttggaaaccatcaatattttgcacagtttcaacatacaagttttcgttatcatgggtttagttaacaccagttatctaacaacatggttcatggttttagttaccaccatacttttgtttaattgcataaaataccaactttgcttctaactcttcagtctacagttcagtgtgtcagtaacagacgagtacatttaagagttttcatgttacttgcatattacagatatttattggtttaattccatgtacaaggccctgggctttgcctttgaagtacaagataaat

SEQ ID NO: 35439 - DNA, 2420 bp, Bovine  19866880510425
  misc_feature (1)..(1): n is a, c, g, or t
ntcactagcaggtcacatggaaaggacaggaaagtaaaagtaaaggaaatgtcaataactggaagggttcctgggttctgcaggttcgtggtgtccgcagggctgcctccagagcctctctaaacaggcaagtttgcctggcaagtctaaagtgcacgaagtgcttatctctaaggatgtactgcagtggtgactttcacttcccactccaaagccaaacatgaagcatggggaagaggattaggaaaactgtaggtagatgaaaaaggtgggtaaaaggaaaacaaagtgaggtagggagcagcatctgaaatcaggtcagtagcttagaaatattactatgtggagctgttttatgttcagctacaataaatggtttattccagagcttatattccgtatcacctcctttcctctttctgctttatcttgattctgtggagtatgactagatcaaccagttaaaaatctagataagatactctggaatcttgttgtaaaatatcccatgaacaaatgaatagaatccaataaattctggggctctgaacaaggaaataaccacagaaaatagcagttcattatgtactgctttcacccaggcaggatgatttatatgaaccgtatgtttcagaatttgcatgatgcaatccacctaagttatacaatctcctccctgccttaagtaaaatgtttatcagataaaataacttaagttttataagtacaggaattttaattttgtaaaggtaaaatttttataagtacagtacttatttataagttttataagtatagtacttataagtacaggaattttaattttctaaaggtaaaatttttccgggttataatttagtgttcataataactggcaaaagcttttagagatgcatttgccagtcacataaatttcaagaatgtgaacatgactataaaactgacatttatttattaatgtttggaattccttcacttttgtacttacttgaaaactttaatatagtcagcaagttcaggaatggaagtgatgtcaccctaggaaaagaatgaaaacatttttttctcacttttaaaaaatctgaaactctgtttagcatctgatattaagaaccagcttgttcaatcaacaaggaaaattacataaattacagattataaagattttaaaggtattatatacatggtcatataggacaaaggtattttcaaatggcataaaaagctattaaaaatttgatcaatacagcaatttagacaatccacaagaatgtagtgttgattctaatatgactaaaactgtttatagctgcatacagaaattttctgactcttaacagtcctgagaatagtgtttcttctgtaataactaatatctaagcatttaaaaattttactgagatctatttattcttcttttcataatatttcaaatttggagatcaataaacggattttaccatggcttgaagttaacttttcctctgcagaaatgttctcccactacttgtaagagaacatgcagactgtactggcagaggatctctctctactgtgttggaagcactagagactaaacagtattgatgtaaaaaacttccctgaaaattttctggaaaatctatgtctgtattttctaaagcattaaatatttctctatatgtcccaaacacttcatgaaaacctaattccaaaaaaaggtacaagcatcagactaaattaataggcaaaagattcaccctaccaaaattgttgatgttttccccccttccaaagtaatctccaggtctgaaagggcagcatcaacttcatcaacttctttgtcgctgttgttcagatgattctctgacgtcatgatcgacagcttattgatatgatactaaaaccaaagtgacatttaaatgacttttttgactatgaatttttaagtgagattattatctgtatctatattgaatgccttttgccacctaatctgaaaggctaaaagtctcccaagatttaaaggatagaaaaatggtgggcatggcacctgaaatcagtgtcctaaacttgctaatgaatctttactcaaaaaaggatttttttgacaaacacaaatgaatttagtttaggaatccctaggatttagagttaacacctcttccactgaactctacacgagcagtgacttttaagtgctccactccccctgcagtattccatgtctagcacacaagctagaagcaactggatgaattgaacagactatgcataaggtctgaataaatgcattaacactggttaccttatcttacttacttatcttactactattactacttctactgctaggtactattaccctgcagcggggaagttagttatcgctattatgttgaaaactaaagttccactgcctccccatcttcaattcaatg

SEQ ID NO: 35440 - DNA, 4239 bp, Bovine  19866880547299
  misc_feature (1)..(1): n is a, c, g, or t
nctcccacattgcaggcagattctttaccagctgagcccaagggaagcccaagaatactgtagtgggtagcctatcccttttccagaggatcttccctacccaggaatcgaaccggggtctcctgcattgcaggtggcggctttacctactgagctatcagggaagccccttctttcagattagagtaatcaagagcttcaggggcccaattatctggaacaaatactaaagtgcacacactaaaattacttgtaataaaacctgtttcaaatgaaccatgggtgtgtgctcagtcacttcagtcaagtccaactacagtccatgggattttcctggcaagaatactggagtgggttgccatgccccctccagagtatctttctgacccagggatcaaacctaagcctcctgcatctcctgctttggaggtggattctttactgctgagccgccaagaagtccccagatagaccataagctggttaaattttatgaatgattgttttaatcatcacaatttcctttctttactgttcttagatccaagcatagtgtttagagcaagttttcttccaagaatgttttcagtttaacataagcataacctttttgtagcccgctgtccccagcagtgtgactcatgaattaatttaaaagtgaaaaaacatgaatatataaaaataagttaacatgaacatacacaaaaataaattttagattagtagctaaattatatcttgttgagcatgtgtagtgtgcgaggcactggtaggtgtctgtatatactaagccatttcttcaccagtttcatctccattttacaaatgacgaaacagattgtttaatttacacggccatgatcagatagttgacatctgaatatcaggtctgactctagagctcatggtctttcctcatctacgtttcagtctcggctttggtataattttgtgaccttgggcaagttacttgtctacacctgcatttcctcatctgttaacatggagatcatcatcagtactctaggattgttacagtgagtgagtaacatgtaaagttctttgaacaatgcctggcacataataagtgctgaacaaataataacttctattattacaccacactaccttcccaaagcctctgctagattgcagcattccctatatagttacatcgggttatgcaatataatctagctttatggaaaagttaaaagtagttgcccttagacatactgtgatttatgaaataagagaacatctgggagttgggttattggtggaagttattctgttattaagtggactttaattttttcctgtattgctttgttttatggtagtatattatgcatatagatagatgagatacggagcgcagagtacaagttatatgcgaattttctactgtgcatttttgacagcatggaggatttgcaccctaaacccgtgctggtcaaggaccaactctggtttaactggggtgtggtgttagaaatgaaagtttagtgttaccacacagtctcctggtaattgtttggaagactgttccctccagcaatcctcttctacagaagcgtgcccccccacctgtttctatgcttcatgtttttcattctagcatttctagctttcatttagtttcagttttattaagactacacctaataagaacctgaccatttctgaatgttcaaaaagagagaaaaataccgtaattaatcattttccaatagcatgaaaaacacaggctattcttaaaaagttgcttagatgcagctgagcaacttctagatttttagaaaacctgctatgaaaacaaaatccaatagatactttgtgtgaatttatcatagctgagaccaaatattccagtgaatgcagagaatcttctgttcatggttcatattttttttaaagctacatgctcagtagtcttccttagtatcagataaaaccaacaaattattccttaatccaataatgttaataaaaaaaaaagtcatttaaaagtcagatattcaaaatgctacgctagtagcactggcccataggaaaaaatgttttaaaagtcctgttagaaaaatggagtttaaaagtgtaacaacttctaaatttagtcgttcatttactgtatgacagaatttctgagttttctatatagctctagctgtggcatttgatgttacattcaggatagactaaaataagtacctggcatacctgttaaagattttttctaagtgccattcatttttattaagaaattgacaattttgccaatcaaaaattttctattaaataaaatgccttaacatttaaaattttgttttagatcttactgcaaagatgaaacctgatgaaactcctatgtttgacccaagtctactcaaagaagtggactggagtcagaatacagctaccattttctccagccatttccccaacacatcctggagaaggtttggttttgaggcctctttgtactgctgatttaaatagaggtatgggctcagtttataaatgctacttagacttataattagcattgttttttccacatacatgatgatgctgataattttttttaaatatttgactttcatattagttttttgtgcttaaattttaaagtgactgagaacttaattacaatgtgtataggccagatattactgtactacagtactgaattacaccatttcaaatgacttatatacaacagtgctccttcctaattaagcagcaaaaagggggaaattaccttgtataaaaagtaagaatcttctctaagaagctggatggaaaatgagaatgaagataatttgcctcagatagttgcaaaaggttttgtctacatgtattcctttttttaatatctaaattctccaaaataatatccttaaatttcagtaaccaaaaatcaactttttacagttttcatttttttggcaggaaatcttaaattattttggtcgaatcagttcttcaatatataaaagttaagattcccaaagttctatgctgttcatattaacataacattaatcgggaatctttaaaaaaactgttgtctcaacaatgttatattttacaaataatatcatatttgatcacaatgagaatcttgcatttttaaaaccaaagcacgtatttgggaaaatttgacatcccttgcattgaatctactgcaaattacatttaaaactgtatatgctggttctatatactgagtcttaaggtcagcactattccaaaaatcttatgcaggcaaaaacattagtaaaatctattattgttttacatattgattatatagaaagaatgggtttgtttaatcttttaaaataatttaagaatggttcattacataaagttttgaaaaaataatgcccaccagcttgacacattgcttcttttaatatatatttgctcttctcatgacttgaaatctgtttttcaaaactaggtttttttaaggtactaggtcagctgacagagactggagttgtcaacccagaacaatttatgagtaagtcctacagcctctttttcctgaagaaaaagaaatgaaacaagattatatttttgtttcaaactctgttcactgtctacttgttttgttcaaatagctggaaaatattcaaataacaaattagctattatttgtttaatgtggccaatctattctagaatccaaaagtaactactaccatgttttacaaaatacctggctatttttagataattactatagcataggacctgggtggcagttttagagattttcattatagtattttccttccacgtagttaggttatttcacaaaaacttcattgtcaaaaatgtaataaaaatatgtgacaatagaaacccagaagggtcagttgacttacccaaaatcacagggagttgttggtaaggaaaaaactacaaccttcctaactccatccagtgctcttaacactgtcttcctatcttcttcattttcttcaataggtaattttattttgtactctatatgaccctcttgaagtaaaagttattattttgtgattctgttttccttctttgaatctatttcatcccatttcagacccattactagaatacaactgtggaaataaacagtatgttaatactcttgggctcagtttttattcctaaattcttctttgtgggaatactagagagaaatcatgttatttcatcaatataagtcagttgaggggaagg

SEQ ID NO: 35441 - DNA, 1579 bp, Bovine  19866880705610
  misc_feature (1)..(1): n is a, c, g, or t
naggactcattaaaaactccttgcatggttttaaaagggtcaccacaatcacccttttgccttgctttggattaattttcttgaataatatcttgaagccaaacttaaaaagtcattcaaaatgcactggtgttcctatatactaaatggaagaaaaactttacccctaggttgcccagccaaaaagagtccaaagaaggtctctacctacaactataagctagaaactagacaagaaaattaaacatttagaaaacacctgttcaaaattgtactcaaatatatttaagatttttctggtatagtaactgatggaactctcaaagaatctctagagcttagtcataaaagctgttatttgatcccctagctgattactggggtagatatatttctaaacacatgaccactcaagggatcacatctgtggcttatccatattgtcttggttcaccttagtttaacatcacttctgtatcttcaagctcattttagtacagcccttgtgggtcagctggtaaagaaactgcctgcaatgcaggagacctgggttcaatccctgggttgggaagatcccctggagaagggaaaggctacccacttcagtattctggcctggagaagtccatggactgtatagtccatggggtcgcaaagtgtcggacacaactgagaaactttcactttcacatgatagtaatgaagaagatttcaggtttcatttatatattcacatctgcttacgattcctgtcagattagtccacgctgtaaaagtacgacagaaatgctgaaaacgtaatgtgaaataggtgaaacttaaaatagtttacttatgtgtcttatacatacccaatactttccaaaacggcaatttccgtggttaagacaaattggtatgtggtcccatatacaaaagcagcttccatgacagctctgtgctctaaaaaagagaggggaggtgagagggaggagaggttagtttgtgtgattctatttgaatactttcctacacccttttatgctctactatgtttaaagaaaaatcttttgtagggatcccagttgggaaaatgcaggcagttaaagaagttataaaaagtctgttctagtcaagtcaaggtaagagcagaactaagagggagttaaaaatgagttatacttgaagatatacaacaaatatgtgatatttttttcccagtagtagggcagagagtatgaattcaccacacaacttttatatgttatattttatatatgaatatgtctgtatgctatttatggcttatttttttaatcaaacttattcttatctaaaaagagacaattctataaggtatatttttaaaattaacagttcctctacccttgaccccatttccaatttccaagggacaactacttccaactttctcactctttctttaggtatttacctccaaatccctaaatgacactcttacactcttatttcctgtttatttgtgtgtgttagtattgtctactgacttcccactatgaaagatgataaatagctctcttttcgaaacctcattccacaaatgtacacaattctatcc

SEQ ID NO: 35442 - DNA, 1522 bp, Bovine  19866880745708
  misc_feature (1)..(1): n is a, c, g, or t
naatgtccataattgttccaaggagatcctttatagttgttaaaaaaacaaacaaacaagatctaatcaaggattacaggttgcacaatttatgttgcattcgtttattgggtgcttactaggttacacaggccttctggtttaattttcacaaggaaacttgctatagcttttgatactatgtcaaatggtgataaaatctttacctgtgaacacttgatatattttacttattcaccattttactcacagaatttagcacagagccttgaacatactaaatacgaaataaatggaacatggtgtacttgtccattctgatggaaaaactacaactaaaaacacgatggaaaggacctaatgtgttgtgatgacacacctaggcagaagcagcccctctccgcatccccctgcttttccaggcactttggtgggaacattggagccgtccaccttagctgccttcagtgacccgttacaggataacaatgacagtttatgccaactttgcttctattcaatagatccattttttgttttaatattaaaatttatttttaatttagcatcaaggaggaaagagtttcccatttgttttgtcaggctacagggtatatcagacacaaatatggaacacaaactaaatggtagccaatagaaaacataagtttagcatctaagcactttcttttctcttttttgagtcataggagtttgagaactcagattcacctaacaatatagatacaaatagcaaacaattttttaatctttgtgaactatggcaggctaatccctgaaaacatatacacagaacattgcaaaagaggtgatagactgcaacaatttcagcctaattttggtgatattttgataagtattacctggtaagaaggtaagtcatttatgtcatttattgggctaaaatattctctgatactttgtcagcctcttgtagaatcttgagagacttatccatcaaacaactgttttagaaagatgatgattttttaccatgaatactgtaatttctatgatgtatgagtgaagaatctgaaataactcatagtttccatgataaatattcatcatagtaattttgtacagaaatgtataattcggccctccaattgctagctgaatctgctgaataaagccaactttgtaaagcggaacaatggagccattcatcttatttggattttaccagtttgctgtgatgtctttttggttgtctatgaagggaaacagtttaaacctgtttaaagaaattcctaccagtaccttcccctgagccagcatacatctatccaaagaagcaatttttcaggtacttctttgtgtgaatactttgcattaggctgatattagtaaaactgcatgcagaatttactcttgtttttaaaccatcccacttcacaggctgagaaagccaaaagagacattttctggggtaaggcatcttcaggaagggtgcagggaggcagagtgtgccaaggttttttggtggcagactcctgca

SEQ ID NO: 35443 - DNA, 1704 bp, Bovine  19866880763002
  misc_feature (1)..(1): n is a, c, g, or t
ntgagtcggtgatgccatccagctgtctcatcctctgtcgtccccttctccttctgcctttagtctttgccagcattagggtcttttccactgagtcagttctttgcatcaggtggccaaagtattggagtttcagcttcagcatcagtccttccaatgaatattcaggactgattttcctttaggattgactggttggatctcccttgcagtccaggggactctcaagagtcttcaacattacagttcataagcattaattctttggaactcagctttctttatagtccagctctcacatccatacatgactactggaaaaaccatagctttgactagatggacctttgttggcaatgtaatgtctcttctttttaatatgctgtctaagttggtcatagcttttcttccaagaagcaagcgtctttttatttcacggctgcagtcaccatctgcagtgattttggagcccaagaaaataaagtctctcactgtttccattgtttccccatctatttgccatgaagtggtgggaccaaatgccatgatcttcattttttgaatgttgagttttaagccagctttttcactctcctctttcactttcatcaagaggctcttcagttcttgtatgtatttagtataaatatttcaaagtttcacaagaaactgatgattggtttatggaaatggaatgggaaagctaggatgggaagagagaattggaggtagacttttcactcttcaactttgcagatactttttgagtcctacaaagtgttaaaatgtgcaaaataaataaaatttaaaatagaggtaagattataggtttagagtctaagaattcttagctctattttctaaaatatatatagtcaaaaagtttggtaactgtaaggaaaatttcacttcccagctttaagatggcattaagaaaggtaatatttagaaaaagataatatttagtgttacttcactaagtaacaattaatctttatttgttgattgagaaaaccttatgtaacactcctgaggcaagtcagatagagatataggagactgaggcactgtaatctcaaaggtgggcttccctggtggctcagatggtaaacagtctaaatgccaataaaggccatttcccctactagtcattattgatgtctagaaatttatcaaatgatccaaaaaggaaagattgtctagtgctgcagagaaacacttaaatctcattaactctttattaaggtgtgctaattgatattcttgtggcaatatttagtcaaatggaaggtttctttcctcttaaggttaatatactcctgacaatcatacagatattatgggaattattttcaactatcataatttctgctaacagtttatttttaacgcattactgcagagcctgggtactgcgactttagttgatgttgctatagagcctctggggaaagatcctactggaggtgtcttcctctaaaactcctgagctgtgcccaggctggtcccttctgataggttgtgagctattgttaaatcctttatctctatcagatttgttcctacccagtattgtcacctgggttcctgtttgatagtgacatactgggagaaactgtaataaaataattacttgtcttagatttgaattcctcacagctctttgttaattggtagtaactaatattataaacacacatccac

SEQ ID NO: 35444 - DNA, 1943 bp, Bovine  19866880835694
  misc_feature (1)..(1): n is a, c, g, or t
nttcttgtacacatcttttgggagcataagcatacatttttgttaaggaaacaactgtgaatgcaattgctaggccataggttttgtctttggtccatactgcaagcagtctttcaaaatggactttattaggttctacttccacggcactatatgaaacttttagtcaatccacatgttcatcaataccttacatattgtctttctatttttatttagctgttctgggactgtatagtggtataatactgtggtattaatttgcatattcccatatgcactttttcatgtgtttattggcatttggatatccctgtctgtgaagatctgttaaagtcttttccccatttatagaacgttctctgtcatttgcatattgatttttatcatctcatcatccgaatctattaggttcttgaatctgggcagtatgtggctaacttttgtacagagtgggaattctagtaagttcaatctatttggtttctggaattcaaaataagaatgtagataatgatggatacctgaagccactgtaggtgtatttctgctgaatctggcttctggtgtctcattgcctgatgagcttgttagtatgttaactgttcatatttctgagattctctgaggcctaggatgatggtgccttcctccagacagaatctgtatttgggccaggcacctagagtcaatccatgactactttagaccagttcacagcatgacgcttttttggaccaaccaggaaaggtgaatcaggttacatactcacagtctctgccagcatgtggttttaacttccctggggtagggtttttctttcctttactccctctgcactgttcagcctcaaaggattttatttttcatgtgtctctttggaatgagaattcgagtgtgagcaggtttaattctggttcattcttaacctgaggaaataatagccctttaggatcctagccttgtaggggaaggtttcctcttacgcgctccatctttgcacaactaagtctttaatttctaaattcatgggctgtcagaggacttaaaaaaataacgaccgagtttccttagctggcagatgtcatcagaggcagaagcaacctcagcgttctactttccctccagatccccattttcattcagattttggcctaacattttttagttgttttcatctgggggattaatctaaacagtgtagcctgctacattactcaaaatatgacttcttttaagttttcagactattgaacaaccatgggaacagggagggaatctctttaatgagataactaaaactgttttagtaaataattaaaactgatgaatgtaaaaaaaaaaaaaaagaagtataggatcctgtattttagagggaaagccattgttggtgttcagtcactcagtcgtgtccgactctgcaaccccatggactgcagcacgccaggcttccctgtctttcacaatctcccagagtttgctcaaactcatgtccattgagtcagtgatgccatccaaccatctcatcctctgtcggcccaagtatttttaatatgaaaaaaaagataacattatttacaatttaataaaaaaagaaaacagttcctaagcaaaataggatttaaaatgataaagacaaataaatgaaaggagaaaaaacataagtgaaccaaaagctgattctttggggaagaaggagaggtaggaaagacaaattaaattaactgggaaaataacacaaaacaaaattaaagctcacagagatatgacactaataaaaatttgcagttgtaggaagatactgctgctgctgctgctgctgctaagtcgcttcagtcatgtccgactctgcgagaccccataaacggcagcccaccaggctcccccgtccctgggattctccaggcaagaacactggagtgggttgccatgtccttctccaa

SEQ ID NO: 35445 - DNA, 968 bp, Bovine  19866880869825
  misc_feature (1)..(1): n is a, c, g, or t
natatcataacattacctaatgcctgttctccttatttttaaaaataatagaacatttatattgattttctatttttggcaaagactaaaaaggattatagatctcagcctcctttcttagttgaaaagtaaatcttcatattctatctactacattgttcacaggcacctgctggcatgataaacagtcacagttatagttccagagcatacttcttcgacaatccgaggcgatatgatagtgatgatgacttgccaagactgggaagttcaagagaaggaaggtagttgcactgaattggtaccaacatagattttttttaaaaaagctttaacccaaatatgaaaagggtgatttgctgatatatgtcaataaataagatcatttaacattggcgtgtagaacagtagatgttaaacccatgatgagacctgtactataaagaattatcatctgcttctaagtccacatattacctttatttgagaaatgcctttgggggtaaaatggcaccctttcatttcaggatcccttgttagttcaaagctgatgggggttggtgagcagagaagaaatactgttatatatgtttccatatctactatgctgttcaaattgcacagagaaactctaaataaaactcttgggaagcttagctgctataagaaatcttcagtgccctccttgttccaaaatcattacaagtccatcccattagctttggtatcagtgccgaggaagccttaatgcacactaaataatgctttgaatttaatgcagcattttctataaccctcacttcatctggacaagttacttaacctcaattttttgtctgtttttcatctgtaaaataggaataataatagaacctatctgataggattgttgtgaaggctgagtgcatgtgtgtgtaaacatacatatgtatgtcctagaataaagcccagcacataataagcactat

SEQ ID NO: 35446 - DNA, 798 bp, Bovine  19866880937575
  misc_feature (1)..(1): n is a, c, g, or t
nactcttgcctggaaaatcccatggacggaggagcctggtgggctgcagtccgtggggtctcgaagagtcagacatgactgagcgacttcacttttacttttcactttcatgcattggagaaggaaatggcaacccactccagtgttcttgcctgcagaatcccagggacgggggagcctggtgggctgccgtctatggggtcacacagagtcgaacacgactgaagtgacttagcagcagttttgcgtgcatattaactcaaaatatcaccaggcaaagtttatcatggttatgcatagagatttctgaatttctctttcattactactagaattctgatattgtgcaagtatgtaatcaacaaatttcaaatcagttttacaacccccttcatgttaaattttacataaagagtaccaggaatgaatgagggaaattccagtactgtttacttgcgtttgttctgtatttgaaagatcagatttccactaatcagatttacctaaaaattagagccctaaagaattctaaagatgaagaaatttttagaatgagtcaatggttcactcttgaaattttagaaccgaataaaatgcataagtactttatcctaatgacatgaggaaaacagtttaaaatgaccagaggctattaacatttattaggaaagtagtgagaaagtggctaaatataggttggaaatttagagacaaacagtatctgagtcaagaatggacgtctgatgtgtttcctgtgtcctgtctcatttcaggaagaaagaaagtttccctctatct

SEQ ID NO: 35447 - DNA, 2493 bp, Bovine  19866880962112
  misc_feature (1)..(1): n is a, c, g, or t
naaacgtgttcatccctcagacatttatggagcacccgcaaagttgctagcactttgactcaaacagcagtgacacaatgtccaaaagtggccgctagaaacagcaagcggcaggaacagaccccagagcagccccctgccccaatcaagccatcacccctcaccttcaggtagacactgcttcccgttcccgtaaaacctggactggcagtggcagcagaaacccgtggcatagtcagtgcagaaggcgtgccgggagcagcgctcgtggttgtgttcacaggtctccttgttggcagcattgtacgtgaagactagaaagtaaaacaaactcgcatgaaaaggactgagtgattctgatgtcatggctgccaagcttcatcatggacacagcatctgctccataaaatccatttagagtgtaataaacaagtgcagttttgacgtttcagagacagggatgacattcaacgcagggagaataaacctgcctggtcttctggcaagaagcactgctgactgctcgcatctggtctccctgcagagctgttgagcaaggatgaggctgagaccctctgtgtggggacaggaaagccagccaggaagtaggtcttaggctgaactgtacaaaacggccattttctgggtcaaaaaatggccaaaggtcagcaattttatatggttcaaattactagcagtgagtttctgagaggatgaccaaagagaaaaactaacaaatgcagtcttatgtctaaccattcttctcttctttttggtaaccctgaacttgagagagaataacctatagcttgtcttactacccaggggaaaaaaaaatgtttttctgaaagagaagaagggtgttaaagaaagaacacacatacacgcacaccccttaaagaacgtgtatggggagacaggtcgagatagaggagcagggaacccaggcgtaaaaagttctggggcttagcagggtttcttgtggtgggtgtgacccaagcgggatgtctgggcagtagtggagagcctgggcacagtcacccctctctaggaagccacgtggccccaggtaagtttattgctccagtagctgtcccttccatctcctgcttattctgcccattaaaaaaagaaagaggaccatttgtgctgccaagaaagaagggaactggagcagattccattgtcactacagcaaatggccaaggaggtggggtgtggccaggggtgctgacagacaagagaaggctttcccggacactggggacgatgccagtcccgagcacggccactaggaggcagagcggccatgcacacctctgccgcgggatcccctgaactaggagttgggtggagactccccgagcagaccgaggagaaaagacagcacagaatctagggctagcctccgagctgctgtgatgaccacggataacctgctctttggaaaaactgagtggcagctgcgatccaggactaggtctgaaaaggaggaaatgggaaggggaggaagaaatgggaaaaccaatacttacccagtattccagaagagaacagaagacaaaatttggggggcgggtgcgggggtgtacccaccatagaagttaacagtggagccagcataaagacttgtaccagcaagtgagaatataacaaagtgaacattgcaacagtgcctaataaatgccaggtactttaaatgccaggaactttaacttaattttttcagtttgcacaagagcagggacttttttcaaattcctatatgcagataaagaagttttggcacagatcaaactgactctcctaaagtcacacaggtggccaacgtgggatttgaacccagagacacttgctccagattcttaacagctgcacctgaccacccactggtggggcccaagaacatctatcctgagagccaggcaaaggagctggtcaggtaactagcgttaatcaacacaggcttcgaccagtagagtttgagtcatacttcacatatcagatggaatgggagaagacagcagagatcccccagagggctatctccctggcagaaaggcacaggtaagggaactgagtagcagcagccacttctggacagtatctgactgctgtttacaggttcctgagaaagcagcgagctgagggttggcaggacagacgatcttgactcaagtggaatatctgactgggaacagaaaataaagttggtgaatcaagatttggtactgggccttgagcacatggctgagaaattccagttcgttaaaaatagaaaactaggcatcactctgaacatttgggaaaaaataagaacaggaaagtgacacaaaactcaatgcagaaaaacaaaacagataataaaaaagattgtaaaaaatggctatgagggaaaaactgtgcatcattatttaccattggtttaataagaaagagagcaggaaatcccagtttgagtaaaaataaatgaatataacttatcaaaatctc

SEQ ID NO: 35448 - DNA, 954 bp, Bovine  19866880966809
  misc_feature (1)..(1): n is a, c, g, or t
ngcgtggaaatgatctagtctggtccaggtgacatacagaacatcccccagttctgagataaaagtggaaaatgacccgacaaagagtggagaagaagttggtcagagatgtttcccaggttgaagtgcaaggagtgcagtattggtggagccccggaacccggagcgcggaaaagacttgagtcaaagaagctcaagcaagagatgagattctagggggattggcttgttagtggagtagaaaaccgaacatggggtttaagggataaggcgtatcagtcagagtagcccttttcatctttactcgtgttttgaattgtactgcattaattacacacgtttcccttacctcctgaactaaataaaagagttgcatttttttcttaatgcaccgtcaccgacgtaataaatgaaaaccttaaccatacttctgtggagctttatttaggttaaaaagccagagggtaacagtgcatgtaaatagataaagtgaggagggtctaactcttattcggatttgtaatctcagattcggaaatgtcagaaggtcaatatctgttaagaatgttacctaaaatgtgctcaaagaagtaagtattgccgatcaagaaaataaaaatacgtgctttctctgtaatatttcgttttgaaacatgtcatctgcaaacagcattgttacttttgtgtggtttgattcagtggatataaaatatatgtaaagtgaaacagacaaaaattaagatttggtggcttaaactcgcgaagattacttaattcaaaagtgttcaaattatattatttcagtaagggaacaattaaaagaacttaccaagcagtacgaaaagtctgaaaatgatctgaaggctctacaaagtgttgggcaggtaggtaatggagttcgggatgtagagggtgatggtatttatttttttaagctctggcaaaaaataagct

SEQ ID NO: 35449 - DNA, 1615 bp, Bovine  19866880971026
  misc_feature (1)..(1): n is a, c, g, or t
nacatgatttatcctcaggcttaatgtcacagcccaagttgctgggtttcgacaatgagcctgtcatgataataagatgcagctgtgctatgtatctacaacagttaaatgtccaggaaccctatctgcttaacacacaaacacacagattctccaacctgcatctattttcatatgtttagaagtgaaacaatgcatataattgcaatgatcatgcatccgaagtttatcaaaaactctgaatcccagcttccatttttattaatgtttatagataatgctgactggtgagtagacaaaatcctgagaattcttaatatcccaacactggaagaaaaggaaatgaggatggagagaaatgatgaagaactgtacaatgaacttttgagggctttgtggggaagtggaagatcaaaccaaaatcagaggatcttctcccaaaggacctaagataaatatttccctctcccatgtgaacagaaaggaaaaagacctatatactgttttgttttttcttagttgcttgaagtcaaaatctaacccaataacaactgaccagaataaagaactcaggaatgaagccagtagaactgggactgatgagctctgaatctatttaaatatgaaagcagggctatagaacacaatataaatattataacctttacaatgtaaaataacacaaaacaaaaatctggagggtaaagagaaactgagatggaaataaatatatgaagttaacattctcatcttttacaccaaggagtaaatcaatattatctaaaatgaaaacaagcagttttcttaaaataataattttcacttctcagtgttttccataatcatttcaacatttaagacagtatttcctaaacagccttctaatgatgaaacaatttctcaaaagttccataattcctctagtttcttatcagtttctttttcttctagtaaattcaaataaggttaaatctgatgcttcttactataaagcgcccatgaatccattcatccctctatctgtgtgtatctatgtggatgcagagatgactggctgcagctaacagttcatttttgaatgacgggaattggtggctttaaaatttttcattttttatactttgctgcactgtttgaattatttatagcacatatgcacaacttttatgtaaaaaggatatgatgagtgagaaggcctattgaaggttttacatatgctcaggacaaccctttaaacttccagagagaagtcagttgatcagctactgagtctaagagtctttcagtctgacactaaggaaagtgagacaccaaaaattctataatgcaaatatttataaacttttaaaacaggaatcaaaacattcacaaaagaggtcttttcttagcccatgatgtaatctttgtgatcttagaatggtcacagttcattgtaactaccacagaataattccacagtttattataactatcattataattacacaatgctatattgggttgttcaaaacaacaacacttcaaggcattaaaaataccattttattaatacacagtttatcctctaatctacctgtaataaggtactactcctaaatctgcctacataaataaa

SEQ ID NO: 35450 - DNA, 1130 bp, Bovine  19866880991788
  misc_feature (1)..(1): n is a, c, g, or t
ntcaaagttaacaagtctgatccatagtctcagaatttccagccaacttctttagtttcatattctaaatcacgaacaaggagtaataagcatttgacgaaagcctctaacatgaaagaccagaacaaacagaaaaacaagtaacatggaggaaacagattattcaggaagaagaaaggttcagaaaaccaccaccgataagctcaaaaagatgagaagatagtatatccacaaaaaatgaaaactaaagttgaataaatctgccagaaagtatggcaaagacagctggaaaatagaaaagataataaaattgagggactagttcaagagactcaacattcaaacaggagtcccagaaagagagaagggagaaaacagaagagaataaaacatcactgaaataaacacagaaatttcccacaactaaaggagcacgagctgccagactgaaagagcccactgagtaaaaccagcataggggataaaagcagatacgcagaaagatgctttcttgcaaattgtctaataatagaaaatcatttttctaatccttaaattttccagagagaaatctgtatttagctacggtagacataactctaaaatgactcccaaaattcccggtgtacacattttgtataatcctaattccttgagccggggtggtactcacagcatagtcattcccttgattagattataccatgtaagactgtcacagcacaatggagcaagattgtctgctggctttgaaggagaaacttccaatgttttttgagagggccacgtggccagaatctgagaacagaccataggagctaagagcaacaccagccataagctagtgagaaggtagaaacctcagcctcacaaccacacagaactgaattgtcaagacctggatgggtataacagcctgaaggaacagaaaagcctggtttcttctttgagtatttggagaaccataagcaattcaatattaaaaagtaagaacgggaacagacaagtaaggctggagaattggcaaaggaccagatcattaaaaaccatgtatatcctcctaagaaaagtaggccttcattctgtaaataattggaagccatttaggaactgcaaaaattaccagaaca

SEQ ID NO: 35451 - DNA, 1935 bp, Bovine  19866881143708
  misc_feature (1)..(1): n is a, c, g, or t
ngataaggtagcacctggagagaaaaataaaattcgcacaggaatgaaaagaagcgttgcatctttcagcaataatcaccagtgcgtacttccacttccccatttctgctgctgttggagacagtacctaaggagatctgataaccaggataaagtactatcagctgttgatttcatgagttccccaaactttctgttcaagagtgtggttccatcctatcccatttcacactgcttctctttgtaggaacttgttttctgtgaaaaataaacccctatgaacatcctgacggagaaggcaatggcaacccactccagtgttcttgcctggagaattccagggatggtggagcctagtgggctacagtctgtggggtcccacagagtcagacacgactgaagcaacttagcagcagcagcagcagcagcagtatgaacatccttgacctttctctttcaaaggctgccagacttagaaaaaccaaacaaaactccccaggacacccatttatatttgaatttcaggtgaataaaaaaacagatttttagtataagttatgtcccatacaatatttggggcatacttacagaaattattcaaactaatcattgtttatctgaaattcaaatgtaactaggtatactgtattatatttatctacttttgactcaaggttttatcaaaccttgattaaaagcaagaccctacaaacagctactgagctctatagctggaggtgagcaaagaacttctctctcacactttatgtacaataaagataaatccactgaggaacaaggtgtactgaggtgagaagccaggatgtattccctacacccttgctattaaacggtgggcctcagaccagaattatcacctcctggaagctcgctaggaaaacaggatcccagatacccctggccccccttccctgcaactttctcctccccccacttaatcagaacctatcctttcctgaggcctcaggtgatgtgcatgtgggttaaagtctaaggagtgctgtctataccattataggtacgggtcatcaagggacaagaaggaaaggcacccctccccatgaagagaaatcacctccaggggccctagaattttcacacgcatccctatttgacagatacgtgcatgacaactcagttacatgggctgtgacacacaggcttcaacaaatggggtaagagaccatgaataatccaaatggaatcatcctacttctcagaacaaccttgaaagcatttagaaggaatcacagggtcttaaaaacagtcctgcaaggccaaaccatcccccaccaccttggacagaacaagcccacccatgtggctctgaagcaagtgaatcctcttccactgagtggaaacccaagcctccaagccaccaaagcagtggtgatcgcggccttgctcacctgtgaggctaaagccgttctcccagcctggtttttctaaagcaaagagccagccaaatagacctccgatcggcgtgagcgggagaagggcctgggccgcgggctgcgggatgtggctgatggccgtgtaggctctgccgtcgttgcccaccacgtaagcatgcaggtccacgtcggtgaagtgcacgggtgtatggcccacgaggaggtgcccactcaccttcccattgactcgatgaggtgcccctaagagatagaaaaccctgtcaaccttgaccatcatccaggcacacagataaagccacccaccaactccccagtctccatcttcagcccttttcccaactccttaacatcccactggccatctaggtaccagacagacctgccttccatctctctcctcccctcctccctctctcccatccactttgactctaacgcactagcaaaatgggaggaaacatttctggttaatcctcaaattgggaaatcagctcaaacg

SEQ ID NO: 35452 - DNA, 824 bp, Bovine  19866881192200
  misc_feature (1)..(1): n is a, c, g, or t
nctagcattactgtgtgtgtttgtgtgtgtgtgtgtgtgtttattttctttctcttcaagtaggaaaaaaactccatgatggaaatttttttgtcttttttatcattaaaataatatctcacatagcagggggttcaataaatacttcttcagtgaatgaatgaatctgtcagctagcagtttaggcacaaagaaccctaatttttaattgaggccgaaggtctttggaaaaataaaatattcccatgcttgctacacagagagtttcaaagaagagaagacaactttagcacaattcatgcaaaaagaccaaacaaagccccaaacccctaaaagtaaccttcactacatagttcttatacacatttgtaaaagcatatcttttgtattatttcttttctgtttattttcatggctggtatttctcttctcatgaaatacatttccatgaatagaaccctactctacaacgtaacggtaggacctaggagtccaatttgtgactacagtccagaaccaattcgttcctaagtcaccagtttccttacatcattggctccctgtcatcctgaaggtgagatccaagctccttaacggatgaacaaggatggacagggtctgctgcttctcttatctcacacaacccctgactcctgtctagggctgaggtacttccagcttctcctctccctaccttggctgacctgtcccctccatcagcagcgctgctgtcttcctgtcctgaagtctctgaggaagggattcttgacctcttcttcctatcagacactaagaaaatcaaactaattcaacataaggtcaaa

SEQ ID NO: 35453 - DNA, 927 bp, Bovine  19866881207561
  misc_feature (1)..(1): n is a, c, g, or t
natgatggagagagaaagattaacatctgttaataactaataggtattccacaagaagagggagaatgggggcagagataccaaatatggagacaattactgaggattttccagaatgatgaaagataccaattcacaaattcagaagtttataaatttctaagtggattaaataaaaagaaatccacactagacacacagtgaaactacagatcaaaggcaaagagaatcttaaaagatgtcaaagaaaaagaccaattacatccatactattgggagctggacaacagctgaatcaaaggctgtggcaggatattttcaaaaggttgcaagaaaaatattttctaacccagaatttatatccagtgaaatttttttttttttaaaaaaaggataagataaacacagttcagaactgagtggccatcaagaaaaataaggagattccggatatttatttcatgtggaaggaaagagatcccagatgggagggcagagaagacaaaagacataaaggagcaaagtgataaatacatgggtgaatctgaatgagagcatgaaacactcataaatgcaaaacttaaaagaaaacatgatggaattaacatattaacaacaacaatgtataagtagggaaaggagtcaatagagataatgtactcttaagttccctgggaaatggagatggttattgattaatcttagcttatgacaggcagtaagtatgcattttgtaatttttagggtatccactaaaaggatagaaaactttcacacagtgagagggaaaaaatgaaggtatcaaaaataatcaacagcaagaaaggaaaataaaaaatagaacaggtgggataaatagcacaaaataagacagcaatttaaacagaactgctagtaaacaagtgcaaatgggtcaaatattccaat

SEQ ID NO: 35454 - DNA, 1110 bp, Bovine  19866881241099
  misc_feature (1)..(1): n is a, c, g, or t
ntttaagagatcttcagttcccagcataccagtgtaagataccgggttctggccttccttgtacatctttacgacaggaaattcggtaacattttgctcggtacacacatgagaccagtctgcgcagtttactctagcaagcagcatagtggatgtgcctaaataaaaagaaaacgcacatttttataaatgttaatgcagaaaactcagttgttgagaactgttgatgtctttatatcccgttctgatttcaacttctcggcagcatgatgtactcctgggggactctctccccttggttctttgcagcacctcctcccatccgctccaacctctccccagctgcctccttttgttccgttttgcaggctcttcggccagtggagtcgggagttccctcaaggctcagtttaagttgctttctcttcttgttcttcactctcttttagacaatctcaataatcaacaaccacctaataaatcctaaatttatagctttggcccaggatcctcaaagttccagatccatgtatccatactgccttctctaggtccctttgaacagaaacatcctcaaactcaagacgtctaaaaccaaacatggtttctttcctctgaacagtagtgaacgttgccatcctgagcaactctgaaagcaaagtatcacctttcacacctcttcattcctaaactccgcaggtcttacattatcaatccacacgccttccaattttaccacctaaattttgagtacctcttgcatctgtccctttctctttactgccaccattctagtcatcacttctaattcatctcccagaatttagtatgtctctacgctgaagctagagatatcttttcaaaactcaaatctattttggtatcagcccacctctaccaattttaccagtcaggtctttctcacccttcagatctctgcatgtgtgaccatttcagagaagcctccactggacaccctgatctacatctgattcttatactcctaaaggaccatgctcttttccctacctcatcatggaattatgtactcatttgtgttggatgaattgagcttcctgagagcagggactgggtctggtttcctcatca

SEQ ID NO: 35455 - DNA, 1256 bp, Bovine  19866881269797
  misc_feature (1)..(1): n is a, c, g, or t
natgcagcagaggcagtccttggagggaaatttatagctgtaaatgcctatattgaaaaaataagaaaaatatcaacaacctaaccttccacttaagaaactagaaaaagaagagcaaactaaactaaaagcaagcacaaagaaggaaataaagggactttcctggcagtctgggggttaagacttcatgctatctctgaagggggtgcaggtttgatccctgctcaggggcactaagatcccacatgccatgtaccaaagaaaacacacaaaaagcagccacctaaaaatatggcagattgaacagactcagacaatggagaacttagaagacaggagtgatatgtgtgctcattgcttttggggtgtagttactccaaggctttctcaatgcaaagaacttgagaatatgtgtacacacacagacacatatttacatctacattgcttcacctactttaatatgtcttaaattattgattcatattcttaaatccaattccaacccaaccatgcaggtttcattcttttgtattcataactcctctcttccacagtgagaaatatggttccaatagggataatgtacattgacttgtttgaacaagtctcctgtatgtaagcagtttgtcatctgtgctgactccgttcctccatatatacacctctctattcttgagaatgtattcctcattgcagattgcccccacccatataaataacttcctcagactaagtgtccatcattgtagacaccctccttatcccacctggtctgtaacatcccacatatgttgcttttcctcattgcaaagcctgccctgaaccacagtgcagaaaagaactaaaatagcagggctgagattgctatcctctgaaaggccttgccagtttggcccttagttggcatctgggaacttggatttgttcttccctaataatggttcactgtgcttaatggggataggcctaatgttttcacagatgtcataataatgctggaggaattaagcacatcctgtgtaactccattgggagaggactcttcagagccagactttcgtttcctctggactttgcaccatacccttgattcctttgctgggtaagagatgcaccatcatcagtctgccttaatactacacaactttatgtacgataaacttatttcaacataattccatttactgtcctctcccatcctttgtgctattactggtatctactttacttctacatatattataaataccaca

SEQ ID NO: 35456 - DNA, 1178 bp, Bovine  19866881333318
  misc_feature (1)..(1): n is a, c, g, or t
ntctatatgtatcttccccatggagctgaagttccttgaaaacaaggcccccccagccctattccttcatagttactttgcatagaattcactgcaaaatatgcattaattccatgtctcccaggaaagaaaaccaaggctttttctcagaaacaaggacactggtgtgactggcaggggcagggatttagcaggttgaacttcagtgatgtaatatgaagcaccataggggttgtaattttcaaaaaggatttgactcacagaagatgtttaaagtgaattttgctaaatttatctttccactgactttcatcataatataaaagatgcattcagatggaaaacattcttacctcaagatgaagaggaggcttggtgtagtagaaaacgcaccagttttacaatcagagagatgtgagtttgaatttcacctcattccttattccttgaataaatcacttaagctagtaattgttgtcaggctggcagagagatcaggtataggtggaatactgatgacgatgatgaaagtagttattattataatctgtcaacagtgaagacgaaaatgttctataagtaataaaacacaaaattagagtatacccagaatttagagctatatttagatagcatttggcaccccactccagtactcttgccatggaaaatcccatggatggaggagcctggaaggctgcagtccatggggtcgctgagggtcggacaggactgcgcgacttcactttcacttttcacttccatgcattggagaaggaaatggcaacccactccagtgttcttgcctggagaatcccagagatgggagagcctggtgggctgccgtctatggggtcgcacagagtcggacacgactgaagtgacttagtagtagtagtagtagtataactagtatacctggagtattctttcaattacaaagatgaaaacaaattcaaaaaggttaagctaaaagcagaattattaaatcacaagtcggggcattcaggtgtgtgtctagtttcaggcacatctgaacccagaatttcagtgatctcctgggagctccaactggctctccatgccttgagtacactttagccatagcatgggtcccatgagttgagtcaatccagaaggaaacagaaatgagtggcctgggatgagaaggaaccagg

SEQ ID NO: 35457 - DNA, 858 bp, Bovine  19866881393399
  misc_feature (1)..(1): n is a, c, g, or t
nctcccgccaggtgcgcgccggcgggagaaaaggacgcgtctctcctcccggcaccccacccatgggcaatacttccaaacgactcccagtccgagaaccgcgaaagagccactgtggctcccctctggagaaagcccggccatcagctccgtgatgttcacggccggggtgctggggaacctcattgcgctggcgctcctggtgcgccgctggcggggggactcagggcgtagcgagggccgcggaaactccatctcgctgttccacgtgttggtgacagagctggttctcaccgacctgcttgggacctgcctcatcagccccgtggtgctggcttcgtatgcgcagaaccggactctggtggccctggggccggagaggcgcgtgtgcacctactttgccttttccatgaccttcttcagcctggccacgatgctcatgctcttcgccatggccctggagcgctacctagccatcggacacccctacttctaccagcgccgagtcacccgccgcagtggtctggctgtgctgcccactatctacatagtctccctgctcttttgctccctgccgctgctggatcattggaagtatgcccagtacaacccggggacgtggtgcttcatcggacacaagcagaccacgtacctgcggctttacgccactctgctgctgttgctcatcatcgccgtgctggcctgcaacttcagtgtcatcgtcaacctcatccacatgcaccgccggggcaggagaagccgctgcggaccctccttgggcagcagccacaggagagcggaaagggtatccatggcggaggagacggaccatcttattctcctggctatcatgaccat

SEQ ID NO: 35458 - DNA, 1885 bp, Bovine  19866881720641
  misc_feature (1)..(1): n is a, c, g, or t
ntgttgtggctgctctaaaatatcagggactcagactcgttctttcttttgcaccatccttagcaagggtttctcctttaaggatgccttatggcccatgatgactgctggtgcctacctgccttgttaggtttttttctttgtcatcaaggagtgggaagagcatgagtatcagacaacctcctttaagacccttctaggaatgccaaacctgtgacttctccgcacattatgtacctatccttagcttttgggggagtctggaaaagtcttttaatgggggaacttgctattagtgacattctgttagtgaagcaaagagagtgggatggatttggggtggggaaccagcagtatctgtcatacctgtgttccagctactgagatgcttctgtggttccaacttaccattcacttctctgtttcctggcttttgcccatgatttttttgtcttgcttttattgtttccttccttttctacgtcattatctcctacttccttcataagattgaattgaattgtgcgtgattaaatataactcttcggtataagtgagcagttacagcatataagtcagaaaaaaagtaaaataagaaatgtgatctggagatacactgcactatttaactttcctttgtgtttccctaaccaagaaactctgccatttgctctacactcttaagtgttaaatataatcttttaaaggttaattgtgtcacagaagaaacatcgagatactgtggaagtgaaaaggatttgataaaagcatatttattcaggtaaactagtttttttttcactgggatggataaatataaagctatgcctctaaaatattcaagtatacgaaatgtcacgaagccagaaggaagctctgtgtaatggggatcatatgaagcttagcaaaaaagtctaagtaatagatttgttacctcccactttggcttcctaatcgatagattgaggagaatgatacttaactgtcagggttgttttggatattatatgagaatcttatgtaagctttgactgcaaatgcctggtaagtaagcacttagtatatgtcatgttctaagtaggtatgtcaggtcaggtgtgaaataaatgtcttactactttatttttgaggggtctacaggtttccaggttatagatttctccatactggggtcttctaatctgagtcagcaaactcttgggatttggcctaggaagtagggacaggtcctttatcctccgggacctactgctaaggacccttctttgtctcttctgcttgtctccttcccagcccatttggggcatctgtgtatgctgtgagaaagggaggcaggaggaagccctgttgggactcatgttttttcccagtctttttgccaaccacagagcttttcaaagtgagcctgtctatgaggtgtgtatagtaagtatttcagtgtgtgttatgaccagtgctctggtaggtgcatcggatagtggatgagacacaggttctaacatcaaagaacttccagtcagtgtgttagagccacaagtgaattgaatgctaaggaaatctttctgtaatgctttacaggggcaacataccgctgagagaattcccaacggataccttgtttgacgtggatgctatcgttgctcatgtgctcttgtaagttcagggggcacttgtttacttactcatttgttatttatctattgatttcattttagacaatcgcaatccattgtaatacttcagggccttaacattatatttgtaagcatcagttttatacatattgcttgtctgttttcccacgtagtgaagtgaaagttgctcagtcttgtctgactcttggcgaccccatggactaaacagtccatggaattctccaggcaag

SEQ ID NO: 35459 - DNA, 863 bp, Bovine  19866881845933
  misc_feature (1)..(1): n is a, c, g, or t
ncacaactgagaacacacacacaccagtaaatagctattaaacataatatacttagtattgtgttttccagatatccttgatatctttgtatcaaaaattaatagtattataaaatcaatgtcattatatatcatcccctctcacatttgtactagaaggaaatagtaaagtattagcaaaatcaaacctgagactaatttcttatattattctttttacagattttacttcattcattcatttaacaaattcctggggcacaactttgtcgcacacctactcttaccaggtattgtcctgggcaacagaagacagcagtgaaaagagtagattctcctgtccgtacgcagccgcagctgatgatgccttccagtttcagtgtgtttagagctggcatctcttttgtcatgatgtgtattttttatacatcagcagtagactctccagagctgagtcctcagacattcttcagtacattgcaaccaggaaaagccaccttagtttatttttgtcaagctggtaagtattttttatattttaatatgatttttgtgatgtttctattggtgtttaatcattatgctcagggagaacttattgtcaggattaataaaatgtgctttaaagctgctactatgatatgcctacctgggtttgaatcctgactttgcttcttcacctgttgtgtgacgtgggtcaagttacttaatctctctgtgtgtcttttttgtcatccataatgaggaagtagtgtgtgctttataaatttgttgtgacgattaagtgacttagctcatgtccctaatccatagtaaatactaggtgagaattagctatgagtaatatcatttcattatcattt

SEQ ID NO: 35460 - DNA, 739 bp, Bovine  19866882121595
  misc_feature (1)..(1): n is a, c, g, or t
naggctggcaggctacggtttatgggctcacagaagagttggatacaacttggcgactaaacaacacactgttcctatgtcgatctctaaataaaatacatatgtatatacacacatatatgaaaaattcccctcagcatgtacaatcagagaaatattttctctatgggtgactcagcaccctaactagtattttgccatttattatataatgatgataattggcaaaaatttcatctttgtttctatttgctaccagattgctcagggttaagttttacgatcactgcattgtttctaggtattctacctaattatctcctacttttattgcttgactcttatccttgttttaatgattttattgtatttgtgctttttattatctaaagactaattcttttcataaggaggcccagtgtaaataataaacaagaacttcaggacaccaggcacctgaggtaggcagaaaacaaggtcaatgtgggtgaaaaaacatgagaaagggaaaaaggagtaaaacatagaggcatttacttcatgatttttcatagaatagaaattaaaaagttacgccctctggattttgctttctaagatggtaagccacatggcacacattaacagtcttattcttctttctagtgagttcttttttttttttttaattttgaagacaaagtagaaagcaaaaattactagacagcaatttttagaaagcaaaatttaataagaatca

SEQ ID NO: 35461 - DNA, 902 bp, Bovine  19866880244153
  misc_feature (1)..(1): n is a, c, g, or t
nttacccggctgctgctgctaagtcagttcagtcgtgtcctactctgtgcaaccccatagatggcagcccaccaggctcccccgtccctgggattctccaggcaagaacactggagtgggttgccatttccttctccaatgcaggaaagtaaaaagtgaaagtgaagtcgctcagtcgtgtccgactcttagtgaccccatagactgcagcctaccagggtcctccgtccatgggattttccaggcaagagtactggagtgggttgccatcgccttctccgaaaattaccctaaaccttagcaaaactgactgtttgaagctcatgaaataagaaatgatgtgaaagataaacagaagccatgagtgtttaactctacatggcattctgcagcattatatatttcacaggagtcaaagtttgaactggactatttgttttgctttctctattttttacaattttcctaaatgggtctgatttattattattatttggaggggaggattttgtattggcttggtgtaaatatcagaattcagaaaataaacaaattcagcaaataataataaataaaagaggctactccctgctccaagtcaccatttgaataaaaaaatataggtaggggtttttgtttttgctttaaggtgtacttcaccacccccttccaagaggaactttctcattctccctcctgttccttctttccttcccacatcccgcaaaaatacatatcctcagaaagtccatgctccactctaacccataacaaagaattagatgcagcattgtggaggatctaggaaacacccagctctgcagagctcagattcagctgattagaatcagggagcagctgttccagtgttaccaccacggctgagaaggcacaaatgcaaa

SEQ ID NO: 35462 - DNA, 1338 bp, Bovine  19866880361175
  misc_feature (1)..(1): n is a, c, g, or t
ngagttctttttgtcttctttcttttgttctctgatcctttccctaggaggacacagttatcatgaagcctgtctaacaatgaggacatgagttgagttatggaagagctctgctagaagtctctacccatcctgactcatcccgtaaattatgctgcttcttgagagtgtgttgactcctttttagggtttgtctgttacctcatttatctgaatataagaatgttgagaacacgctttgctttaagaggcttattatgggataaaagaagggactgtgcccctgtagatatgaagcaagccccagataaacattttatgaaaggacagttttccaattaaagccttttagctcctatacttaagtcgtctttacattccctgtttgatctctgagaattgcagaattaacaataaaggaccttattcaatataagcccctgagtctgtggataaaggaactgaaacctaaaaaaactgacttgcgttgtctaaggctacagaactacttaaatgcagaactaggattaaaatctaaatctgatttctggtctagtgtgttcctaggaacacttaggttactaggaaactctagggacctaaacatcagttacctaagttgatgaggtgggcatgactaagttaatgcaaatcagcactcccaccactgaactcagcactgagtttcaatgccccacatcacagcgtggggtgttcaattatctctatttttaagtattcaacagtcagattgtattacagaccaatctgggcctggtggaggcagaatatcagcacccaaaaccccttcatttcaaattaaatgtaaattcactctatttttcttcaaggtggctctttgctttagctagaactttcccctcacaattgaaagcctttcttaggagcctcctgtgtgcaaaaatgttgacttcaaggccaagggggtcagaaccaattgccagaggcaaaagatgtatttaattataatgtttttgtttcgtgtgggagagcaatctaaggatattggtgagtggcttttctttgagtacctatgaaactccatgtagcacttgaccaagtatatctatagagtatgtcattgtgaagggctcagtgtctttttgatactggaaagcatggtctgaaggcagactatggaaccctgtcctcacatctctactttttgctgtgtagcctcaggcaagatactaaatctctctctgcctcagtttttagatatcaagtggagattaaaagtatggacctgggagttttaagtgagttaaacaaggagatccacccagtccactctgaaggagatcagtcctgggtgtt

SEQ ID NO: 35463 - DNA, 1814 bp, Bovine  19866880387995
  misc_feature (1)..(1): n is a, c, g, or t
ntgagtagaactttcaacactgtgtttagctgaaattccagtgttaacccaagtcaaataacattcctatccacttctccagaatttgtaaaagctatttaggtcctatttataattcatcaaacattgactgaacacctactgtatgcgtggcacacaacagaatcaaacaagtaatttaacatttcaaaagataactactaatctcacattggcttatttcgattaagctgaagaagtaatgatcttctcaaaacagtaaatttacactttaatactggctttcttgaaacactttggcaaagtttcataaacagacatatgtacgtacaatcatcctctcttatccgaggttctgcctcctatagtttgttactcaaagtcaactgcagcctgaaaataatgaggaaaattccagaaataaataattagcaagttctaagttgcaggccattctgagtagcatgatgaaatctcgcgatgtcctgcccgtgacttgagtctttcctttgcctgcatatcagctgttggtgtgggtggtttgtagagcttgggttcaggtaacccttactgtgcttaataatgacaccaaagtggatgtctagtgattgtggcgattaagttatgccaaagggaagctataaagtgcttccttgaggtgaaaaggtgaaagtactcaacttgaggaaagggaaactatccaatgccgaggcctatggtaagacagaatcctctctctttgaaattgtgaagaaggaaaaagaaacttcggctggttttgtttttctgtacctcaaactgcaaaatttatcaccacagtgcctggtaagtgctcagttaatttggaaaaggcattaagtttgtacaagatattttgagagagagaccacattcagtttttattcatttcagcttttattacagtatttttgttataattgttctattttattattgttgttgttaatctctcactgtgtctaatttacaaagtgaactttatcatagatatgcacgtatgtggaaaaaaaacatagtatattgatataaacgtttccaggcattcactgagaaacgctttccctgcaaataagggggactactgcaaaagcaggaaatcatgtgaaagatatagtcttttgtttctttgttttttattggggtagataaagtctttttttaaaaatccaagtttctcatctttaggaaaaatcataaaatcataatttctcatctttaggaaaagtctccaaagattttcaatttgaaatattcttttgtttttgttgttgttcagttgctaagtcacgtctgactctctgcgaccccttggactgcagcacgccgatattcttacttcccattaacttttcttgaggatccatgtatccaatacaggttaaatttactttgtcttcagtccaatttttgagaccttaaatgtattcttagatcttggtcttgacaatttatcattgtttttcttaatttaaacagtaatacatgagcgtctgattcacagaaagggatatataaggaaaagttctgctgctgctgcttctaagtcacttcagtcgtgtccgactctgtgcgaccccatagacggcagtccaccaggctcccccgtccctgggattctccaggcaagaacactggcgtgggttgccatttccttctccaattcatgaaagtgaaaagagaaagtgaagtcgctcagtcgtgttcgactcttagcgaccccatggactgcagcccaccaggctcctccgtccttgggacttaatcttagcaaatgtgttgaccaagggattaat

SEQ ID NO: 35464 - DNA, 1187 bp, Bovine  19866880483931
  misc_feature (1)..(1): n is a, c, g, or t
nttctgtgtgaatttgaacgggcaaagttcaaatgaaggggtgttttgaggtcctgagtttgtgtgtttttctcacttgtgatcacaaagaatgaaaacaagttgatgagaggcaggatggggtaagaaaatgaaatgtttgggaactgaaagttctcacgtgtaccggatacattttgagacaacctggtggatttgttatggaaatcagtggaggacttgaaaccatatacagttgtcttaaagaaaataagtctgtgtgctaccccagatccatattggaccaagaccaaatgtaaggataaggtgcactggtcaacagttaacaaatcaaccaacctatcctatgagagagatagatgccacaccttcaaagggcgcctatcttctcggggaaatgttgccctgagagctggggtatagtataaaaggctatgtcagggggaatatttttgaattgataagggagtttagaaagctaaggggaaagttccattagcagtttcagaagaaaacgagtttaaagggagagtggcattctaacatcattctacggtgatttgatctgtaactgaatagcaaattacaatatttttattttctgttatcaacttaagagtgactatcttcatattacaaagtatggcttcagttttacctgcttccaatacatccatgagatctgacaggaatacatatgttgggtgagtaattttgactttttttctattgactttgacaagatggaggttccttggactttatattaaatgttcagaagatggatctctacagttatgtaagtttcttaagtttagagatcacatagttggaaagcagttcagaatacaaagcaaaaacaatgccaattttcttctcagtggcattttctttcctcagttcttgggagagtttagctcatctttaagaaagtggggcaatatgtcaattacatctcaattaaagaaaaaagaaagtgggggcaaaacaattcaccaaaaaacatggaaaagctgaaccaacctgcctgaatgaacaaattcacagttcagcctgaaattcagtggtggaggttcagtctttaattccaagactatgtgctgtatctgagatataattaaaggggcctcctggtatctaaggcagatttaactgtgttgcagcatattgcaaagtgatttcatatg

SEQ ID NO: 35465 - DNA, 2009 bp, Bovine  19866880485560
  misc_feature (1)..(1): n is a, c, g, or t
natgtatgttgattttataatttgagattgtatgtaaatccacatgctttatttctgtgcaattggagatttttgattgtcactatttcaaggggaagaattttacattcaaagtggtccaaaagatatttattgatgtttttgccttaaaaacaaacaacaacaacaaaaaaatattgtgtatgtatcgctagccatggaacagattaaaaatttggcagtcattttaaactgataacaacagatactatactttatcttagccaaaaggccgagaagtgatgagaatcattttggaaaggcaatagaaatatgtgtgcccactgggcttattttggaaacaaaaaagaatttgaaaatgtcaagtttacaagagcagaatccctttgtaaggtgccagaacatggaacatgcttaacaagaatcaagcatagattattgacattcctcaaattgttagtggaagcacactgactgaaaccgcccaccctggccaggcaccatagtaaccatttgcatgagctgttttacgacaggagataaaacaactgaaaaggtggaacatggaactactaaaccaccaccacccgggagagttcaggaaaggtcaaaatatgacaccacgtgtccaaccatctcccagaatccttctcatggcatccgtcttggctgaacgaggcgtgcaccagcaggaaggactctgagttagaacgacaggctgaaggcaacctagaaactaatcccatcaccataaaacctgagactgcaagccatgtggcccgagcagttctcctgggttcctttaccctattctattgctctctgcccaggcagcccttcccaataaaatctcttgctttgtcaacacatgtgtctccacaggtgattcatttctgagtgttagacgagagcccactttcaggccctggaaggggtcccccctcctgcaacaaaatgagagtgttcatgagcatatttgcctggcagtgagaaaaatctttgtgtttttattaaatcatattaaaaatattcacagttaactcctactcacttgctcagaggagtttttgtcaacactttagtgagatttcttggctcaggcctttgtctggtcattgatatattaaattgtggcttaaaaaatatatgtatatatatatgtgtgtgtgtatgtgtatatatatatataattgtagtttttaatatcccccaaaccaaaagcatttaatatatttatataaatgagttataccatatataatgctcaataaattgatgttttaaatttcatcagtctacttatttttataaaatttagaatcaagtttttaatatctaagccttttaaaatttatttcaccttgaaatttcttattaagtttaaaaatttttttccttctcattagcattttaactattttaatgaatccctttctaaagttaatgatttcttgattttcttctttcatgtgtgtgttggttacagatgtccaatcaccccactcccactccatcctccttatactatttgaagtttgctgttattgttcggtccctgagtggtgtcctgactctttgtgaccccgtggactgtatgtagtatgtagcacgccagtcttccctgtccttcactatctcccagagtttgctcaaattcatgtccattgagttggtgatgctatctaaccatttcatcttctgccgcccccttcttgtgccttcagtctttcccagcatcagggtcttttccgatgagctggctcttcgcatcaggtggacaaagtcctggagcttcagcttcagcataagtgcttccaatgaatattcaggattgatttccttgaggattgactggtttgatttcctccctttttaagggactctcaagcgtcttctccagcaccacagttcaaaagcatcagttctatggggctctttatgggccaactgtcaacatcagtagcatcttcccaagtggcacagtggtaacaaaactgcctgccattgca

SEQ ID NO: 35466 - DNA, 1012 bp, Bovine  19866880521789
  misc_feature (1)..(1): n is a, c, g, or t
nctttacatgtgtgtgtgtgaaggcctctcctgtggggatgaggcccactgtgaaggccagcagtgcttttcctcgctgagcataaatgatggcttccacgtctaccagaaaggctgcttccaggtctacgagcaggggaagatgacctgtaagaccccgccgtcacctggccaggctgtggagtgctgccaaggggactggtgtaacaggaacatcacggcccagctgcctactaaaggttcccatggacttttctatttctaggtcaagggttttagtcagtcttatcctggttctttgtgggttaaaaatgtgagtagccacaaggctttcctcctactctttgaacaatgggtgacaagcaagttaggtccagtgaggaagagaaaggcatggcctttgggaatctataacgaggatgggcgtattagggaaagtgagcagagtgatatctactatggggacgatttggcagaccagatgtctcttggtgtcatgaggaggtgagtagctcctgatacctttttctgaaaggagctatgatatcatactttctaaaacagttgtgcttattaggtacttgtctctatgttgagtatgtagggaagaaaatggaacataaggctctggtatctgagaggaatgccttccttcttaagaggaaggagacaaagccattctcctgtatcagatgcccagtgatctgtcactgcaaattgaacctgggtgagatttcatctcaaccttgtaggttatgtggaatcttctccatattatagtcaatatggacttcagtcctcttctgaaactgtttccccataaaatgagccctgaactgcatctcaaagtccctacaaatattaatgtaccttagtctgtagattcagctcaagccaaatttactgtcttaatatatagcacatttttaataggtgtccttaatcaatcttacactcacacaaaaaagaaacaaactataggagagattatgaggagcatccaaggccagaa

SEQ ID NO: 35467 - DNA, 2637 bp, Bovine  19866880594822
  misc_feature (1)..(1): n is a, c, g, or t
natgaaaaatctctaggggatggcaactttgtgaatgctctgaagtgttatcctagaaaaattcacttgtgcacacttcaacattaatgtgcaaggttagccctgttcttgtcttccctggtggctcagacagtaaagaatctgctggcaatgcaggagatccaggtttgactcctgggtcgggaagaccccctggaggagggcatgtcaatccactctagtattcttgcctggagaactccatggacaggctacagcctgtgaggtcgaaaagagttggacatgattgagcaacaaacactgtcacttttcactttaaggtgagaattggaccgtagttgacttaaaatatttcagatatatgttttctacttaaacttttccctaccaagggggcttttacattacctcaaagtattcagagaagctttaactactagagctatttaaagagtatggaatgtctttgcaacttacaaatgaaagtgtgataaagtttaagcagtgttttaattggcttttcttagttttccctgaggcagataaaccaaactagcagaagaagctgacagtgaataacagcaagtaacaaatcttgctgatctggctcttagatattgttcttgacagcacatgcctaccatgtagaatttaatataaagctccctcagtagataaagctaatgaatattgtaatcccactttgaatagactcttgagttcttgtttccaggttttaggaataaatgtgcaatcttaaggatacagaacagagaccagtgcccaaaatgtaactcgtttgcttgaaattgttaagttatgaacaaaaacagggcttccttagtggctcagacagtaaagaatctgcctgcaatgtgggagacccaggttcgatccctgggttgggaagatctcctggagaaggaaatggcaatccagtctagtattcttgcctggaaaatcccatgaatgaaagagcctggagggttatagtccgtggggctgcaaagagtcagacatcactgagtgactaacacacacaaaagcataaatatatttatttataataattgcctataaattattatgtatataatacatacaggaagagagagagggagagtaaaaaagggagatataaatgataccaatgataaacttctagtccgtagtttggaaacactcgcagatcgttacaatttttctaccaccttcagaagccctggtttgtctctcctgggaactgtggtgtttatttttgcttactttcattttgcattgtccatgctaagacctggactaggggaatgggcaatactttttatgacccaaggcctggtacaaagccatcacctagtagttcacttgatgaaagtttctcaatcatgatcactggggctgggatctccagaaacttcctagaagtagtgggcccctgagttgggcctggagaaagagaggatttaaattagtgagcaggaggtcattagcccttatcactggggactgtgcagtgaagacaagcagaggagggcacacagtgggaagccatgagaagttctgaagaacagagagaggcggtaagtgcaggatgggctgagatggcgacctgagatagggcatgtgagtataatggcccacctgtgacctcagacagcctcacaccagaatcagaaattatcatgccaccttttaaattaattctctcatgtagcctacttcagcaagatatttcaggaagataattggaattggctggtttccaggtatcttaaagatcaaattccaaacaaaatgtgggcaaacttcaaagtaatactttttctgacatttctcagaccatggaccacagccactattctcagctcaagcccacacccgttctcagattcaggtgagaaaatgatgattgctctaacatcacaacactctctaccaagtagttaccctggtttggctggtggcaccaactagctggctgttggtgggagcatcctgccctctgctggctttggcaggaaaaacaaatttgcattgcctgttaaagaattaatgaaggttgagagttcagggttttatctgaaactaaatatttgcttgcgtgttgatgaggactaattaaccaaggaatgcatcccctgaatgacatgtggcttcttagaagacttccaatcatcagggaaaaaaaaaaaaaacctttgtgtagcatatgcatacttcttgctcagtaaataggggtacaatattagcatttttaaagaaatgtgaagaatcaacgctgcatctttaataatttttgaagtattcacatggtttatgatggaagaaccttgggagtactgtcacactgcctgggtttatgtataaattctgcaagttaactcaatctatctgagatgaagtctcttcatctgtgaggatcagatgaactaataaggaatgagaaagcacttcactgtgtccattgaaagtgtgacatcttaaatatatatgctattcacagattcacaccagaatatgcacacacagaatacacacacacacacacacacgcacaaagtgatgtggaggaggccaacctcagtgatatttcaggttcggatacaaatcactgcagtaatgcaagtatcacaataa

SEQ ID NO: 35468 - DNA, 922 bp, Bovine  19866880626046
  misc_feature (1)..(1): n is a, c, g, or t
nttcccctcttgaccaaacacagtttaaggagtcacaaggtttccttcaactaacccactgaagcccttagaacagctgtctttcccaaaactgtcaggaaatctcctcaagtagaccttcagaagagaagactgggatatgaactgcatgggaaacataactgcatgcatcttattagaagtcgtttaatttaattagcagcaaggccccaaccttgggaaaacccagcagaagtctaagtggcagatttcacagtggccacgaggtggcgatcttctgcatctatttgaaatgctcttctgtcatccggttttagcttactttcaatattaaacacatcattaattttaaaagtgtgtattaattttaaaaggatgcaagtagatatgatttaaccggtgagacttcaaacttgcatttcactcaaatactgacatgctctaaatggggaaatttagtgagatttccacatcagaccccagaaaaaagataaaaatctgtttgagaaaaggctgtggtccttgcaaaatgaaaaatgtcactcaaagaaagtgtcttaaaagccttctgggaagctggttttcttgagaagtagcagatgcactttggtcatcagaaaaaaaaaaaagcatcatctggtaaaacttccttttcactggtctgtagtcaagatcagaaaatgaaagacagggagtggggcaagagagagaggaagagagaaagggaagaaggaaagaaaagaaggaaggaagaaagaagaaaaaagctctgggtgaatatactaacatcagaaaataagagccaagctgaatcaaaaagaagagccaaactgtggcatggcttgtgtggacctgagcctttctcccagccattctagtgagttccccaggaggagcagtagcaggtgaggaagccagtggg

SEQ ID NO: 35469 - DNA, 1537 bp, Bovine  19866880657027
  misc_feature (1)..(1): n is a, c, g, or t
ntgaattactatgttgtgtcccaggaactagagtagtgtcataggccaattatgcttcaaaaataaacaaactcacagaaaaagagagcagatttgtagttttccagaggtgaggagtgaggggagggagaaatcggatgaaggtagccaaaagctgtgacaaacctagacagtgtattaaaaagcaaagatatcactttgcaacaaatgtccatatagtcaaagctatggtttttccattagtcatgtatggatgcgagagctggaccataaagaaggctgagcaccaaacaactgatgcttatgaattgtggtgctagagaaaacttttgagagtcccttgaacagcaaggagatcaaaccagtcaattctaaaggaaatcaatcctgaatgttcattggaagaaccgatgctgaaactgaagctccaatatttggctacctgatatgaagagccaactcattggaaaagaccttgatcctggaaaagattgagagcaggagaagaagggggcgacagaggataagatagttggatggcatcactgactcaatggacatgagttggagtgaactccgggagatagtgaaagacagggaagcctggcgtgctgcagtccatggggttgcaaagagtcggacacaacttagcaacagaataacaacaagccaaaaggtacaaacttctagttgtaagatgaataagtactagggatgtaacgtacaacaggataaaaagaagatattagtttctttcttgtccaggggaaagagcagagaaggaaaaatgtggaaaaaagccatagatatatgatatatctgaaaaggtgaaaaataaatctccgctgtacataatggaaacacacatagccttagaaattctctttctccccctcattttgctctaaaaatgtcaaaggggaacctctagagtattcaggaaacaggaatccattgtaatctccattgctagagagggataatcactgttaagttaaagtatatgtttcattcattttacattggcacttcagtcgtgaatacaccaggctatatttttcttcttcagtgacccatttgccaaaagtactacagtgattaaacactaagcaaatacatacatagataagataaagaatagcactgaaatgattgaaacctaaatttacccaacacatttaagcctggtgcagcaaggcatatgtgcgtatctgtctttattaatggatttctatttctagcttctttccccctccttgctttggtaatgctatatgtaggtacaaaatctagatatttattcagaaattggtattttactactgatgagttgatacaaataatgtaactagggtcattataatgttaagtgagttttgaacaaatagagttagaaatccaattatctttccatagaaagctttttgtagagtcattgttataaaaaggaggggaaccagtgggaacattagaacaacaatttctcctgcctgcaaaggacactggagaatttcatctagcacatacattaatctgt

SEQ ID NO: 35470 - DNA, 2198 bp, Bovine  19866880697177
  misc_feature (1)..(1): n is a, c, g, or t
ngtcccagcaaggcagagcatctcctgaaaatgagtatcagtttaaacatatagcattttcatctgctttccgagaataatttccagatgtgtcctctgtgaagtaagacttcccagttgtgaaggtgtgaagaggtcgatttagtggatttgagagatgctgctctgatacccactttgtgggtagatgagatacatgttgtacttgaatgagaataggtattgcctccagaatgcagtaaacttaaagttcaacagtgcatttttggtatttttggctgataagaaagacggaggtgaaaagttatggtagggaatataggttaagagttatcgacaaatatgtgcttccctagtggctaaggcaacaccaccatttcatgaaactttgttatacaaggaccaggatgagcctcctattcagagcttcctggatgtaaacttcacttactcagcaagtacagcctgcttcttacaaaggagtgaattcctagtgtgcaacttgagtctcttctcaataatccaaacttgagaagtaaacttatctacaatagcaagattcacccttagatttacttgagcattctcctcatgataaacaccacttgggaaaagagcaaaggaggaggaagaataggagaaagacagaatcatgaggatagaggaaagaagaaaaatatggactgaaggaaaaataccaacaatcaaggaatatgtagtctctggcagaaatactttttctatcaccatctccttttatgcagttgaaacagactgcccttaggcaccttccaccgaccagccataaatcaaatataaatgccgatagcttcacaaatatgattcatggaacaatgtggacttaaatattccctttgcccttttaaaggtagcaggatcaagaggactcagacaaggacaacgttatatgagatcagttacctaccattgctcaccatccgcctggccacctcccacaagacaagtccaaaggcccaaatatcgactctcttgtaagaatcaaaacaatccacctggatagtttcatcaagaacttcgggggccatgtagcgtttggtgcccacacgggggttgttccccacatcgagctgattggtgctctgggaatgcatgactgccaggcctaaaaggaagaagacaacagtgtcaacccactccctttctcacagagggttgctgaaggttttcaacccaacccagtcaactgcgccctcttgtggcactcaaggtgactgccatattccccccaacacccccgccccccgcccagtcatccctggagtgctgttgtgatgacttaggtgagagcaggaaacagggctgatgccagaaacatcctgggtgtattaagttaatataggaacctcagagacaaaaagattttgagtgaataatacaccaaatcaatatgaagctggtgttcagaatccacaaggaaacagactcacttgttaaatgggagcctcaaaagaagctctcagctccagtacagctcccactggtctccaaacaaatttcaaaccgtttgaagaagggactttgaggtaatttatcatgacacaaagaggcgactgctccaggccctgctctatccctgaaaaaggaccactcacctgaacagttgttattgttaagtcactcattcatgtcgactctttatgaccccctggactgtagctcgccaggctcctctgcccatgggattctccaggcaagaatactgggggtcggttgccgtttccttctccaggggatcttcccaacccagggatcgaacccacatctcctgaattgacaggtgggttctttactactgagccacctggaaagctccatctgaacagtaacctgggccaaacccacaggcttttttctcaacagccacatgtacacagaacaataagctgaccccagattcaaagcacagctctcatgttaaatggttttgaagcactttcttaagccatgactcatttcggaattcctcagccaactaaagagacccacattcctcacaaaccaagggacagatacacgcatggtttatttgagaatggaatttttgatgcataggcagaccaactgaaaatgatttctctgacactgagaataatgaaaattgccagagtgaagttagcaggctgtgtaaacctttgtatctcagtgggggatcccct

SEQ ID NO: 35471 - DNA, 4652 bp, Bovine  19866880699195
  misc_feature (1)..(1): n is a, c, g, or t
nagcagctaggcttaatggactcttatatatggatctggagaaggcaatggcaccccactccagtactcttgcctggaaaatcccatgggcagaggagcctggtagactgcagtccatgggatcactaagagtcagacacgactgagcgacttccctttcacttttcactttcacgcattgggagaaggaaatggcaacccactccagtgttcttgtctggaaaagcctggtgggcttccgtctctggggtcacacataataagacacgactgaagcgacttagcagcagcagcagctgcatatatggatcatgaaaagttacagcacctctatcactgttttaggtgatcacatatcttgaaagcgaaagaaagaaagtaaagttgctcagtcatgtccgactctttgcgaccccatggactgtagcctacgaggctctatccatgggattttccagaatactggagtgggttgccatttccttctccaggggatcttcccaacccagggatcgaacctgggtctcccgcattgcaggcagatgctttaccgtctgagccaccagggaagcccaaatggtctgcaaaatggacataattcctattgtgttgttatgcatgctgggaggattaaatatggtaatatgcatgcaggtctgtagcatagcagtatctggtgcctgatctgtgttcaaaaaattgtggctcctgttattatttactttgcaaggaaaactgggacactagtggtgttgaatgtttccatgttccccaaagtcagattctaacagggtttagtaaacagtccaatgtgtgtggagtagtctggtgtagagtacgtcagtcctcgctacttgtatggtatttatttgaaaaatgataggaataaaaacacacttagtgactgtattcctgagctgatgtgatgctttttattatgctcgctctgtaaagctacacttcaaagttcctacctgcaaactgggaggatagaggttagagtatggcttagttagtattaaatttgtgtttttagccataattttgtgactgttaaggtctgagaggtttaatctgtatcgcttgttttttatcacagagatgtgattaaatacattgttctttgtactaggaaaccttgaattcatctgctgctttgctggtttacagactgaagaaaagagatcatagtagaatgagcctcagaacggtttcctgcccagaggcaatattttggattaaaattcctttctctaggcactgactcaatggacttgagtttgaccaaactcagggagatagtgaaggacaggaaagcctggcatgctgcagtccatggggtcacaaagagtcggacatgactcagcagctgaacgtcaacaagcccttcagtgtatcagataatttcgggctagagggaggattgggcacggagtgctagaaattgagtgcattgggccgtatctgactttgaatgttggttttgttactggaggttgaagactttttttttttaatttattcatttttaaggaggatatttgctttacaatattgtgttggtttctgctgtatttcaacatgaatcagccataggtatataagtatcccctccctcttcaaacctccctcccatctccctcacaatcccacccctctaggttgtcaccgagcaccagattttgatttgagctccctgcatcatacagcaaattcccactggctgtctactgtacgtatgttagtgtatatgcttccatgctactatctccattcatctccctctcccgctcttcttccccaccctagtcccaaagtctgttctctatgtctgtgtttccattgctgccctacagatgggttcatcagccccttctttctagattccatatatatatatgtgttagtatacagtatttttctctttctgacttatttcattctgtataataatctctaggttctggatgttgaagactttggccagagttaattggctcatgagttaaagtattccttacgtaggagcatatgttcatataattttcatacagttgagggagtcttcttgggtttagggccttagagcagctctttcacagttagatgaatgagagaacttccatgtggagttttccacctgaacgtacactgcccgagggtaagaacttggtcatatttgctatcatacctccagtgcctaagacctgcgggcccgcccccacccaaccccgccccagctcagtacgcgttagtcaagtccacaaatggctttgggaaggaaaggaagtgaattggtggggttcagaatgccccctggactccatgctgtcatttctgaatcagcctttcctaggggtcaggcagttgtttagaggagcgatccctccattctgggggccgttatgtgttgggacatcaactatgtgccagacaagccaggaactgggaggaaataccaccagagacttcagccagggtcgtcttcagcatatggcttattacagtttctgtttttcaatggatgtgacaaaggatagttccctagaatgactcctcctaaagtaccggggtgatctcgaggttcgagggactagaggagtcttctaaccattaagcctaagtcagtcctgagaattttgatccattttattgtccctgagaagctgatggatacatgtggacattgacttacttacatgatttctctttcttaatggccttcttttgcttctttttgctgctctctccagccccaaccccaggtgaggatttaagttcagccctcacctgcttcctgccccctcaggtaaaagaatgaattataaaggtttggagttcctttgtgactgtcacgatgagaaggggttgagagtgagctggtcttctaattcccttcttccctccctccctctattcacaattttgagcctatgtgttctacagtttttctaagcactgagatcttacatgattttcaactttaaagtcccctcttttttgatctttggggatccaaaccaagtatggacaagaataagtagggtgagaaacagggttcaccagggtgtctgtaagttcacacgcacgtttcatcattttgccgtacctggtaggtggtgctgaacttcttgggggaaaggcctgccgttctgttaccaacaagggagcaggaagtgtggttgctgtcaggcgggcagccaggaggatatttatagtcatagccagtggctgtgggcccatcatggttctggatatgcctcccgccttagagttcctggtgttcttgaactgaaccctgcccttgttggccagacagtggttaatgataaaacagatggctgcacgatgtggtgctcatgatggcctgggtagctctcagcctgcaggtgctgctgtggctgacctgaaccccgagtggcagagcagggatccctctcccacttctggtcagggcctcaatggtttctcagcctttctctgagttggcttcattgatgcaacactcactaactgggatcccctttctctgtgctgcatggaccacatcttgtggagatttatgacaccaaaaagaaaatgcggatcatgattttagcttcctcatctccttgaattcaggtcagatatttagacttgccttgcagaagaggccacagtctgttgacactttgcatgtattcactcactttggggtgtgagtactagagggaaaagtcaaagttctcataggaagtatcccaaatgcaaaatgtttttcttgtttacatggtgaggttatagcatgagttttgtgtttatcagtgggtgttcttggggccctctctggtggctcaggtggtaaagaatgtgcctgcaatgcaggagacctgggtttcatctctgggtcaggaggatcccctagagaaaggaatggttactcactccagtattcttgcctggagaattccagggcttccctggtggctcagcagtaaaagaattctcctgccaatgcaggagacacaggagacattgttcgatccctgggtcagaaagatcccctggaggaggaaatggcaacccactccagtattcttgcctgggaaatcccatggacagaggagcctggtgggtccatggggtcataaagagctggacacgactgagcaacagcaacagcagcctgggtgtttttagggtggaatgatggttcatttgttagtttgcatttgcaagtggcagaaaacacaacgtgggttagccttagtaaaatgagaatctaatgttggtcatactgaggagtctagagtagggcaagttttagatctgggttgacccaggactctagcagtgactcctggaccctgttgtctcccctctaactcttctttctttgtcagctccattctcagtgaggtgctcccttcctgatagcaaaatgaccatggtatattctctgaggttcaagtataatggaaaaatcaaactttgttttctagcagttcctgtaaaatcccaagggtcactctgattggaccagagtaagccacatcccacacctctggagaatgcagtgtgctgattggtctacttcccctaccctgccatcctctcaaaataggaggagctatagccccagcccagagtcagaggttaggcggaaggcgcaa

SEQ ID NO: 35472 - DNA, 1468 bp, Bovine  19866880727513
  misc_feature (1)..(1): n is a, c, g, or t
nattggaatgaaaactgaccttttccgtcctgtggccactgctgagttttccaaatttgctggcatattgagtgcagcactttcacagcatcatctttcaggatttgaaagagctcatctggaattccatcacctccactagctttgatcgtagtgatgctttctaaggcccacttcacattccaggatgtctggctcattagcatttagtattttatgtttcagttcagtcactcagttgtgtcccattctgcaaaccgatggcctgcagcaagccatcttccttgtccatcaccaactcctggagccttctcaaactcatgtccatcgagtcagtaatgccattcaaccatctcattctctgacattcccttctctgcctgccttcaatctttccagcatcagggtcttttccagtgagtcagttcttcgcatcaggtggccaaagtactggaacttcagcttcagaatccgtcatatgaatattcaggactgatttcctctaggattgactggttggatctccttgcagtccaagagactctcaagcgtcttctccaacaccacagttcgaaagcatcagttcttcgatgctcggctttcttgatggtccaactcacatatccatctgtgattactggaaaaaccatagctttgactagacagacctttgtcggcaaagtaatatctctgcttttaatatgctgtgtaggtgggttataacttttcttccgaggaggaggcgtcttttaatttcatgggtacagtcaccatctgcagtgattttggtgctcccccaaatagtctgtcactgtttccattgttctcccatctatctgccatgaactgatgggactggataccatgatcttagtttcctcaatgttgagttttaagccaggtttttcactctcctctttccctttcttcaagaggatctttagatcctcttcgctttctgccataagggtggtgtcatctacatatgacattgccagagaaggcaatggcaatccactccagtactcttgcctggaaaatcccatggatggaggagcctggcaggctgcagtccatggggtcactacgagtcggacacgactgagtgacttcacttttacttttcacgttgatgcattggagaaggaaatggcaacccactccagtgttcttgcctggagaatcccagggatggcggagcctggtgggctgccgtctatggggttgcacagagttggacacgactgaagtgacttagaagctgcaccttgggcttcctgtgaaactttgcaggatgacacctttaacattcttttgctcttaagatccttaaaggaatctgaggcaccaccttaagtctttccagggtcttacacttacagtctacaggttttacctttagaccatgttttcctggcagcacccttgatttgatctcagcccagaagccatttctgtcctttagcat

SEQ ID NO: 35473 - DNA, 1214 bp, Bovine  19866880764146
  misc_feature (1)..(1): n is a, c, g, or t
nctgattcatctccacatccctccactcagctcatcaaagtatctcatacacagaggagggcccctctgaagtccagagaggtttgggcctcttccactgtgatgccttctggtattatataaagaaatgccaaaactcagtgacaaaaactgtgtatgttttaaatatttacaaaacatgccaggcaatattattgggctggtctcaagataattacatggtccagtaatgagacaaaagttcaaagttgtatgatccaggacgccttctttcaatcctgttggtgtacttctgggctctgtcattcagaagtagtattaagaccaatgtgaaggccttgaaagtgggctgcttgggccaaagagaacttctgttcaccaccaccaccacctcccaagggccctacatagcggcgagtggaggagtcgtggaagagtcgggaaacaacttcaacagtgaacacaaggtctctatcctcagggaagttacaaactaatttttttttaaaaaaggacacactttccacccccatccctctccaaatataacggaagaaatgttgcaccagaagaccaggactccatcctggatccatctttaatcatggacaagtcttcaacacatttaaacttcaggattttttcttttccctgtaaaatagaatatattaattttggccatgccttctatacaaaggttatctaaaggctcatataagatgtggtggtattttagtaaactgcaaagcactccacaaatgaaagttacatgggcccaatggttgagtatttaatcacatgctgccttatcattgccattaaaaaaaaaaagacagttataaacacacaaattcagaatccggcattgttatgtccggcaaacagtaagaaaaggggagaaaaggtgtgtggttatgacttgaaagtaaagcagtcttatggggccccagagagctctggcaatttttctgtgaatatctgaatactccttgtaatcgttactccttgttgaaataacttccatgagtaaccacagagatgactactcctcaaacaaacccagatttactccctaacaccccatactatgccaggcttcttctgcagttagaacttctagagtcatttgtgcgagcaagtctcctccctctcaacccctctaatctcatttccggctcatgctaagcttacataaacagaacagcctaaattac

SEQ ID NO: 35474 - DNA, 1124 bp, Bovine  19866880818145
  misc_feature (1)..(1): n is a, c, g, or t
naataagtatatttgtgttgatgtccattaattcatttactgggcctccctggtggctcagagttgaatatccctgcttgttcatagaaaggcaaataacattcccccaaactagcttctattaaaaattttctattcttagataatttgggggaattggcacactaaatcctccttttggagattcataattcaccctactatatcataataaatcttttgagagctcctactgtaaagaatcttctttcactttatcttagttttcctcaaacttactagacatccaacacatttttcatggcatacatgtcatgtgggatgttaacatgtcctatgggatgttaacatttcatgggccatcaatttaagaaatgaactgattatcacttgaaacagctctgtatgttatgaagagtaaaaaaaattagtattcccttataaattatgtttatcagtcaggattcttcagaaacaactgagagaaatctaactcaagctaggttaggctgaaaagagaatgggttgattcacatgaatgagaatccagaagtgggtcttgcctcagggactcaaatggcgtcttcgggttcctctcactctccacttatctgtccatgtttgtacactgaaatggacttcctcatgtgtctgggttgggggagtcagaaggaaaaggaggcatggctactagcagttccaggggtaattgtatcatttgagcttagcaactaaagagagaagagaaagcttttattcttcaatcagttcagttcagttcatcaagaggctctttagttcctctttgctttctaccataagggtggtgtcatctgcatatctgaggttattggtatttctcctggcaagcttgattccagcttgtgcttcatccaacctggcatttaacatgatgtattctgcatataagttaaataagcagggtgacaacatacagccttgacatactcctttcccaatttagaaccagtccattgttccatgtccagttctaactgttacgtcttgactggcatacagatttctcaggaggtaggtaaggtgctctgatattcccatctcttgaagaatttcccacagtttgttgtgatccacacagtcaa

SEQ ID NO: 35475 - DNA, 898 bp, Bovine  19866880820590
  misc_feature (1)..(1): n is a, c, g, or t
naaaatgtgcccaaggtcacaaaggtcttaagtggcagggatgatgcttcagccaaagacactgacgtcccttgccacactgttctacagagggaggtgggtacatacaggcacacatgcttgattgacctggagtttcctctccaaattcccaccaattatacaggtacaaagcccttttccttctgcatcttcttgcttatattatacctggggattcttttctaggggtttcatgtatatttgccttgtgtttctaattagattgtaaacccctgacccgcagggaccagatcatccattttctttgcaaccttctccagtaccgcagtcacccagtaatgcctgctgcatgaatgaacctgtagagataaaaatactttatggtattaccatttattgctttcttgcttttatttggctttgtaataggactacattgtaaacttctggagggcagagaaaatggcttagtgctttccttatactcatcaggcaccgtgcaaaatttgatcctcacatgcctttttgatgctctggataatattagcacactggagtgttttgtgtatctaagggccggggttgtcaacctctctgtgtcggggaatgttccttcctttccactgtaagctcccatggcgcctaggacagggctagattaccgcagaacaccagcgccccccgctcccgacgccctcccccccttccccgccccaaatgcatatttttattcctaaggaggcggtctgcgaaaatggcaagctcttgcataaccccagaccttgcgagaaaatgagcaaagtggaaggggatttgaaggcaggtcagaaatggcctgggtgagaatgccaaggtttttccctgtacatccagcctaagtcggagtccagccgcg

SEQ ID NO: 35476 - DNA, 1241 bp, Bovine  19866880989534
  misc_feature (1)..(1): n is a, c, g, or t
naactgcatgggtcccttttgcttttgtatataataatttaaaaccccagttttcccatttttgagttaagaaatactccagctccagactgaatataatctttaatccttgttgtaatatcttgtttactctatcaatgataatcctgcaattcccagagcccagtagccttcatttcttggatcagcagatgaatataatatggaattaaagtcaggattctgctcgctttcatcaaactctagtaaagtaatattatgaagactgaatttatccccaaagttcccagtatatgtcaaaagaaataacagtgaattcttcctttaccctaaagataaaccactgtgagtactgccaaaaactaaagacaaagaagatttaagtgaacctaatcttggataaatactaggtttcatatattgtcatgcaagcaagcacgtgtcaaaaggcagccagcactgtcttttaaagatggataaaaactcaacatacttatcacaagttcccagtgcaaaaggaatatcatctttaaccagaatgttaggggttttaattaaagtagattttgttttaagagatggaaaggtgtgtgcatattatagaaccatagatgaatatatgtatatagcattgtacagtgggtttacatggttctgaaggttcagcctttcaaggtagaataatttggtgaagaccactatttccctcacttaaatctttgttaaagcaacaatggactcccactattctttttcagcataatgagatcaagataacaacagtgacatagaggtgtccatggctctgtttcaagtagtttgtccatctatcagatattaggagatatagaagtattatatgaaccttatagcaaaaggatgcttaactttataacattttgccacttcctactgggacgagtatgaggcattccagagtcctttagataatcccaagccataaatgtagctgaataacaagaaaccagttgagtttgttatagctatcttctatggtctatagaagttgagtagtcattctttttattcatttagcaaatatttattgaaggaccatatacagatattattctaagtgctaaagatatagcaagaaaattacaaacagcattcctgttcttgtacttatgttgtaatggagagagatgctaaatatatatcttcatgtattaatacatgcaaaattatatgtaagttaatatataaagaaataagaaatg

SEQ ID NO: 35477 - DNA, 1080 bp, Bovine  19866881039186
  misc_feature (1)..(1): n is a, c, g, or t
nttgaacacaacttagtcaactaaagaacaacaaagtaccaagggaaaaaaaaaaaaaaaccaagaagaggaaaaaaagaagaaagaaaggaaagaggaagggaggaaggaaaaaggaaagaaaggagaaattttttaatctttgtgaatttacaactttccctaaagaaaaaaaagagtgaaattggtgatggtgaaagcagtggtggttatcaatgctcagataaagttcagatccagtttagatacctcagcttctcctaggacagttttcatgacctcctcgccatctcctatttctggctttagggaaacgaactcctcaagattaaaaaaaaagatgacaagatgtgaggatggtctccacgtttcctcccctgctgaccctttctgtttattaaaagtatgaaaaattattgatgtgtatgagatttatatgaccttcacatcaattaatttgcatttctttagtacatgctatgaggaggagatgccttagaactaggcagagatgtggacttgatcaattgcttcaaataacttgtattgaccatgggcacaaaagtctgtagtatatttatgttcaacttaaaggtatatttcttgactgtatgtgaatgacattcaactgaatagaaactaagatattacaatggagagatgtatagaaaatgaagatatagtgactgaaaagatatatacggactcgacagctgttaaaaaaacattcgcacagagaaaatagaggccttcatccagacaacgtgagtttttatgaaccatttccagattagtgcatccttcccaaaagttgctatagcaagcagctacataaatttaaaagggtccaaaacatccttaaagaaaccacagagtaatttatcattaaaactgctcctcttcctttcattaaatttttcctcaagtgaaaagatgctattattgcaagggtgaatccatgaatgtattaatataaatatcaaaccttcgactgcctccctactatcaccaactcccccacaaaagagaagcatttctttctctaagcttgtggctttgaaatgttctcagaataaataa

SEQ ID NO: 35478 - DNA, 1122 bp, Bovine  19866881078497
  misc_feature (1)..(1): n is a, c, g, or t
ntctaggtagaagctttttcttcaaaccctctcttgtggttagaagatggctaccatctgtcctgggacaaaatgcttcctcattagaaaatctctcttctaaccagtgaataaaagttctcaccttcagtctaattaagctaatatgtatcctgcacccatcccaacagcaggctctaggataataccatgaactgattggcttaagcttacattctgaaccaatcacttgcaaggggattagaattactctgactggcttgagtagaaaaaagaatcagtttcctgagacatttaggcaacatgaaagagaggggcttttgtgaacaacatcagggctctttttgaaaggaggagaatagtagagatgaatgccatatagatgctaaatctagtcagaggggaaagaaggtcttactgggtgggtgagtttagggggaagagaagctaggtagctttcctttctctttgagggaaactggccctctcctgatggtggtacctttctttttgtggtaatagctataacacttacccttaaagccctgcacgaaatgtagggctttaagggtaagccctgcttcagtcgtcctacttctctgtatctgactgtgtcatatgaagtcaattaggtagcgcttcgtaggaaggctaattatggtcaaggtccaggctctacttgccactgtatatgtactggaaataaacctggctatttgatcatcatcagttggattcctgtgtctatttctaattaattcataaccagtgggaggcatgattatcacccctaaaaacttgctgtctggagcaagccagaatctagaggactctgggaactctgtcacacagaggaaatgtagagttcaatgttgaaacattcagttgccatcaaatatctagatatatctagatatatcagatattcaggaagttcaaagggtgtgaattttcacaggcatagctgtggagaaggctgttctgctagtaaggagaaccctgtcattggaagtattcatgcacaggctggatggcaatctttcaagtgtgctttaaaatggaattctgcacatttgggaagttgaacacagttgtttctataacaggatccaacttttagtt

SEQ ID NO: 35479 - DNA, 1883 bp, Bovine  19866881228367
  misc_feature (1)..(1): n is a, c, g, or t
nttactataaactaaccccaaattttattaccccttgcttttgttttagattaatgtgttcagtttaattggaaggcccttccataatttgttctaaacaaaatttaagacctttggtttacttcatgctgttcaactaaagtcagacttacctgagttttccctttaaagcaaagcagacaccattcatgtggtctgtcctttcaacagaaaaccatgttagttttttatccacataatattcatttccagtccctagaaacaatttctagagagagcaaatttgccacacatacagcaagtagcatataaatatgcatcatgaaaaattttccacacacagagaaaacatcatgatttggtttggaaaacaagtcattttaaaagttgtggaaaataggatctgttcctgtctttaaggcaagatctgccgctgacagtcattttagttattctgtgcctgtaaccagctttccctgaattaccttgagataatcatggagtgtgatcaattgcaagctcatatattgtaacctcaaaaagaaaaaaaaattctttttcttgaatttgttcataaaggacagctattcttaatagaaaacagttttgtttcccaaatcacatttgaactgtttaattattgactttctaaatatcaagacaatgtttatagcaataaacaccttggaaaacattgcagcctatgattatctattgtgagatagaatctctctttttcatcatcaaatataaaaaaaaaaaaacttatagggaaagtaatcataaaagttgaagtttctacccatgtaaaagaaacacatcttctcttattgagttccttcttataaaactagtattttctaccagttactatcaaggttttgtattgtgtgtctaaaatcatacacactttagaaaccagctgcttcggcgtgtgctcccaattgcctctacgacaccctctatctcccttcaggatctaaatcaatgtatcctcacagatcaacctgcctgtcccaatagtttcttccatggctgacgaagaatctgcacccttctatacaccagttgctctaagtgttattaggatcaacccaaattccattttaccagagtctcttgcgaagtcttaaatctttctggcatgtgctctgcccctacctgtgctgcagggctggaggtggcagggaaaaggcagcgagagcagtgtggctgccttctgggagatcctggcccggcacagagccggggaaggcaaagccggaggaaggagaggaggaggaattcgtgtgccactgcaaatgtgaaagggtgccaaaaaaaacaccattctttttcccaagaagttcaaagagctttgcaaacattaactcaggagcccaagtagtcatgcagaaattattaacctattatgcccttaaagtaaccaccgcaagcaaagtcatgagcaaagggagtctattcgttgtttcactagacctcagatgtttattgagtacctactacgtgtgaggccctgaaggtacagaaacaagcaagacggccaagatctgtgctcctccaggctctaatgctagtccccagcctttgtttgcccagtcagggtacaaagcacctggctacactcttattacacttatttacactttatttttgcccaaattgtttaatgggatgtgctccatccttcagaatgcctataatgtgataagtgctgaggaaacacagaaaagaaagattacctgtaaatctcattacgatgatcagagttggggagtatcagttcaaagtgctttattttaagaagccataagcaaagctttattgtgagtagtcctgtctcttgcaatgtttatggaattactataggcagacaaaaagag

SEQ ID NO: 35480 - DNA, 807 bp, Bovine  19866881415287
  misc_feature (1)..(1): n is a, c, g, or t
nagaaatccaaagagaaattccagcaccaatctatttctatgaggatgagaaacatatatatctgttgacataatccagcaaaaagtttactcttgccaaaagcaagttgaaagataatatttctagggagtctagacacgcttgccactctcggatggcacaaagctgtgctgagagttgccaactatgctgcccagcaggtgatggctctctggagggaaatggataggaggggtgaggggcagagttagtggtgtcatactgacttgcgatcagagctgagaatttaaaagtatatgttgaaaagctgttgagtaatgtaatgtatgtaaatgtgaaacacaaatgtgtattttaagaccctaaataatttttaaaggtcatggatatccaaaaatacataactgaacacattaaagaggttgtatctgttgatgcttggttggggaagagggcttgaaggggtaaaacgaaaataacacaggagagaagctggccacagactgataatgaatagaggaggatgaatcatttacttgctacacgtacagtctgccaggaacaacaacaaccaccccaggccatagagggctcactcatcactgattctatggaaacagatggttcagggtaccaaagaattaatcgcacttggtggttataataaaaaaaaaaaagtcaattaaaagaaataaaataatgacaataataatttctctaatgtgccttcagagtgaactcggttcttaaagtcagagcccaaactccaggagcacaggcacaagatgtctcctgccttgccaagg

SEQ ID NO: 35481 - DNA, 1939 bp, Bovine  19866881432331
  misc_feature (1)..(1): n is a, c, g, or t
ntttagactacatgttccctactctagaatatttctgcccctacatagttaggcttagttccacttattgttttctttcttttttttttaatgctttggtaattagtcttttttttaaattgttttctcatttattgtggctgtgctgagtcttcattgctatgcaggcttttctctagttatggtgggcatgctcttactgtgatggcttctcttattctggagcacaggttctggggtacgtgggcttcagtagttgtggttcctgggctctagagaaaaggctccatagttggggcccatgggcttagtggctccatggcatgtgggatcttcccgaatcagggaccaaagctgtgtctcctgcattggcgggtggattctttactgagccaccaaggaagcccctctacttaaagtgtgtacttaataacctcctttaagttggaaccttctctacattcctcctcccaaagctggttaggtgttccccctctggactcgctccatcttctgcccgcccctgtgacagacagcacctgccagcctgtactagacccgctaacttatgtgtctcccttactaagctggggaatcctcctgaggccaggaatagcacctttgcttcctgtgttaccaacacatatcagtacaaggcgtatcacacagttggtatccgctccccccaaaaaaaatacacagataaaagcatgagtcaactagacgataaaagagtttaagaaaaagacaatggaagcattttttacttccgacatttcacatccatttcccatggacatatgtctagttagttagacatttgcacaaagctttggtgattatctcagtcaccagcaaaaaggaacacaacatagaaatcactccagggtcaagagcgaagagaggaaaagaacgaatagaattggcaaacacagaacacacagcagagtgtttatctgtgaaagcaacttcacactgcccaatgtcacgggttcatttactaccttttaatatttttcataaacgccaatgaacaactggtggacccctcaccaaataaaacatctcattcagacttgcagatggcaattcaggttatcaactgattaaagcatcctccctagaaaaacaactcactcgagcctccctcagcagaaatgccaacttttaatacaggaatcagagcagaactgtgggtggtcttgggggaaaggctttataaactgtaaaatccaccagtggtcattactgtctgaattatccttgtgaggtgatggtccttcagcaggacagtggctgaattaagtgagagaaatgacttggtgctccatctgactcatgttttttctcctctcaagagaaacaagctctaatgatacattttctgatgaccaaacattaactcatccactgaaatctcctcaatgactaaaaagttccttgcttcataataaaccagtagcctgaaatgttaatgtaaatacacacaagggagtcaaatttttatatttttttcctcaagccatgacaccctaaaaaaaagtcatcttaagagcagattttttagacatgactctagaaaaggggttatccactacttgcccttcgtagaggcaggggaaaaaaagtgctctaatatgcttctgtcctgtggctgtaattaaggttgaaaaaggccttcagttttccccttgaagacgtcatcagattcgaatgactcctgtctcatcctcatctcccctcaatgtgctcttttaaaacagcttccacgtctttccacttcccctgggcaactaactccctgctttcaacttttcaccgcttattcaaaacgtctcctctcttgtcttaaaaattgctgattccatttctttactctctttcatcatcattccccttccccaaatcctaacactagatctttaatgactcatgggaa

SEQ ID NO: 35482 - DNA, 726 bp, Bovine  19866881564367
  misc_feature (1)..(1): n is a, c, g, or t
ntaagcacaaaccaagatataagaggataccagagggcaggccaggccacgggtcagaggcagaaacaggcagttcagtattaaaggcaaggcaaatgtggggatcaaaaggctggttggatagtctgaaactcagctagaggaacaaaagagagccccaggaattaaagggggtggggaaaaaggaacagcagtgaagtccccgcatgcttctagtagaatctaccctcttagccaaggagtttctttgattacagagccatttcagccttgtgcttcttgtcccaataattatcaagataagctgattcagaactttagttgaaaagaagaaaaggaaaattagatgggcctgtcttacataacataaaagaaaaataagtgtcatattataacataatgaaaacagtactaaagaataggaaccagaagaccaaggttttagtatattatttgaatggtgtaagacctagggaaagtcattaatttaacctctattaggctctgttttgttctttgtaaaaaaaactgaactggataacttttgaatgctaagtgagctatcaatttttaagagtttatgatctgtatattttactcatctgaaatatagattcagataattatgaatccaatccttgtatgccaatggaaaatcagtgaggagggccattaaaatatccagataatgtatcagaacataattctcagaaatttttggatgat

SEQ ID NO: 35483 - DNA, 755 bp, Bovine  19866881595428
  misc_feature (1)..(1): n is a, c, g, or t
nacattgtaaatgtgaatctggaaagacagcaaaatgtaaatgcctgtttggaatgttactattaattgcatttggaaaagaaaataatttaaaacttgaaaagtccacagaatcattagcaactagcattcattaatgctggaagaagagattatattatatactatgtgtcacaagtcaactctaagtgacattcttctgtaaccacctatttattcccacactgcagggattgcacctggatctgttgtaataacagatgaagctgtagactccttctttaagccccggtttgaacaggtaatcttggacaacattgtcaccagaagtactgaacttgacaaagaactggctgaggaaatattcaactgtagcaaagaaatttccaacttcccaaccctcattggacatacgatgtgtacttatgatttttatgaaggtgagaagaatttataaactgtgaaagcagcagaaaattaccagcaatattttgttattcaaacctataattaatattaaaaacttcaccatagagaattaatagttggggatttaaaaaggcactgaaacagccttttcaacttactaaagtaaagaaatgtaaggacataataagcagaagagacatacacacaatgaatttattttgagagtgagtttaatcctccaagaacaaattggatactctatgcaattagtgatgttagcaaaatcttatactctgtttatacctttaatttaaacggagaaaggg

SEQ ID NO: 35484 - DNA, 779 bp, Bovine  19866881748856
  misc_feature (1)..(1): n is a, c, g, or t
ncttcctgatggaattagtgcccttgtaagaagccacatcagagaacttgctgtctctttgccataagaggacacagcacgaaggaagctatctataagcaagaaatagagtcctcctcaggaactgaattggccagcaccttgatctggcaccttgatcttggacttcccagcctccagaatttagagaaaataaattactgttgtgtaaaccacccaacatatgctattttattttgatattctgagcagactaatacaatctattttatgtatttgagtaattgtgaaactagaaacaggaaggatattatgataattcaagcaagtagcattcatttggcttagtctgttttgaaaaatatttcagtgtggaaactattcatgttgacttaaatctagttttgagacgttattgtttaaaacatcacttctgtgataagtcttctgggagaactttcttaaacatctcaacatactaccttttattatagcaatccactcatgccttgaatttttaaattttgttttaatttttaaaattttgtcttttgttttgcatatcggtacaccccagtttgttgttggtggtcagtcacaaagttgtgtctgacaccttgtgaccccatcgactgcaacacccaggcacctctatcttccactgtctcccagagtttgctcagattcatgtccattgagtcaggtatcagtacttactgcctgaggggtaagtacgttggacagtcttcctctgcttcatcagattttgatactatgat

SEQ ID NO: 35485 - DNA, 949 bp, Bovine  19866881752558
  misc_feature (1)..(1): n is a, c, g, or t
nctacagaacttgaccttgtcgagcaagctgaaaaataaaagtacacagttactgaaagatccttaagacacaactgtaaaatgttctaaatcacaaaggactcttctttggccccactcctgggaaattgttacagaaaggcagtaatttccattctctagtgatagcaaaggacagctgggaaaggaaccattcaggtattccatttgaaagattaaaacaggcttcgataataacaccctatggcaaaagagttaatgtaatgttgcaaaattccaaagcttccaaaaagaacttcatatctaatctgtatctaaaatagcctctgaaagtttaaccgcagcagtttataatcacactgaaatccaaaggaaaaataacacccatagaatgacatataaaaccaaatagttgatagtttggggagatgctaatgaaatgactgtttattgtaatagttcaatatgttactgtttttagaaggataaaatcatctaataactagaagcataatttgggtaaaatgagggactcaaaatctcaattattatgatttatttttgcaatcattttaaaagagtacagtaagatttctatccaagaaaggaaaggaacttcagaatggtataaacattgtaaatggcataaacttttgcttccctggtagctcagacagtaaagaatctgcctgcaatgtgggagacctgggtttgatccctgggtcaggaagatcccctggagatgagaatggctacccactctggtattcttgcctggagaatcccattgacagatgagcctggcaggctacagtccatggggtcgcaaagagtcagacaggactgagcaactaacactttcactttactcctctgcatgttttgggaagagatcatttaaagataagcttccgggatacagtctatcattataaataaaggaaaagtt

SEQ ID NO: 35486 - DNA, 1459 bp, Bovine  19866881850602
  misc_feature (1)..(1): n is a, c, g, or t
naaaagtctacccttgagcttttcctatgaatatttaatttaatggacagagttgaagactcttttataaaactttgcatctcccactaccacttacttgattgtattgttatctagtggtttacttctgtttttcagtttagctgtttatatggttgcattctattccaaaccctgtgctaggtgttggggtagaaataaaatgaatacatcccctaaaaggcccaaaggctacaagtaattctgaacagaagtgaggtatttaatcccatctgcccttcatataagtatacatatatgcttccacatatataaatatgagacataatctgatgagtattgatagcaagaataatatttttaaatataaacacattatgatttacagatagcatgatatgacctacctaagtactttacatctgaaataaggataaaagccaagcaaatggagataatgaaaataaattaagaaaatatgagtacagtatagttgagaggttgagaatgcttgggcatatcaagtttattgttctcttccacgagaaggcagcccactgcatagctgaatggtccccacccttgttaatggtacttatcaggacaaaatcaggctgaaacaaaccatacaaactataataggccttccacagttagtccttataaattaaaaatagattgttgttcactcgctgtcgtgtctgattctttgtgaccccatggctgcagcacgccaggcttcctcgtccttcactgtctcctggagtttgctcagattcatgtctactgagttgggatgccctctaaccatctcatcctctgacgccaccttttgctgccctcaatctttcccaggatcagggtcttttccaatgagttggctcttcacatcgggtggccaaagtattggagcgtcagcttaagcatcagttaatgtatctatttgctatccagaacttctaagaaagtagtcccgtaattggactgaactatctgctctgttccttttctgcataaaaagatgaattaacagagataggacagacatgaaggagccaaaggaaacctttctggatattctacaacttggataatttattccaagattactgaaaacaatttagattaaaacaaacaaacaaaaagtcagttgctgccacctaaaaaataattattaattaatgtaattaattttttaaattaattaatttgttcaacagccatttactgagccaccagatgaagtcatttgttcatctaacctacgtgtcgagggccctcctcgagtgctcttctgacccctgggaatacaatggtgaactagacaagaaaggtatcatcccccatggttcttgaattctggtgtcaggagataagtgcagacattgagcaggcgcagacacaggatagtttcagaggcgggtaaggatctgcagaaagcaaaccaggggggagggtt

SEQ ID NO: 35487 - DNA, 1051 bp, Bovine  19866881913171
  misc_feature (1)..(1): n is a, c, g, or t
nccaatttgcccattggagttgcttcactgtttgctctgggtatttgacctttatttctgtgactgggaaagtgactttaaattttagcctttccagattttgtggaagttcatgcagcagttgaagtttgtgttttggaggatggactaggtcagagggacctatttagcacagatgtcctgatgggtttgtaggagttcagctctctgatcataaggctaagtcttggctgttttgtccttttccacacttttggggagaaccaaatcatttagggctcagagtgctttcattgcaagcatgtgcttcctggattttaccttctgacattcttctagtgtttggccatcttcagtactcatgctggcatttgactgatctctttgggagcaaggacttgaggttattcatttctctatttttaaaattctaaagaattcagtttctgtcactgaaaacttttcaaatcctcttaatgggctccatgtgtcttattcatcttttgtgtatctcttgcaccttatataatacctggcccagaccacacagtcagtaaatcattttttaattgctaagagaatgaatggttggttcatttatgaagggcaaaataacccagtactctggacaatcagggaggtggtctcaagagatgatgatgccagacacaggtccttaaatgtgagtttgggagctggggacaaaagacactcttaagtagaaggaactattgtttatatccctttattatgtatggtattataacttgtacttagtgatctcaaaagacatctattcttttcaatatatgtttccttttgggattgttgttgagtttcaggatgacacttcttttgaggggaagaatatctcaacttatttttcctaccctgcagcgctaggactcctgaagtactgtgtatgtgtgggggcagtggggcgtggggctggtgctcaacattggtgaattgactccttgacactgactttctcctgttgcatttgttctcaaacagtggacagtgaaaatagtgtggcaggcagtactcg

SEQ ID NO: 35488 - DNA, 749 bp, Bovine  19866882151124
  misc_feature (1)..(1): n is a, c, g, or t
nctatggttgctcttatattacttgcactcctgtcctcggtattgccatgttaagcctgtaacccactaacgcccaacaacaggtggcctgtataaacttaagatgctggttgatattcactgtgacaaaaacacccacttgaacaaaatcaacacttatttttattatgtgattatcttttttttacaaattaagtacatcaaactttttttctggttgccttatttaccggttaatgatgccaattatttaactcatgaacattaacccagaatgtctacatatatccttaagtatataactggaaaacgaaataacaatattaaagttgaaagatgacccttgccttttatctcaggtacttaggtgggtaattgtttatttttattatcagtttgtctgtgttggtggaagccccaacagaatgaaagcatttgcactgtttatgcacaaggagcttagattgacggacagtgaagaggacatcaaggatatctgtgctgggacagacagatattgtatgtacaaaattggtcccgtgctctccatcagtgtaagtactctaatagctgcatgtcacgtagtcatcacaagctagcaaaagaaagtaggaccttccaaatataggagtttcttttcctctccttctttgcattttcacacagttaaatgaagtgtccaggtgtgacattcatagttggaaaaagttctaggggcagaaaataacattctgtgccactttggtata

SEQ ID NO: 35489 - DNA, 1218 bp, Bovine  19866880104162
  misc_feature (1)..(1): n is a, c, g, or t
nctgaccttttccagtcctgtggccactgctgagttttccaaatttgctggcatattgagtgcagcactttcacagcatcatcttttaggatttgaaagagctcaagtggaattccatcacctccactagctttgttcatagtgatgctttctaaggcccacttgacttcacattccaggatgtctggctctaggtcagtgacacaccatcatgattatctgggtcgtgaagatcttttttgtacagttcttctgtgtattcttgccacctcttcttgatatcttctgcttctgttaggtccataccatttttgtcctttatcgagccatctttgcatgaaatgttcccttggtatctcagattttcttgaagagatctctagtctttcccattctgttgttttcctctatttctttgcattgatcactgaggaaagctttcttatctcttcttgctattctttggaactctgcattcagatgtttgtatctttccttttctcctttggttttcgcttttcttcttttcacagctatttgtcaggcctccccaaacagccattttgcttttttgcatttaggaaaccttgcctgccccaaccctcccaagccccacattaagtatcactttatgtttcattctgaaacacatttattttcagaattaagtcacatgcctaaccctaggtgaatcactggcaaaggagaataggattagtataaccaattatgactcagtccctggggctggacatgtagccacctctattagtagagaagatgtagctgtagaatgccctgccaataatgtctgctccaactacaggaaacatgtaaactgtctcccaggatccagtaaattttacaaaagccataaaaagtaaccataccagagtaagaacaagagggttgttctcacatacattatgagacaggaatgagtagtagctttcaaccagcatttccatgatcccgacatcccatttccccagatttctaggccactttggtggtgttgtcatcctttgtactcactcattgcatacatggcacgagctggtactcaataatcctgtgcaaatactaaagcctgacctaagggattcagtttgcatcgctgttgcaaactttttttttcccacggtaggattcagtaacccacatctaaagaaaaagaggagagacagttataaaacatgataatacagtgatgtgata

SEQ ID NO: 35490 - DNA, 1442 bp, Bovine  19866880369693
  misc_feature (1)..(1): n is a, c, g, or t
nacacagtgcagaacactagaaaatctattcaatacatctgcatagtcttacacaatctagaacatagagatgatttcctggtccagtgatcactttggatggatatcaaagatcattccagtgaacttcttggttgtattttgttaacatatgatacattcacaaattagttcctaaactgtgttttgagacaacactgtgattcagaacattcttataatgccaagaatgctactctgattctacagataaactcatatcatacacttacaatgtgggagaaagagaatataatgcaacctgtgtatcaaagcttagtcaccccctaaacagaccttactacaaaaataagtatattcagaacatggatgacaaatctcagatctgtggctgaaattagcagttgatgatattttaataaacattattaccattgttgtgggctggctgcttcttattcaagtggtgtgtttgtaggaaataactagtgccataaagcttcctgacaaaaatcacatttctattttgcaaataagaggtttttatttttttaatgtcacagcaaatgagttcttctttggaattcgcctgtgcttttcttaatattatctgctggcagtggctttgtatacttcattgtttccacagaacatattttgctatatgtatctgaagctgtataattgcacctcctggttgtaaatcaagagttggcgttaattaacagttagtgctgtaatgccccactgataaaacaaatgtacccatttcttctctgaagaatcagaagtggcaggctgtcacttcgcagaactttctcatttccctaaactcataataaagccagcctcgttgtctcttcaggctactcagtcagcatccagcagtttgtgtctgtgctcattccatatctactctcgctcttctgtttactgaagcgctatagctgatttcaggatcactttttaaaaataaacaattacagtactttcgaatttggggttttacccaaaagaggatctaattatccatcacagatctggaccagacagttattccttacgaaacctaaggttgattcaaaggaaattattcctgcatggggacatgtgtcaagtgcattataacagtgctgcctccttggtttatatggtgtcccctccttccgtccagttttgtaggctggggatttaagtgtcatcttttatactttgtccttccagtccatttccagaccattcagtgttcctgaatattacctctgaaatccattctagcatgtcgtgggtgcactcattttctcttttccaaccatccctgctttgtcagttagtgtttcacagtgacttcctaactggtttacccaccattcacttgtgctcctgtctagcatttggtccacattatagtcaaagtgatattttcagattaactagtatat

SEQ ID NO: 35491 - DNA, 596 bp, Bovine  19866880536965
  misc_feature (1)..(1): n is a, c, g, or t
naaaaggtcgtacttcaaaaactgcctaaaaatttccatgtgtagctcagcatttcatagcagaagtacattccccctcccccataaattttcacaccctcatgggaatttccccagtaccagaagtttttattttttttttcattgtattttctgtgatgactaatggccacaggattcagattaatagccgaatacaataagctcagtgaaaacaaggacctgagctgtgaaggctcaacgctattcctgtctgcattcttatgaggactcttccttggtctccccagtctcacctgtctggcttcccgctgtggggagtccagagggagggcgagctttcgtgagagtatttgggggcctgggaggggattctaaggattcacttcctgcctgggcaggaaaggctccatccccagcctctccatgtatttccaggtcctcacacacgtttgtacctttgcctcaatgcccccacttaaatgcgtgtgcctgtatcccttttcacagtcctcccttcagacacctgcggtccctttctaactcaacatgcactcacctttcttaggctcatcagcggtccctaagaatgtcat

SEQ ID NO: 35492 - DNA, 1138 bp, Bovine  19866880561520
  misc_feature (1)..(1): n is a, c, g, or t
nattgagggcaggcagagaagggaatgtcggaggatgagatggttggatggcttcaccaactcaatggacatgagtttgggtggactccgggagttggtgatggacagggaggcctggcgtggtacagtccaggggtcgcagagtcggacacgactgagcagctaaactgaagtgaactgaaatgtgtttattttcacctcacaaagcttatttttactgttacaaagatagcagtttataaatataatcaggaaatattttcttgttaacttctattttcagagcttcagaaagacgctctgaagatttctttagttctttttattaaagtataataaacatgaagaatgtgtaaattcttagcatgaagaagtaaatagttttgataaagcattacattaccaaatttatcatttaccatttttttggtaaatcataccaaacaaacaaacaaaaaaaacccacaatattcttcaaaaaagaattttaaagtcagatttaatcatctttttttacaggggctaactatccaagatgcacgttagccattttcttgttcctctagacacaatttataaaaattagatagtttcagcagcctcaaatagtttagctgtcagatggcctatagctcatgagaatgaaatgacttaaaaattttttccattctagagttttcatcatcctagatttatatgttacctcttggttccttccaccagaacaacaacaacaaaaaaacttaaaatgagtagctcttaagctctgtgggattgataataataagaggaacaagaaataaaagatgataacttacatggcagaggttactctatcctggaatgaatctgcagggatccaattcgagcctttcagaaatatgggaagtccattaattttgaagtagaaactcagaccaggagaattttgtatgggctcttctacaagttccactgtcctaaaataaacctattgttaacagaattaaataatgaatataaaatttaaaacataagcatatgccaaaaccaaactatattatttactatagccttaaaaaaatacgagtttttattttttaaaaagcaaacttctgagcagtttatataagataatttagtgttaattttttatcca

SEQ ID NO: 35493 - DNA, 2835 bp, Bovine  19866880617165
  misc_feature (1)..(1): n is a, c, g, or t
ngcccgtccttaggctaagcatgcagcccgtgcctccctgttcagccctcacttgctggtggcggatgcgagcgtctgggcttctccactgggagttgtggttaggtgcggaatctgtgggttttatttatttgtttttttcctcccggttatgttgccctctgaggttctaaaactccccacaaacctaccggtgagagggttccctggtgtttagaaactttgtcctatctccttttgaagacaatgggctgcctttctgggtgcctggtgtcctccaccagcattcagaagttgttttgtggaattttctcagcattcaaatgatctttcaaagaatttgtgggggagaaagtggtctccccgtcctattcccccaccgtcttaggaccgcccccctcagtctacacttttaagagggcagtcagcatgtctgccttgttccttgctgaacctccagtatatagcaaaaactgcatacctggtgcatggtaaatgctcagcagagatttgatgcattaatacttgacattgccatagattctctctctcgttcttgctgaaaaatgcctgactcgcagtaaacacttgagagagacttgctaaatgaatgattcttctcaatgaaataggaagtcagttcattaagtgagataataattaaaacattttgagcgctaggtactggattaaataattatatcctggctgctgtaacaaactgcagcgttttagtggtttatgtagtaaaagtttcttttttactgagtaacactacagaatggctgtttctaatgggcaggcagctctcctgtttttcgagacccagactcctcccatctccaccatctcctaggcctttgcctgtgaactggggaagacaacgagaatgtagtctcacagacttcgaataggttaagaagccacatcctacaggcagctccaaattacagaaatggaaatatgaatttcagtggaccctgagccatctcttccacacatttccttttttttttttttttttaccatttcacaatagcccaatgacagaagtactatttattatccccattttacagataagacaactgaggcttagacctgtcccaaaacaatatgattctaacttgagatttaaactcatgttcctctgattccatatcccattctacacttaattatagccaaaaggccaagaaacgatccatagcccattctaaaccattagacctttgtttctcaagtggaagtgattttgttcccaagatacaggagaacatttggcaatgtctgtagaattttttgaggggagtgggggttaggtattactggtgtctagtaggtagaggtcaggtatgctgctcaacatcatagagtgtattgatataaaacctcccccactcacagcatacatacacaaaacaaaaacttattaggctcaaaatgtcactaggccagaattctgtaccagactgtatactacccatgatgggggaaggtcaagtgtaggtaagacatgattggaaaagattaggaacagctgctgtgaggtataagctatgattcattatgaaacggagaaggcaatggcaacccactccagtattcttgcctggaaactcccatggacggaggagcctggtgggctgcagtccatggggtcgctaagagtcggacatgactgagcgacttcactttcacttttcactttcctgcattggagaaggaaatggcaacccactccagtgttcttgcctggaaactcccatggacggaggagcctggtgggctgcagtccatggggtcgcacagaatcagacacgactgaagcaagcgacttagcagcagcagcagcattatgaaaagatatgaagagcgacttccttggtggtccagtggttaagccgctgagcttgagggaggcctggattcaatgcctgatcagagaattagagcctgaataccacaactaagactctgtgcagctaaattaaagtaaaaaagaaatatgaaggattggcaaacagcagaaatgtgctggtggctgtcaaatgtgaagaatgtaggtggctctatcatttttctattagctacttgactaaatgacaacttggcatttctgggacctgatgatacttttaaagaagtaagtgatctgtactttactgggtgaaaatattatctctttaaccattttatttctgaattcagggagaccagactcgtccttttatcacatccagtcctacaaatggggccaaaaccattgcagaaggttggctctctccaaacccctatgacctgaattatggggacgtacatttttatgattatgtgagtgactgctggaattggagaactttcccccaaagctcgatttgtatctgagtatggatatcagtcctggccttccttcagtacattagaaaaggtaagccatctttgatttcccagggattcagaattgtagactatgggcatatgtcacttcctcaccatggttccgaaagtcaaatgaaatctatttcttgtttaaacagaagtttaggaagaagataatagggaagaactttttatccttaacttttggggcactaaactgttatagtcatcattttgtggattataacttttccatattgcttttatttacattctttcaagagcatttaaaaattcagtgggaagccagtgattacttaaacctgatttgttatgtgaaatacatgaaaattactttcacttactactttctatatgtcctacaactgtttttattatttatggatactcagaacggatagtttgctacagtaagagaaagagtaaataaac

SEQ ID NO: 35494 - DNA, 1468 bp, Bovine  19866880618841
  misc_feature (1)..(1): n is a, c, g, or t
naaaattcttgtaaatcactggcttttctaactgaaaagtttttcaattctattttttctcgacaggggtgatgtatttatccctgcagtagactgtctgctttggcaagtttctgaagcttcaagtttgcagtctctcggcaggatgctgaatttcattgtggagtgactgctattatacccatagatcaaaggatcctcattcataaaagaacattcctatgtaatgggcttttttgatattacctacagagacatgttgttttatttttgctgttaacattatatgctactgttaatacacacacaaccacacgtacacaccatgggtttttcttcagttgtctccttgatatttctgcttacctggtagagatcatttctcatgttgataatttcatcagaaatcaagccagatgtgacttccagcagatctctcacaagctgattatgaaggtggatgattgccaagtgtaagacactggaataaaaatatagtggcaataatcagctaaagtgttaatggaaaaaaaaaaaaagaaaacaggttcccacgataggattagatttgtaaactgaatttggctctcatacctagtttcctttggctcgcaaatgtctggaatctatggaacatcctgaatctgaggtgggtgtgctctactgcctgctcacttacagagcctgcctggtttctcggggctcagttcagactccttgacgtgtaaaggagcctggactttgaggcagagaagtctccaagttcaaatcctagtcctgcctctgtgctatggtttcagggcattttcttctctaacttttccctgccttacttggactcacagatgatacgatgatgagatgatatgcctgaactaggatttgttcagaaaaatatagttatctcacctagccctgccccctcttccaaaatacaaggaggtggctcttgaagaacttcctagatcccaagaggggagagtagagttaggctcttaactacaggaagaagccttgatgcaaacctccggaggaacaatgtgattgtatttctcccctgaattctctccgctgcctggaatggttttgctcctcttgtctgcctcaacagtgcctctttatccttcatgctccagtccaaaacttacatccttggagaagactttctcagtttccaaggcagagcaagctgtcccccgctcaagtttcctgcttggttgagcaactacagttttctgtacatcctctctgtcttctgagcctcttggaggctggttctctctgggtcagccttacagccctggtacacaatttagacactaaaataaggatgactgaacaaactgagggcttacagtaatgaggctgaaaatattggcaggtgccaagcatcagtcctaggaacaaaatttttttaattactaaaaaaatttactattaaaattaattgggaaatgacacaacaaga

SEQ ID NO: 35495 - DNA, 2630 bp, Bovine  19866880637572
  misc_feature (1)..(1): n is a, c, g, or t
ntggttcttttatactatttgtatagatgggatttttagtcggtgatagcctggaaggtaagtgcttctcgcacagaagtgaagttttgaactttcaggagaccccaacccaagacagctcctactataatagagtagcaataacagtaatagtctgatctaccttgctgtatccatgcacagataccactgggaaagagactcaggcagcctagaaaccaagttcagctttgaatatttctaggctcatacatgcgtaggtagtctgagttgcctttatttaaccaattctctgtattggaaaaattggcattaactggagcatgttgtgagggaagaaatctattttttttttccctcagaaagtccaaaaaatttgccctgtttctgttttgtgtctacttttttagaaggatgttaatccaaagcgggcaagtgaggagaggtgaccactcctggggaagccaagtgggcagggcttgccacctcattttgcacagagctgctcagctttatacactggaatttcacatgaaattttatgtagagataaaaaaggagataaaaaaagtcttctctgctgacagtgttttcaaaccatcaacaaaatgctctatgaacctgacccatctgtggcgatgtcacaagctcagaaaagaagaatgcacggaaccattttctaaatgctcctgccacaacatgaattctaggaaaagcaagccctcttagaagatcagccatcacatgctgccatcacaggatcagcgggcgtgtgcgctgctgctgcagcacctttgcggcttccaacctcagccaggacctgggtgcctcgtccctccccactctcacttccccctagtacagggccttctaattttgtttgtgccacagcttcttttgcagccctggatctcttcttaggatcatagttttcagtatgtaaaatagaaaacagaattacaaagaaacccagttgttttaaagtacatttctatccatggacctgcagaggagtcagtggactccaggttaacaaatactcttggggcctgttacactctttttgagaggattctcatggctgaatttcccattctgcccgcttggattccagtcctgtcttttgaatggcctatttggaatctgccacaggaacctaaaatgcaacgtgatttaaactgacctctgcctttgcccacccaaatctacttctgctccactgatccttcatcaattcatccacatcacaatcttcccaggtgagaattcctagaatcatctatgactcctgattttctccttcacttcttaccccaactaacagctgggtcctcctgacatcatcactgcgctaagaccttcactaacttctccctttcttacttggattcttgcattattcttctgactcactgctgcccagacagtgtcttcagggtctatgtagagaaggcagaggcatcattctgaatctaaactggcttggtccttcccctttcccatttcaaagcacaattctgtaggctccaatcacagcacgccagagcctggccctaccttccttcaggagtccatctgggtgcgccttagcctcacttttctctgaacatacactaactgttcctaagccagggaaaccctttccttctctgtggcacactcaactactgaaagacatgcccaactttcatgactttgaagaagctttcttcttgtggcttcttcagaatctagggttctctctccttggcattatcctatgtttttatggctgttttactttcagaactaccaaaataataatttgcattatagcaatttaaggagactattttctctccttcttgaggcatccttcgtggggaatagagtgctgccttaccattgttatagctctgcactgcatggtggctgagtcttctgtgactcagtgaggccagtggctgattctcctattcagcaagccttacattttcatctcaactgcctgacccctgagttattcaatatatgatagattctcaaattcaaagagaaattttaaatgctcaaccccatataaaactcggtggaaataacattattttaaaaggctagacttaattctatgaccctaaaatcatatattacttctttcttctctaaaaagaagtaccatggacccatggaccagttactaggaggctggtcaaaggaggtgactgcctgacctcttctcaacagcctgtcctcttgttggaacaagtgcaagtgtttaaataaccgagttacctttgatttcaggatagtagaggaaaggttttggttcgctagtttccaaatcagatttcctccgaagctggacgaacacggaggctggttttgtaatgttgacatctttatactttggagttttgaagacaatggcaaactgcaggatacaaagatccaaatgttggagtaggactacatttcttttacagcagtggtactcattaaacacattctttatgcccaatgcttagacacaatgtcttaaaaaaaaatacaaccctagagaaagttcggacaaggcaatggcaccccactccagtactcttgcctggaaaatcccatggatggaggagccggaaggctgcagtccatgaggt

SEQ ID NO: 35496 - DNA, 1011 bp, Bovine  19866880764151
  misc_feature (1)..(1): n is a, c, g, or t
nactggaaagaaacattttgatatcacagggggcgatcagccagttaaccagaatttaacaacaaaccaataatcaccaaaactgacttctaaggtctggttaacctgtgagctttttattctgctaaatggggggtgtcaggcccagcccacttgcttcgttttcttctcttccccccacacacgggcgcccagcactttccactgaactaatggaagtaaatagttaaggatacaggtttgaagaggcacctaaatataagcctgcccatgtgtctccaccctgccctatttataactctacactatggactcaatccaatatagttaaaaatatcaggagaaagaaggtgtgaaggctaatgtagttgcaacacttcaacctgctaaagttcaacccgctaacaacctcagggatggctgacgaggcacaagactgcttcctatctcccagatccttgaaagaatcagcatgttgagctccagggggtaatcatctaagatacattttttctagaaaaggagaattcagatgttaaatatttcctatttcttgaaagaagcaaatctggaaaggctacagactcagttcagttcagttcagttgctcaggtgtgtccgactctttgcgaccccatgaaccgcagcacgccaggcctccctgtccatcaccatctcccagagtccacccaaaccgatgtccattaagtcggtgatgccatccagccatgtcatcctctgtcgtccccttctcctcctgcccgcaatccttcccagcatcagggtcttttcaaatgagtcagctctttgcatcaggtggccaaagtattggagtctcagcttcaacatcagtccttccaatgaacacccaggactggtctcctttaggatggactggttggatctccttgcagtccaagggattctcaagagtcttctccaacaccacagttcaaaagcatcacttcttcagtgctcagctttctttacagtccaactctcacatccata

SEQ ID NO: 35497 - DNA, 1686 bp, Bovine  19866880790009
  misc_feature (1)..(1): n is a, c, g, or t
ntctgggggctttatttaatagagctttctctggttataagacttcgatgccatctcttatagtttgattattcaaatttcagatttttggcaggtaaattttccagtattacttggatgtgaaggatggacttagaactgtggtgaaaattatatactgaattaaattaaattatttgatcttaaccgtaagcctttttttctgccttaggcatttggattcaatcctaaagttaacaactatgttgagaaggcagttgctgtgtttggcggattttacatccttttcttttttgaaagaacactaaagatgttattgaagacgtatggtcaggtaaatggactttattttaaatgtttgatgttttaccctctaaagttactttatataggcatgtaaaggcaggaattttattcttacagttatgtgaacagttcagttattagacttgtgaatatgagcagaaagaaaagaatcaatatattgataagtataagaggaacagttgattcttattgtagaatttggagtaaatactaacaatttaatgtccaataacagatgcacataatttgtttcctctcatattcattaacatcagaaggtatatgtactctaaaacatgaaaaaaaaaacaacccacaacagaatctaataaatgaggatacatttaaagggagagaattttttttaatctaaaaagattatactacatttttctcttatagataaaaaccattaaattctcttgcctgcatgagcaatctttgtttcttcttgtaacattttcctctcttgtttttccctgtagaatgatcacacccactttggaaataatgactttggtcctcctcaagaaaaaactcatcaacctaaagcattacctgccatcaatggtgtgacatgttatgcaaatccagctgtcacagagcctaatggacacatcccttttgataatgtcagtgtggtatctctccaggtattgtcattctctctaccgcatcgcttaccctttgtgaagcctgcggtgcatgcagctacattagtattttgcccatttaaatgtgtcaggctttttcctgtaggtgtgggaaaagtagaatgcaagtctgttacttttcccactttccctccatgtatttactacaaacacatgaattaagcatgaaattgtgagtttctgggtcagaggctttactattctctgtgaactccgggagttggtgatggacagggaggcctggcgtgctgcgattcatggtgtcgcaaagagtcggacacgactgagcgactgaactgaactgaactgaagactgtttaactatgtaagaactacttagatttacacaataatgtgtagcaaaattaattcagagcatttctcttattttgcaattctttcaagatcccaaaccaaagaatacttttgagtgattttgaaattgaaaggagacttgtaagctaagaaaattgtgtttagggacttccttttgtggtccagtggttaagactctgcccttccaatgcaggggacacgggttcaatccctggtcagagatctcaggtctcacatgccacacggtgtggccataaaattaaaaaaaaaatttaaattgtgtttgttaattatttatatttcaattttctaaataatgttaataagtttcatttcttgagcaagaatt

SEQ ID NO: 35498 - DNA, 1965 bp, Bovine  19866881077669
  misc_feature (1)..(1): n is a, c, g, or t
ntaggacctcaatattacaaaaaccattttgtttagtgggcagtttaatcctaactaattatccatcaaactcaatgtctgagagagcacaagtagagagactggaaatgcgagtgatgtttccaccggaagaagggacggaagcacaaagtccagtgtcatcactgctgcatgagaagctaagatctttgtcccagagacagtccagccaggtttctccacagttaagcatgagcagcaaactagaaaagattgtattcttatccaaatcttcattctttccagccataaagtggatcaaggaatgagggagatagttgcataccaataaagcctcttcttgaaaacaagattatgcatttcttctctaactaattaatagatcaacttatttcatgtagtagaagtgcccactgttcttccactttctgacgcttaccctaattaatatgacataacaaaagataccagagttaattgtaaaagacacagaacaaggccttgatgaggatgatcctgacagagaattaccacatctgctttaggatgcaaagatgttcttttaaaaaatggttattttcagaggtaactttaaaacatcttgatggtagtttcaaacatctagaacaacagttatttaagtgtgactaaggaactggcgacccactccagtgttcttgcctggagaatcccagggacaggggagcctggtgggctgccgtttctggggtcacagagagtcggatacgactgaagtgacttagcagtagcagcagcagcagcagcagcaggggaccatacgggatccctggggacctttcaaggggatctctgagttcaaaactatcttcacagtaaagctaaaacattatgtgcctttttcactcttactcttttgaggggacagtggaattttccagaagctacaagatgtgtgatgacatcattctgacagctaatggaatgcgtgtttgtatattcttgtgtgttctataacagaggttgagtgtataaagaggtgggttttcagagattagctcaatgtgttctcagtactactctgctcttaccagctgttggtggttattcctgctatcatctctgtagcctcattactgttcaataaattcttatttttaaagccaaagttttccctgcaacttatacagaaacacaaaaggatgaggtacctttggtgaacttgttcaagtaataatttttaagttgtcaaataaaaataaatttttatttttgagactcatttaatgatatttcatctcattctaaaagtaaacatatttataatgtttttcctaatttttatcttaaattattgtcttaaaatgggactagaagattaacattctcacctaccaccacactgtctacatttaaaagtgctggaaaaaataaaactgatttatcagagagtcttctgactcaaggaagggaggaatctactccaaagaaactggggaaaataataaatgagattgtgatgaaagccatattcccttcaactttatagatggtaataatttatcttacagtgcattatgcaattggagaaggaaatggcaacccactccagtactcttgcctggagaatcccatggacagaagagcctggtgggctacagtccatggagctgcaaagagctggacacaacttaagtgacttagcactcacacattatgcaatggaacatttaaataataataatatttatggtgccagttacattgtagtatcactttgagaccaatcattctaagtataaagaaaaagaagttgaatattttaaacttagatgtgataagctcttctaaaggctaatacattctttactacactgtagtacattggtttatgtcatattataatattttttgaactagaaatgaaaaaacccactagcacaggggttgggttatcacactgcatttgctagagaagcacacgtg

SEQ ID NO: 35499 - DNA, 1716 bp, Bovine  19866881081716
  misc_feature (1)..(1): n is a, c, g, or t
nctggagtgggttgccattcccttctctaggggatcaagcccaggtctcctgcattgcaggcagattctttactgtctgagccaccggggaagccctattctttgaagcttggggcctaaaagaaaacaggcagccaacttatgagatagttgtatatactataatatttcttctagtaaaagagcttaaagaatgcatgctcatttgttaacatgatttgaggggaaaacagacaaaaaatttattataactattgcttagtaactcaattataaaatatagatgaagaaattttgatatactttaaagtcatgatgataatacatattcagcactcaatgatatgttaaacactattaattaactcatttaatgctcacaataatctcactaaggagagcaaattttattcctattgttagaggttaagaaatcagaaacctgttatctaagatcacacaattttaggaggtggatttccattgaagcttaacactcaaggtaagttcctttgatcctccaaacagtgttaaatttcattacatttcatgtggtaacagtgatgattaattgtatgtgtcaagtttgttagcgcactatacccagatatttggtcaaacatttttctaaatatttctatgaaggtgttgtttagatgatactaacacataaatcagtagactttgaataaagagttgcaattatttgataattaaagatacatgtattaaaggagattaatacttttgcttgttcaagtagaatcatgattcaacattctgccaagtggatcaattagtcttaataacactcactaaaggaacttgggataagcatgtagggagttcttgcttgctctccaagttttcattaagggggtcccccaagtatagttacaaatttgcatagaggagcaaaagtcctcataacatgaaaatgtttactaatgaacttctacttacactgatctccacttacacattccttcctttaacagattttgaaacctgcagattgccttctctatcatcctctgatttttggatgtcaggataaaaggcaagtcaattgcaaagttaaattccaaatctttcaaaaaggtaggattacatacagtattgaaaacattgttgaagaacgtctcaaccttttactgcaaaaggacattaggcacagttatatcagttagctgctgctgctgctaagtcgcttcagtcgtgtccaactctgggcgaccccagagacggcagcccaccaggctcccccgtccctgggattctccaggcaagaacactggaatgggttgccatttccttctccaatgcatgaaagtgaaaagtgaaagtgaagtcgctcagtcgtgtccgactcctagcgaccccatggactgcagcctaccaggctcctccatccatgggattttccaggcaagagtactggagtggggtgccatcgccttctctgatatcagttagcagtagaagacaaaggaaatagacccagatgacagaatttggttccttttattttgatgaaaaatttacatataatgaaatgcatacattgctgacatcaacaaattctttcatctgtgtacctcaaatccctattgaaatataggcttctaccatcacactagaaccttgtgattttttccagttaatattcatacccactgtcccagagaaaactactatattccatttttccactgt

SEQ ID NO: 35500 - DNA, 1728 bp, Bovine  19866881236063
  misc_feature (1)..(1): n is a, c, g, or t
nctgagtcatacaggttcacttttggcttcttgctggttctcatcccatggctttaatattttgttttgtgagtattgtaataacataattaaaaaaatccagaacacccataaaagataaaagaagaaacccaaggattacccatgttactgtccccaagggagaaccatgattagcatttttatatgtatcttttcaagttgcactcagaccatcgtaggattataatattaatttttacaaaaggtgcccagtaggcatgttgttacgtataaatataaatatattttacctcaatgctatgttttggaaaaatacagatattcgtcatctctgctactctgcatagtatttcactgcaggtgtaagccatatttatatgatccatgtcctatgcaggatagccaagttctttctttttttttcctaatcttcccccacctctttgccctccttcttgttcttctccaccctctcctttttcttctctttttccttatcctacttatcttcctcttttgatagctcttcctgctcctcccaacacatgccactcctccttcttcctatcttcctcttcctactcctctcacacctgcctctttgtctctttttttggtcttctttaattttctttaactgccttatttaactttaaactgttctgcaataagcccacttgctttcttcattatgatttcttagtgcttttttgttttactttttcttcttcccctccatgcttaagttgggattctattcagtctcccttccactctcataactttgttcatgctattatttctcccccgcttctgatcagtctgtgctttgctttgacctcattttcattaataatttaggtgaacaattttatgcaccttgctgatgattacactgtaattcttgtcagagccaagcaagaccttggtttgcctggatttcagaccagtggtcttttcactagattgcattgccttatcatgactgaggttagaaatagcctcatatttagtgtacaggttaaacaagggaagaaagcaaacaagcaacgagaccgaagaaaaataaaaaaataatgggaaagagagtagtcctaatttaacaaagacttgactctagtgttctgtctgctcagtgactttgttctaggtgaattaaaaaagaactgttcatgaacgtttgcctgctttcattccttctaagacttttaaaaatgtgtaacagttaatctagccaacagtgttatttcagacctaagattataagattaaaggaagtataataaacatagtaatatctgtactcagaggtaaaagaaccatgcctgatatattaatttgtttttcagaattaaaggaatttgtatacaggctctgtacaaaatttcaggtagttaagacttggtctagcaatcttttccctaagtcatcacaagtaaataaggaaattataaatatgtgattaggcaaatcaagttggtaaaggaaagcaactggtcttttgaagtgtatcttggcagtaagtttttgcaaagccaaggttactttctctatggtgtttctcatgactgcctttgtttctctttgacagtaattgtttcctaatctgggacttttcacccaagccacccatttgacatgtactaagtcattgtcagaactctccaccatgacctgtccatcttgggtggccctacatggcatggctcatagcttcattgagtt

SEQ ID NO: 35501 - DNA, 1739 bp, Bovine  19866881261084
  misc_feature (1)..(1): n is a, c, g, or t
ntaataaaatttatttgtactaaaatgtcctttctgtaattaacaaagtttttattatagaattatgtaggtatacagtcagaatgtgaaaggcaactttaaacctaaaattttctcttgattattaagaaatcctcctgcttcctttcttccttgtttccatcaatctttcatccccgtttcctctgtctgtctctctctttttttaaagatgatctcagtctggaataaacattcttgcgaaactggccaggatttttgccaagcatagtgtgtacacgtcagctgttttctggaaaataattgcactgtgtgacaatgtctattattttaattagtactgaggaatgcctccaagatatttcatcaggtcatctgacaaaggccatggcttttcatttcctgaaatgctgattaagcagatagatgacatttgacattttgtataggtgaacaaaataattgttataattaagccagaactcacagaagtaataaaaccactccccaagtacacaaaaggctttaggacctgaatcctgtgaacaggacatcttttagagtgcagtgttcaaattacccaaaggaaatagtaactgacctctatttgtgggaaggccactctctgggaagatcctggcatgcctggggagatcaaagttgttttgtcataagcttccaaggcttagtccgtcaatgggagctgttatatttccaggatatttgcctgtatttctgtgttaaattcaagaagcattgattccaagatctgaaaaaagagccctttgggaaactgtgttgagagcacatctccagaaactgacaaacttgaaaacacagtttttaatagtgctggagagggaaagggaagcttattttctctttccacaactgttccccagaaccactgtcagataaactaaagatcaggacaagaagtgttcatctgaaaaggaagacattttgtaatcatcatgctgtgtcgcataatatcaatatgattttttaatataaaaaagcacacatttatatactggttttgtatgtcttctgtgtgaataaaggtgaataaaggtggttagtcagttttattgtgaggctttgtggaggttggcaggccacaccctgtgggtggactccagctcctgtcaaagaggtggtaatatgacagtcagtccctctgggcagaggaggttttcagactggaactggactgatactggttggaggaaaggattctcctcctcttctgggtcttcatctcttagtctgaataaattaggagacactggcctgtacctgtgggtggggggttctgagacactgcacaagcacttagacgctggcttgtcggtcaagctgggtttcagaagtgcacatcatggtttgcaagtgttgtcatctgtgtgaaggactgactctgctctgcctccactcagcattttaaaatgcggtattttcccattttctatctgtttcatctctccatttctgagtgatgacaagaagttcaacattaataaattgtcatctctgcattgcataggaaccctgggccttattcaatccaggggattcagggaagcctataatgtgggtccgtatagttgccactatcccttttcattgcctgctcctacagtgctgcaaaggggggaggatctgcctggagtgtcctctcttgtgctaaacttagtgacagggaaccctgctgaggcctccaaggcccagcaacagtg

SEQ ID NO: 35502 - DNA, 1533 bp, Bovine  19866881273881
  misc_feature (1)..(1): n is a, c, g, or t
ncgaggacaccaaatcttctagaattacatggaaagacatcacaaacttactttgacctgagggtaggacttcttgttcttttcactagatgcaccggggagccctccatgggaggggccttcacacacgtaacggaaacgaaatcctctctgcaaaggtgaacacaaggtgaacaagtttgaggaatacttactaaaaacttatagggacaaaattatacccaaattttatattcttgtgtattagaggagacacaaactgtgaaagaggactgtatatgagaactacttctccccataaccttatcatgaatattgatgttaactgatatttgggccctgagctgtggcttaaaaggcaggtccttggccctgcagaagctctccttctgtgctatgtggagagtaaactgctgcagattttaggcctaaggactcgacatgctacagcttgcctgtatcagagtttcctcatctcacattgcttctgccaagctctgaaattggccatatgactcaaagttaagcttctctgattcttatttaaaggcattcctttacctactctgatgacagttggttcaggagggaatacagaaatgtcttgttaaatataccccatcagggttacagaacacagcctatgcaagtccgcacaatcaataactctcaacagttcagaaggtaagaagtttcgatttaagattgttaatactatcaagttcaagctggatatattaactgacctgaatgattccaaacccagagagtccctttatatattaactcaagaatttttatagacacagtaatatcaactaggaattagcaagaagcctttactatgcaggctgattaaacacatgagttccatgtattttttttaatacaactaagaagattagaccagaccatattcaaggtctattccagttttaacattttatgacttaaaaagctaacagttgtaattgtgcatatttgcataccaagaataaaacaaggacatttatgagaatgactctcatcatcatatgaagggagatttcaacatatacagtctcttgaccaaatggtcttccgtttttcaaatacaccctttaatgaaaagaatatgttaatacactttaaggaacattctcaccttctgcttactttatcgtgggactgacttcctataaacagtgatagatccttaggcctcagaagctccgcacaccactacttgttagtggggctttctaccttgcaagctggatagtggagctcagtgaatatacaggttttgacggctttgagctaatggatcaatgtaaagtttctgccctccttagactgtacttcatttcactatgccccatagggtcttgaaaagcagcctgagaggttcagggagagcacctggaattgtttctaaattctgtgagacttttctaatttctaaagaggaccagtctaaagcatcttttacgggaccagcgagacctgacctaaattccctaggggaagaagctacccgtatgtcacacatgg

SEQ ID NO: 35503 - DNA, 1942 bp, Bovine  19866881284871
  misc_feature (1)..(1): n is a, c, g, or t
ntatactgtttttaaataaagaaacagatcactgcaggccatgagcttgggtgtccatggccaacccttgtggcctcgtccctgggcaagactctctcctgcctaatctcatggcagattaggaaggactctttccattcacctcttttcttctcttgatttccatcagtcagtcagtcccagtcccgttttcactgatcttgcactcagcatttatgacataaaatgcagtatgagtgcagatgaaaacgtgttcttggttaatggaagagggtgcttaatggctacacagcacactccgagatgtgctcttccttccaactttaacaagacgtatgcattttaaatggtctacttcttgaagagtatctttcacaccggaaacaagtaccactcgtgttttatttccatcccattatttgttcatcacatatttttagaaaggcctaatttgatatcatactttttctacttactagcttgtcttagcattttcccatgttgtgatatggtcagatatgctaacttggaaatgtgcttcttatatagatctgcaactatgtgggacctgcaaaggttattgttcagttggtcacaaatggaaaaaacatccacctgcatgcacacagcctggtgggaaaacactgtgaggatggcgtctgcactgtgacagccgggcccaaggacatggtggtcgggtaagtgagcatgcgtgtcgctgcagaagggaggcgcagatcgaacacggcccctgcgggctgggactggacaggcccttttcatcaggggtctttgcaagaccctcagagagtcttagaatatgaaaatttgagaaaactagctatagcagaaatcaatactttatggatgatttcatacccttaatgattcatttaatgaactttgactatagatttgcattgtgaacattttgtgcagacagtgggttttatttcagttgtgtgctgcttaaaaagtatgcacagaaatgatatgacacataagaacttaatttccaaaatatacaaacaattcattcaactcaatgtccaaaaaagcatacaacctgattgaaaagatgggcggaagacctgatagttctccaaagaagacatgcagatggccaacaagtgtatgaaaagatgcttgatctggctaattaccaggggaatgcaaatcagaaccacaatgaagtactacttatacctacagagtggctatcatcaaaaagaatacaaaaaacaaatgctggtgaggatgtgggaaaaagggtgagaatgtaagttggtacagtcactgtggaaaacagtatggaagtttatcaaaaaactaaaactagaactgccatatgacctagcaattccactcctgggttatataaaaacagaaacactaattcaaaaagaaacatgtatcccagggttcatggcagcattatttataattgccaagatatggaaacaacctaattgtccatcagcagatgagtggactatgaagatgtgctgtgtacacacgcatgcacacacaatggaatgctacccagccataaaaaaggatgaacttttaccatttgcatcaacatgggtagacctggaaggtgttacgctaagtgaagtaagtcagacaaagaaagacaaatactgtatgatatcactcatatgtggaatctaaaaaataaaataaactagtaagtacgacggagaaggcgatggcaccccactccagtactcttgcctggaaaatcccatggacggaggagcctggtgggcctgcagtccatggagtctaaaagtcggacatgactgagcgacttcactttcccttttcattttcatgcattggagaaggaaatggcaacccactccagtgttcttgcctggagaatcccagggacaggggagccctggtgggctgccatctgtggggtcgcacagagtcg

SEQ ID NO: 35504 - DNA, 1487 bp, Bovine  19866881333611
  misc_feature (1)..(1): n is a, c, g, or t
ntcaataatattttattttacttagtcctaaaggagagttcccatgagcaattatggtcatattgatgagaaactcacaaaagaaaagcttattttataacctactaaatccctttatatggatagtaatacctctttccctgtccatttaaaagctttctcaaagagaacctataaagtgggaaattcaggtaacccacaattttatctaactattcaacatcctctctgaatttcttatacatggtttgttgaatgagaatttaaaacaatctttaagtgaaatcttaaaaattatatatgatctttcaaatcaaactgtgtagccaatatatgggttattcactatataagtgtactgttgataagagactatcaagttctattcaaatacagttctctacaagccaacatccagaaaaacattgcagataaacaaaaaggaggatatatcttaataatgatattatggggactacaatacattttgaaaaaagctataaattctttcccttcagaacctcaaatcccaatattttcattaaaccaaatcattaccaactaatacattttaacctcaaaataaaccttccttcttagaagactggcaagaataaaacaaaaatttctttttcagtaaaagttccagactgaatcaaaagtgaaggaaaaacaatttatcctccttgccttttagtaagattcaaaaatcaggagcaaattaagtctgaaagaaagaaaactttacaattccttcttcccagataagggatcaacatgtcagcactggcttcctccaaacttgataatgcccagcattttctgagtgtgtgagtgaccatgttggtgtatgtgtacagattgaaggctaaatgaatgattcacagatgtgttctacacatctgcaaaactggaatggagtacatcatgactcttcatttccataatgcttgtctttatttgcaaatgttcagtctgtattttcccttccatgaaccttctgaatatagcttgattttgattaatcttccttaaagtcatttatgttaaccgtagacattattaaagtctgaaaaaaatgcaatgctatgattcttcaatgtgaatttgaggttagaacattttaaattaatgaatctctctggtaaaaatgaaatgtttcacctctcagatgatttgttctatatgtaattattttcatgatttcatgttatgcttcctgaggtttttaagctttacacatttttgtttaaatataaatagcaaaatgttgtgttttgaatttaaaataaattacataaagcaaatgaacaaacaaacaaacaaaagcaaaacaaaagcagaatcacaaatatgaagaacaaacgtggttaacagcagtggaggagggatggggaatggcaaatatgtgattaagggtcaaaactactatgtataaaataaataagatcaaggatgtaatgcatagcacagagaatatagttaat

SEQ ID NO: 35505 - DNA, 1328 bp, Bovine  19866881462924
  misc_feature (1)..(1): n is a, c, g, or t
ntttctgtttcttggaccccataaaaaacatatatcttagtctttgatatacagccattcagctgttattttgcatttacttaaaatatcctctgctaaatagttgtgttcatctttaaaagcaaattgcttaaaattacattcaatttctttctgtaaaccaacatttcttcaccttgacaaaggaaatacattggataccaccgatgagctgtcatcagcgttacattacacttagagggaaaaaaaaaaaatctgagtctgaaattagtagagttaacaaaattttactgatttcatattatttcaagatggttttcaaagccatccaacaagtccctatctgtaatataaaaacaaaaccaaagctatgagcaatctttctctcctggattcattaaggccttggaatcatttatatctgtgttttgtacattttgattctcttccacatttatatgtacttgtttgtgaaagcactagaacaaattaattgaaagaaaccactctgaaactacttgaacatttgatccaaccatagagatttaaaggcttatacagcctagtttatattttcctctgggttttggtgtcgaaatgattacagaatgcatgtttctttctttgtgatggttttttaatatgcgtgaaacattaaaaaaaagtcagcatttaccaaagatctcatgtatcaggcttttcagactggaaccaaaagctttttaaagcatttttaacaacaaatgatggtctgtttcacagatcctgaaaccaataatcagttttcttgacatacagctaaaaacaaaattatcttttaactaaataggatcagcttaaaaatccctttggagctgtttttatttattaaatgccttcattaacaccaccatctttcacttcttattactccaattcaatttctcccgcatacaaagtgatgagaagaatggctgtgaatccagttaacatccctgcgttctgaatcatgaagaaggtgaaatcggtttttcttccagttaccttttctctcagcatatcgttcatctctggaaactagaggaaagatacattgttagataactgttgccatcttgtggtcaaacataaaagttattacagattcctgtgggggtggcagggggtgagcgtttctgtccctggtttaaatgttctagtacagagagcataacagcaaaagccagtgtaatcagacatcaacaagaagaagagtaagaagactgtgccccaggttagtcaatcagtggctggagattaatctcattttatgcctcctctccctcccttccttgctctctctgctccat

SEQ ID NO: 35506 - DNA, 1712 bp, Bovine  19866880244024
  misc_feature (1)..(1): n is a, c, g, or t
ntcccggagtccaccgaaacccatgtccattgtgtcagtgatgccatccaaccgtctcatcttctgtcgtccccttctcctgccctcaagctttcccagcatcagggtcttttcaaatgagtcagctctctgcatcaggtggccaaagtactggagtttcagcttcaacatcagtccctccaatgaccacccaggactgatctcctttaggatggactggttggatctccttgcagtccaagggactctcaagagtcttctccaacaccacagttcaaaagcatcagttcttcagtgctcagctttctttatggtccaactctcacatccatacatgactactggaaaaaccatagccttgactagacagacctttgctggcaaaataatgtctctgcttttgaatatgctatctaggttggtcatactttccttccaaggagcaagcgtcttttaatttcatggctgcaataaccatctgcagtgattttggagcccaaaaaataaagtcagcaactgtttcccaatctatttgccatgaagtgatgggaccataagccatgatcttagttttctgaatgttgaggtttaagccaactttttcactctcttctttcactttcatcaagaggcttttgagttcctctttgctttctgccataagggtggtgtcatctgcatatctgaggttattgatatttctcccagcaatcttgattccagaagggactttttaaaattaattttttgattaatttatttactttttttattttttttaattttattttatttttaaactttacataattgtattagttttgccaaatatcaaaatgaatccgccacaggtatacatgtgttccccatcccgaaccctccttcctcctccctccccataccatccctttgggtcatctcagtgcaccagccccaagcatccagtatcatgcattgaacctggactggcgactcatttcatacatgatatacatgtttcaatgccattctcccaaatcttcccacgctctccctctcccacagagtccataagactgatctatacatcagtgtctcttttgctgtctcgtacacagggttattgttaccatctttctaaattccatatatatgtgttagtatactgtactggtgtttttctttctggcttacttcactctgtataattcaatttatttacttttaaattgaaggataattgctttacagaattttgttggtttctgccaaacatcaacatgaatcagccataagtatacatatgtataccaatgaaggagctcttcgcagaaatgtgagtagcattaagggaaaccaataagatatgatgaaaccttccacaactagcaatatcagaagttgttgttatccataggtctggaagagaaggagacagtaagtacaataaaacagagagagtaactgcaactctaggacaggactccctttcagtagagagatacaaccaacttgccagctggggaaattaataccctaaactcattcttcttttacccccaatctcttaccattacttttcatgcttaaatccaaccagaagtcagatggcaggggagcaaattaactataacaatatagttcaggttcccaggggcatgcaaacaaggtgaggaagggtgaagagtacatctagagagaaagagagaatatccaggacaaagataaaaaat

SEQ ID NO: 35507 - DNA, 1672 bp, Bovine  19866880263893
  misc_feature (1)..(1): n is a, c, g, or t
ntgatgccatccagccatctcatcctctgtggtccccttctcctcctgcccccaatcccttccagcatcagactcttttccaatgagtcaactcttcgtataaggtggccaaagtactggagtttcaactttggcatcattcctcccaaagaaatcccagggctgttctctttctggatggactgattggatctccttgcagtccaagggactctcaggagtcttctccaacaccacagttcaaaagcatcaattctttggcgctcagctttcttcaatgtccaactctcacatccatacataaccacaggaaaaaccatagccttgactagatggacctttgctggcaaagtaatgtctctgcttttgaatatgctatctaggttggtcataactttccttccaaggagtaagcatcttttaatttcatggctgcagtcaccatctgcagtgattttggagcccagaaaataaagtctgacattgtttctgctgtttccccatctatttcccatgaagtggtgggaccagatgccatgatcttcgttttctgaatgttgagctttaagccaactttttcactctcttctttcactttcatcaagaggctttttagttcctcttcactttgtgccataagggtggtctcatctgcatatctgaggttattgataaacagcaaacttacttatggttaattcagttcaggcaataataaaaatgtttaagataatttatttattttttttttactgtacacttcttcgtgtctttactgtgctaatatatatggtgaatctttaagacagaaaattcccaaataagcttgagtttggaagccaggtattttgtttttaaagatcctattttgtgatactcctcttgcactaaaagtactttaaaaaaatgcagtcctgagatttccaggctgaggagatagcaaggaagctctgtggactcaggtgttatgtctaatacttaaaataatggtttcactaacattccccttaactgaattatatctttgacccctttcacaagagtgaaatttatatggaacaaccctaacttcaagacaggagaaagagtgatgcaacccaaggaaggagaggggaaatgggagggaggcagtgaccagagaggctagtctgttactgagagaatcgaagaacatgtggatcaaagggagagacagattttcagaattgcctttactggaaaaaatctgtgagactttcagggacttccctggtggtccactggttaacagtccaaggttctacagcaggaggtatgagtttgatctccactgtatggccaaaaaaaaaaaaaaaatctgtgagaccttaaatattgtaagaattaatgcagaaaagcataactttagataagtcaattaaaaaaatatagtgaagaagtaaattactctttatggtttctagaccattatttgaatttcaatttgactaggatgcatacaaagaaggtagcatcctgttttcatttatactattccaaagcagttttgagtgtgtgagaaaacaatcatggatgaacatgctttacttagtgtatcacattaaatttttgcaataaaaagttttatgttcagttcagtcactcagtcatgtctgatgctttgcgaccccatagacagaagcacgccaggcat

SEQ ID NO: 35508 - DNA, 3434 bp, Bovine  19866880603049
  misc_feature (1)..(1): n is a, c, g, or t
ntattttattttttctattagaagcttttagaaaagaagttttcatgtgataaggtattcaaaaattacttggaaagcttattaaaatacagcatcctggatctatatttagagtttctgattcaggatgtaacacaagattttgcattgtttaaaagtccctatgtgactcagatggtaaattccctggtggctcagatggtaaagaatctgcctgacgtgcaggagacatgggtttgatccctggtttgggaaaatgccctggaggagggcttgacaacccatcccagaatttttgcctggagaatacccatggacagaggagtctagcaggctgcagtccattgggtcacaaagagtcaacacgactgagtgactagcgactaacactgatactggatttaccctatggggcaaagaggatcaatcaaaggctttaaaacagaggagtgatgtgattggcaccagactgcagagaaatgtctctgactgcagcactgaggatagatttcggggaaagaaggtaaggactaagaaaatgaccaggagagaggctactgaaataaactggaagagagaatctgagatctggaactgaggcaacaaataagagaacagaaaagaaaagacctgagaaatagggccacaagtactaataatgcagaagacgaacatgtgtatgcataccgtatgctcctattttgcttataaatttgtgtatatatatgtataaacacacacacacatttacacagaaaaaagagaaaaagaaatgtaaccagatgttaagagtggttatctctgaatgataagatataatggtgatctaaaagatttttttaatacatgtttttcttccaaaatgctctataattaagcatggattacttttatgattaaattaaaaaaaaaaaagaaacaaagagggaagaacttcattataagacaggagttcacaaagatgatgaggaagagacagaagaaaacctatgaaagaacaatccaggattcctgaggacttggaagcagattctggagaaccttgcagaattagtgcaagaactaacacttgcactattagttaactatgatgtggcagcttagatgagacaggatttttccagctcctactgtcatcttatttgcctttaaaatacaattaaataaaagttactaccgattgattgatggctggagtcctgcttgcttgcaaaatgggtaggatttgaattatatatttattgcacatataataaatctaatgctttcctatttctttaatgatttttaactttaaaggagagtcagatatccacaagggaggaaaaaaatccatagttttcagaactgacaagaatataaggcttagcaaaacccatgccaagtaccacagtttggtaatctatctaagaaaaaaatccaatatatggaatagtttccttagattagcatatgttaattttggttgcataaaacttcattgttgattgaaggttaaatgagtcaatgtaatccatgaccacaaaatgtgggagctttcaggatggtcactattccttccttgaatgaacttctttttttttttttttgaatgaacttaggatgaaggtcttttgtcataccttcattttacagaagaggtccaaaacttccctgggctccctaaagcaagcagcagccctgaaaagtcttcacagtgcttctcctctgacacccagcaaaggaacagacctcctaaccttcaccttcaaagaggaacatcagggggcttgaaatagcagaagggctagttacctcacagtgataacaaaagactggaagagaggttttcactgaaagctaggttgagcaagggcatcaccatattggaggaggcaagggtcagaaagagcagcgtcaggctctgctactgttcccaacaaaacaagtggccccagtcaaactaccaagagagaaaaggttggtgcatgtgtaggcaaagcttgtaaataggaatacaaatggtggagtttgtgtttagagaatatcaggacagaggtagaaatttaaacagatgagtaacaaacaagctcatctcaagccaacactgtggcaacacttgctatttgctgtctatagctcaagaggtcaaaatatctctctacagccctgttctggaaaagcagttcctaagttcagtgactcctatgaacctttgcaaaggagccagtgatcctgcaagggacccttatacctgtagatatgcaattttttttttttttttttttggccacaccacatgacttgtgggatcctagttccctgaccagggattgaacccaggatctcagcagtgaaagcatggagtcctaaccactggacctccagggaatttctacatatgcaaatcctataagaatatataagaatgcctaaatagaattacctgtaaagagcattggtattgcatctcacctacatttgtacacttactactactttttaaatgtatatcaattttaatgagattaattcttagtaactttgcatatttgatattttctcacaacatatacaaaaaaatgggtcaactgtggtgtgaggaactgtgaaacttccctgctcaaaaaactaggaatgcctgccttaaataatttacagttatcaacgtaagacagtaagagaactgataatagcttagagatgtagttcttaaatttggttgtacattctaattacctggggggctctttaaaaacccaatgcccaggtcacactccagaccaattaaatcaggatctgtgaggtgagaccccagcatcagatcatttaaagcacatatattcccgtttgaatttctttgaaaactgagaagatgcacatgagaaacatttatatgtataaaaaagtatagagaatgaaaagtaagtctcctcccacctcttagtccaacatctattatcttttcagacaccacagccatgaccagcttcttggcaatgatgcacagatatcccgagcatatgtaagcataaacattgatattcttattgttacatgaattgttaacaattatcttcaccaaacgtacaacaacctctactatatgaatggatgtagcataaaggtgtgagcccatgagtctacaaagaaagaagctgctaagctgagcagaatcagttctttctaggttttgcataaatattcttttgctatatgtttatttttttcttcttcttcttctcttttttttaattttattttatttttaaacgttacaatattgtattggttctgccatatatcgaaatgaatccaccacaggcatacacgtgttccccatcatgaaccctcctccctcctccctccccataccatccctctgggttgtcccagtgcaccagccccaagcatccagtatcgtgcattgaaccggacaggcaactcgtttcata

SEQ ID NO: 35509 - DNA, 1866 bp, Bovine  19866880618996
  misc_feature (1)..(1): n is a, c, g, or t
nttagttttgacatcgggcaacattttcaagagactttcactcagaatgttgctgtctgtgggctgacagttttctttgactcactcttagcccggctttgcactgaaaatctgaccagctctttctacctgcaaatctacaatatcctgaaataatatttgttcacataacatcactctattctctataaaataccccagccttcctcaaaagaaatagtgttattgcaagtttgactattgaaaaagtaatattgcctccaagggggtatgccatcttaataagacatatcttcaagacacgaagaaatgtacttttcaaatcctacatgccttataaaccaccacttatgaaacctttgttctaaagtgttgccagttttacctgagacagatattttactgcatttaaaaggtctctgaggatcttagggaatcttaggtgaacctggaggcctggtggatataatgaaaaccaaagtttttgtttcatgaagttttctcaaggcttttctcctgggcatttaaatgtaacttccattttgctagtctaacttcaccatgtagtgctggtagaaattttaggaagagaaatagctggtgtgtgtaataaactgaaaaacaggactctcttctcactcacctactattccactgaaggaagtggtggtagaaaatattgttagtctaattaaaattagatgcagccatccataaaaatgagagaccaatggtatttttagaatcttttacaactggaacttatttggctagttagctctagaaaaaaagttaccaagcaaatatccaccaaaatcagttttcttttcccctctgctttcaaggttctttcctttcctgttcagtgaatccaatgttttacccaaattgattgagtaaaccaattcatactgggtgctattgccttttactgtattgctcttttcagagacatttttctgtttatcttgatttatatatgtaaatcattttatcctctttgtccactgatacatgtttttttaaacaaatattatatgtctactactgttctaggcccttgaaatacagaagcagactagatcttacagatccttgcagctgtgaggctcacattttagtggtggacagacaaacaacacacaaagagatttcataacacacattcacgtgactaaacagtgcaggctacaaagaaattgaaacaggataaagacctgaaaagtggctggataagctttatacatcttatcccaagcacaaactatagcctagattgactattaaaaaaaacttaaatatcaagttaatgttaaaaagatccatttaatatcagtgaaagttgctacaaaaagaataataacaggaacatttgcctttggggagaatgtgacaatggtgtgctagcacagatgttctaatgttaagtgtggtccctctttggggctaaatttttaatggagaaactaatgaaacatccttaatgagaaaaagaggagtggtgaggacaaaatgctatccacctctggacctctgtggtccaatgtagttatcactggctggcgtggaccctaaatatgttaaatgtggctagcctacattgaaatgtgctctaagagtgaaatacactgctactgctaagtcacttcagtcgtgtccgactctgtgtgaccccatagacggcagcccaccaggctcccccgtccctggcattctccaggcaagaacattggagtgggttgccatttccttctccaatgcaggaaagtgaaaagtgaaagtgaagtcgctcagttgtgtctgactcttagcgaccccatggactgcagcctacaggctcctccatccatgggattttccaggcaa

SEQ ID NO: 35510 - DNA, 1944 bp, Bovine  19866880633468
  misc_feature (1)..(1): n is a, c, g, or t
natgaagagctgactcattagaaaagatgctgggaaagatcaaaggcaggagaagaaggggacgacagaggatgagatgtttggatggcgtcactgaccatggacatgaatttcagcaaactccagaagatggcgatggacagggaagtctggcgtgctgcagtccatggggttgccgtaggacatgactgagcaactgaactgatactgatcatgtacgtttcatgtataatttgtgtatgtttcatatataatcccattatatatattcttttccagcttatttttccttataggtagaaagtgctttttcttaatcatttcaagtgaaaatagtgtaaaacaaatttatatctttctgagattttaactatttaaaaagataaaaacaaggaaggaatacaaattaatagtagctgcctttgatttgtgagattatactggtccattttttctcagcttttcagggcttttcaaatatttgcaatgagaatcaattattttatactcagaaaaaaagtttatgttctcagtacataactgggaatgtattgtcttcattaggttaaatgtttgttataaaggttgacaaatccaatgaaaagaggcaattgtcctgaggttagattattgttaaaatgtgtaatgagaaaatatttgttagtgtcatgtatataaacaagaatatctatatcaatattgtagaatgaaaacagttagctcttgaaaatataggtaagagattgagaaactagatttgtaacttaaatttaacagagttaagtttatagcataatcagaaaacagtttgtcttagtgtatatgatgtctaggaaattaaatatctctgcaaattgattgagagtttcctttgtagacttaaatgacaaagcaagaataaatattttttaagtgctatcaataaaatctgcttgacctgattttttttttttttttgaaaaaagtttttgtggaagaaagtttaatcttttttgacttccatgtaggtttagaaaatagctttgccataatacatatagtcaaaataatgattttatatttatatttcttttcaggttataacccccttaattctcttattaacactgtgatgatttgattatgatcagtttgtgggattattaaccattcttggtttcttctcacctcattaactagcaagctaggcactgagtgttgataataaccattgtctcatggactgatgctcagtattaccaaatctttttagttttatgaagccatttccattagagagtgagtaggttttctatattgtttttctgttttgtacatgtcaggattacattaaaataaataagtctctatcacctagttcccaattattttttcttaagaagcaacagcacttattcagtgtttcaaataccatcaggttaaaaaattgtttcttaaatcaattttctaaataagtggagccagtttagctaaaatggcactactcaacttacctggggtcttgctaacaagggtgtgagaaaaagcaagttgaaattttaaaaatagtagtggtaacttggctgttattattgagaagtaatgacatccattttaattcacaagttgggaaggttctgattaaggaagcagactaaattcatcctatttgagaatgtacttgttctcagatacctgataattttttttatttgaaggataattgctttaccgaattttgttggttttgagttttacgtggttctatatattcttttcccaaggtcaagtactcatgcctgctctcagctgatgttctgcaggctcttctgtgtctgagggtgtattcctgatgtatccattgagagagatgtactccacattcacctactcctctgccatcttgttctccctgataaatgtttgtggttggagtgatctggagtccattagcgttgctgagaa

SEQ ID NO: 35511 - DNA, 2471 bp, Bovine  19866880638046
  misc_feature (1)..(1): n is a, c, g, or t
ntagtttgactctttgcattggagtaattaccccattgcagctggactcaaggaattttgaatgtagtaatgaattgctgcaacccttccaagaaatacaaaacccatatgtctcagggacttggttgtaggctgaagctatagataaggacgtggaaagggaatggtagtgcttctaaagccaactggttatgaattgaaattcagtgctaatgtaaatgaagctggaatgctattcagggtggaatttgtcacagtagcaggaatttggatgctaaactttataatttgctttctaaagaagagaatgtccatattcttataatcttcatactagaagttcaaatttatatatagtttataatatatggatggctacaatcagaaacccttagaagcttaggcaagatcagaaaaaggccaaaatatgagactgaaaataatgagaattaaaacacagtagatgaaggtagtaatctggagaagttccatatttaagacatcttttcttcttccggaggaaatccaaatccaggcaagaaataaaatgtaaataagaaaagcagtaacaattaattgtatccatttaccatctctagaaagggtaggacatgtttatggaaccacagtattttaaaactgaggctgggaagagaggaaccaaaaataaagattcataagactctctaagaaaaggtactatatctaagtcacctggggtaaactctcattgaatgaggatggtttggcaagtttttcttatagcctttaagcaacttttaggatttcataaaagaatagggaaaatacccatatataatcagttgactttaagtaagagattattctctatatactcagtgggcccaattcaatctactcaagggctttaagagcaaatctgaggtcttctagaaggagaaaaaaaattcttcttgcagactgtagctccagcctttgtctgagactttaggcctgcctttcctgacagcctgccctatggattctggacttgtctaaccagcttccacagtcacttaagctagtttctcgatataaatcccttagtgtatctttcctattggttctgtctttcctggttgaacccttactgacatcctctcacacaccctttctcaggcaactaacagagaacatacgttgtcgaaaagaaaggctcaataaagaaagaggaagacaaggatcaagcaaacagagaattcaatttaaaatagagataaagggaatcccagaatgatggtgactgaacatttccaggataacagctgtggaccaggttggataggatgtctaacatctctcagaaaagcagaaaaggatacagtagttgccccttatccacagtttcactttccgtggtttcagtacccgggatcaattgaaaatattaaatgaaagatttcagaaataaagttttaatcaagcttctttctgagtagtgtaatgaaatctcagccatcccttccaggactcaaatcatcccaatgtccagcgcatcctgcccattaatcacttagcagccatctcagttttcagaatgactgtcatgacatcacagagcttgtgttcaagtcacccttattttacataatgaaggccccaaagcacaagagtggtgatctggatctaccataagaatgcttcctttaagagaaaaggtaaaagttctcaataaagaaaggaaaagaaaaatgtatgctgaggttgctaagatttatggtaagaatgaatcttctatccatgaaattgcaaagagggaaaaagaaatttgagttagttttgcaaaccccagagtgacagccaatgtgtgatatgtgctgagaaagaggctacattcacaaactttttactactatataatgtaacaattgttttatttaattattattgttgtcaatctcattgtgcctactttataaattaaagtttatcataggtacataagtataggaaaaaacatagagtatagttcattccttcacaacacagatttgaactgcgtggtccatttacacacgaatatttttcagtagtaaatcatacagaactacacaatccaaggttgattcaatctacaggttcagaacctctgatacagaagaactagagataccgggaaacttcagatacagaggaaccaatggctatggagggcagagtataatattcagattatttacagcagctctaacccttgtggttcaagggtcaactggaaacaggattcaatactatccaaagtttcaggcatccactgagggtcttggaatgtaccccctcagataataggggactacttgctatacacatagggtgaaaatcagtaatacatatcagatgaacagattagtacctgaggggaggacaaaaggcaacctattttaaaacaatacccacaggagttctgagtgaccaagaccaaaatgtacacattgccttgtctggccgtt

SEQ ID NO: 35512 - DNA, 1258 bp, Bovine  19866880643520
  misc_feature (1)..(1): n is a, c, g, or t
ncctaatatattgtttaatgcttaaaacagtcctgctcacaagcatttctgtccaccttttcagataaaggaactgaaactaaaagagtccaagaccccatgactacacagtgggagagctggcatctgagtcattctttcttgtaatggctcctttgaccatcattttcccactctcctgggcaccacacatccacccttgtgacactatcttcccctaagatatggcaagccccccagtgacagagttttttttttttcttttccagtgacagcttttgttgttgttgtttgcagctgtagcgcctctgtgacctgggtcatcaatttaacagttacataaataggattaattgtctgtgtaaaagaccatgtctgggaattatgtctgcagcaccagtcttagacccgttagcccttactctaaccacgtgctcttgtccctcaccactcattcaaagctggctaagaaaagctgtgtacttcactgaggtctactcattcagttcaggtaactacagccatccacatgcaggtctgagttgttgctctctgccaataaggacgtttatagtcatacttaccttttctattagcctggattttacgggtgaggatggggtcctctaacatcactgcttgtactcttcatacaatcagtaggagacctgctttgcgttgtcttccctgtgggggaaatgacctccgttgacttaacccatactacttttgttttcttaaaaactttttcttattacacttataatgcatgtttcatgtaatctcctgcaaattcaacagatttattttttgtactgaactgaatgatttaaaagttcatatggaaaaacaaatgcaagaattctcaagaatgtaagagggagaaagaataatgaggtgctacagtagtatgaggtactggaatttactttaaagctaatgtaataaaaaaaaatgctctttgcacaagaaaaagcaaacatagcagggaacaaaatcaaattgagaaacatatataagtaaatgtagaacgttactgtatgataaggagggtgtttcttatgtcatgggaattagaatttatttaataaataatgttggcagtatttggctatcaaagcaaaaaaatagtttgaatgttatgatatatttaaacaatttggttttagatgaagaaagtaagaacactatacatttatatgtttacattttgcttgttataatacatattaccttatgtatataccttatataatgt

SEQ ID NO: 35513 - DNA, 1389 bp, Bovine  19866880679705
  misc_feature (1)..(1): n is a, c, g, or t
natgggaagctttcaggaagtcacaagatgggagagaatttacaaaataagatctatgtgggaaggttaagagaactgtagatgctccgtctggaggatataggaagacagagtgaaacatcaaagctgtcaacatgtatataaaaggatatcagtgcaacatgttattgccattgactaaaaccaggaggaatggagttaaatggcagaagaaaaattctggagaaaagaaggcctcacttccaccccaccttcaacccatcttaaatcagtgctgccaaattctcatgtaaagaaatgagaagaatctagccattattcacattcaataaatcctgaaacagttcaagtctagccatgacaatgtaaatagattagccaatccaggaacttgttctaagtgcccagcatccatctctatgtttggttagctgctcaggtgaaagttatgttgaaaggatactctggattttgaaggggttgcgggggacaggatttttcagctctgttatcacattaactagtctggggctactgacagtgcatgcttctgtatagaggcctctggaaaagacaaaggtctctggccaagttgctgagaggactgagctttggttctgatacacaattaaatggaagatcctaccaagaagtgcagaaaatctattaagttcccttccagctctactgtccagaaaaagaggcagttgtttggagaagagcctctatttgttttattttattctcttctgttagagcagttatgaactactgtctaagtacaaagcctataattgacagcactttgaattatacaagttgccctcttcctatattttattttagtggattcttacagctttttgagaaagacattataatcctcattttaatgactcagagagtttcataacagaacattattagtaagagcagatccaaagaggatcagagaatagaagtcttgaaaggccatatcaaacatgagagcaaagaaatccaggggatgtgaagagagagaagtgacagatttatgagaaaggcagcagtgactgagctgttgaaataaatgtgattttattatctaatttaatctaactttgtattctcaccaccaaatcagatctttatcaagatattagcagagtcatcctgttccttgagattgctgcaaagtcatttcaaaaccatcctcttcaaatggaaagttcaatgtcttctccaacatttctactaatccctgcagttgcaaattcacttgcatgctcctgatgcgtccttaattttctactacatatcttaatgctgcttatttattgagttgcccttaggacctatttttcaactcttgattccatgttccctcaccccaaactaccattcatagaa

SEQ ID NO: 35514 - DNA, 1415 bp, Bovine  19866880693747
  misc_feature (1)..(1): n is a, c, g, or t
ntccatgagacataagaatgaaatagtattaatgttttgaatttctaagttttatcctattatctttccccttatctccaggagttggtgatggacagggaggcctggcatactgcagtccatggggttgcaaagagtctgacatgactgagcaactgaactgaattgagctatctccgattttatactaaaactttcaaaaactatagctttggacatgatacaaatgagcttatttacaaaacagaaaaagaaataaaaatagggggaaaaaagaaaagaaaaaaataaaagatggaaaggcttcaaccccagggatgcaagcgatcatggaaacatttccattcaccatgattccaaacttttcccatacagaactttgtttcttcggctgccatgttaagtttgaacagcttttccatttcttgaggtctgttcatttagatagtaattcaatactgttgtagacatctactctagcgttggggatgtggggaatattatttttgaaaagggtttaggaatatatggttcactttaaaagagcagaaattctgtcttatcaatttatttacactaagggaaagcatgttggttgcttacataccttggtcttgttaggatctttgctttatatttgttcacttttacaattttgacttgaagtgtcacgaaagaactattatcttatgccctccaaatcttaatcagcctttgaaatgtacacctctcagagctgttagtaaacacagatttttgcttgtttgcaaaaacaagaaagaaatatacttttgaagaactgaaaaagaaaacctcaacagcaaggagcagaagtaacaacaaaagagcaaaacccaaaggccagtgacctggactgatggagacaatcaggtaaggacgtaagtcaaggttaagactgcagtgatctggactgatggagacaatcaggtaaggacgtaagtcaaggttaagactgcagtgatctggactgatggagacaatcaggtaaggacgtaagtcaaggttaagactgcagtgatctggactgatggagacaatcaggtaaggacgtaagtcaaggttaagactgcagtgatctggactgatggagacaatcaggtaaggacgtaagtcaaggttaagactgcagtgatctggactgatggagacaatcaggtaaggacgtaagtcaaggttaagactgcagtgatctggactgatggagacaatcaggtaaggacgtaagtcaaggttaagactgtacgaagttactgaacttgaaaaattatagaagctagtgttctggagcaaggaaaagactagagaaagaggtcatgacttctgagagagtcaaagaaatgactgaggtgactctgagacacactaaaaataaatgctcataaagcatatatact

SEQ ID NO: 35515 - DNA, 2919 bp, Bovine  19866880764199
  misc_feature (1)..(1): n is a, c, g, or t
naaaagtaagaaagggagagagggcaagagcaagaatgcaacttgtaaagcaaaattttccatgaatgctcacaagttccacatgagtgtcagaaccaactagatgccctcccaccccactggttccttctcataattctacctgtctattaaaaaaccaagattaagtagcccttcatagaagttaagccctttttctctcttcttgttcaccttttccacctgaagtgagataagttgagatcttgaagaattagaggaactcgcaaaccctctgctgacgctaactggaaccacacaactgagccattcatttagctttaatgctacaaaagctggaacgcctggcaaatcaattctgaagctaaagtctaaacagaactcccagttaagagacaggctctaagaatctgtttgttctgttcaacttgtttgacttcatgacaaatttgtttaaaacattcctaaaatgaatgagttgaggtttctgcctcagtgtggtcactgagcagaaaagaatgtctcagaaatgtccctcaagccttatcacgctaggtgtctctgaaggatatcacaaccttctgctacagacagctgctgccttggcctcagggctggactgggcgtacaattcaagttgtgccttttgtgagtctgtataaagtccaccttggaaaccttccatgcctttgtttcttcatctttaaaatggatgcagtaactattgctgtgtttaccctcccgagctgatgtgaagatgaaccatgagaccacacacatgaaagaatcttgtaaaccatataatgctttatatcaagtcacttgtcccaacacaaagataccagacatgaaaaatggggaaagaaataggatcttcaagatctgattccatgaatgttggaaggtacttgttcaggaaaggtgtgtatggttgtggatgtatggagtgtgagttgcagtaaaacatccaaatcaaagaacactaagctatggagagaaggcctgagagcctgaacagtagggtaagaattgaggtacagattttggagtcatcaacatgggagaagcaggtgaatccatgactttggaaaacacacctttgaaaatttcacctcccttttcatttttgtagccatataattctcataccaatcccagctgtctttcgttggggttatcaaaatgcacaactttattaagaaaaaaagattgctttcattgctgcaaaatgttaaatggttcttttgagtccctattctcttactgtatacattatccattcaaaatatcatgaagatcaggggcttttcatggccatataaactacacatgtggtctcttctttcatgtaacctaaactatttcctaagttactgttttgagtgcataaatatacctaccgtataatttaaagtaaacagtgagattttaaaattgtcaatatatacggcaatatttgaaaatcacaatctttcatattcttgaataaagagatttacttaagtgttttttatgacctgagaatccctttatttggcccaaaacagcactattgcaaagtcaagtttttttttttaagacatttatgttgtttgaaatgtagctgggactgaactccaggacttgtcagtctgtgtcagttgcctttcccctgatgctaaaaccattaacaatttcttccacctttgacagttctcacataccaattcattgctggttttcttttttaaaatttcgtaccatttacattagaactcttgagacctttggagttagttaaaagtatccctgcttgaaataggttagattctactgagactatgaaagtcacacattagttttctgaagtacattattaaactgcaatgttgcttaccttaataattagaatttaactgagagtcaatttactttttatttaaattaaaggaatgagtagatgctaacagtttacaatttaaaaacggtataaacggggaaaagcccttattgtaccattttaatttaaattttattgattttgctgattatatgtgttaaataagtattcatcaatccctttgcctagtttcactaaattttccttttctataagaagatacaacattaattagtcatatagcattttaaatctctttctaaatatgtgtatcatttgtgataaggttaacagcacaaacttcatgtaaaacatacttagagcaattatgtttgtaggtaagacatactttaaactgtacagtaactaaagatgtacataatacatgaaaagaaaaaccagaaacactgtacattaaaaaaggagagagatactagaaatcatttttcattctctttatcattaatgacgtcatggtacagatgagggatttggggtttttaaatgaccagcccaagacacacagagacacctgtgtatgtatgtacacacacacatatgtgtccttagagcagttccattttgtttactgctatgtcctcaatgtctgctacagtctcagcgtaaagtcagggacaaaatagtaaatatttgttgaaaatgcaatttacttataaataaaactcaaatctttccattgttctttccaatacacaaatggaaacatttaacatgtcattcttgcaaatttattgggagaatagaattgataaactgtgtgaaagaaacttgaaaacacgtaagtatatacaaatctaaagcagcattattattgcagtttaaatttataaaatctcccacttttcttactgtaggtccataaattgaagaaaagcaaaatttacaggaatgataattttaaagacaactattttaatttcttgaatgatctggctaggaaaaagcttttgggtctaaatggtgaagtattcatttttaatggtagttctataaaggaaaagaattccttattacataca

SEQ ID NO: 35516 - DNA, 1707 bp, Bovine  19866880855848
  misc_feature (1)..(1): n is a, c, g, or t
naagtgctgccctaataaataagactgcgctctgcctggaaggctggggaataaaaagccactcctacctgttaaaagacacttatttcttggaaggaaagttattaccaacctagatagcatattgaaaagcagagacattactttgccaacaaaggtccatctagtcaaggctatggtttttccagtggtcatgtatggatgtgagagttggactgtgaagaaagctgagtgctgaagaattgatgcttttgaactgtggtgttggagaagactcttgagagtcctttggactggaaggtgatccaaccagtccatcctaaaggagaccagtcctgggtgtacattggaaggaccgatgctgaggctgaaactccaatactttggccacttaatgcgaagagttcattcattggaaaagaccctgatgctgggagggattgggggcaggaggagaaggggacaacagaggatgagatggcttgatggcatcactgactcgatggacatgagtttgagtgaactctgggagttggtgatggacagaggcctggcgtgctgcgattcatggggttgcagagagttggacatgactgagcgactgaactgaactgaattgaacctgttataagtttgggaaaaggaattttgtctttttgtttttaaactttttatttcatattggagtatattcagttaacaatgttatagtttcagatggacagcacagggactcagccatacatatatatgtattcattctcctgtaaactctccttctcatccaggctgccacataacattgagcagagttccctgtgttatacagtgggagattttcatactatgtgaagtaagtcagacagagagggagaaattttgtatgatatcccttatatgggaacactaaagacaaatgatacaaatgaacttatttacaaaacagaaagagactcacagacttaaagaataaacttatggctgccagggggaaaggccaggggaaaggaatagttagggagcttgggatcaacttgtatacaccactatatttaaaatggataaccaacaagggataaggaatttttgaaatctggtctgcagaaagccaactgaatattaagaatggttatctgaacttgatcaccgttatggtacacaccatcttagatattgttcttgactgcagatctacgattcaggttttatgtttcttctgtcctagagtcggatgtttcttttgctgtttggatgagatttacgactttgatggcaaaactcaggctctttcagttgtttcctataatcctggtgcccatgacagagctcttctcacagtagctatcactaaatgagtcaagatagcaaaacgaatgacagtgatctcaatttagtgaattattcttttgatcaaaaatcttgccaagttcctgactgtcagaaaccacttgacctgccaggcagttagaggaggaacatgtggaagtgtcatcattcagctggaatttgaggtgaaagctcaagagaaactgctttagtgaaaaatctggcaatggagctccatccaagtacattagaaggcatcaaaaggaaaatgttttctcttgtgatttttccttttactattaactgaacacttgtaaaactgatgatgatgaatcttaccagtcacctagaattctctgtaccacgggagaaaacaaaatt

SEQ ID NO: 35517 - DNA, 1737 bp, Bovine  19866880911416
  misc_feature (1)..(1): n is a, c, g, or t
ncccccagccccacatccagtgatattcagtgaagcatgaatgcatctgaatgcaaatgaggtccagcacaaacaatatttgcaaatcagcacatatcttatatcaaagtgtcaaaccagaagtatttgctttctaaccagaagtatttgctcaccactaccattcttttcctcatttctcctttgcaaaccataaggaatagagaaaatggatattatatctttaaaagtattccaagtaattcagattatgtttttgttgctcttcctgctcttacctcccacccccttacctggaggcactatcctacctcatgtcaaaattcaaagtttgagcaatggtgtgcttaaatgctgatatccttgacagtttccctttcttttctactttaaaattagcagaaaacaaaaaccctaccaaagaacaaatcgaaggaaatggttttctacattagggatcccaagaccacagaatcaatactactgcttaattatatcaaaatgtcataccacagtttataacagaggaaacaaaatgtaaggaaaactttatgactttatgtagcacttcaaaacaaacctattgtaaagtgtggttttaagatataaattgatttgtacatttcagaagggaaaaaagacactccctgacctctcaagtacctaactagaaatcttggcaccatctataatgatttggccccaatcctatctgtaataggaaaactagaggcaccagaagctgggtctgaaactaggggataattagttccatccattagtgaacattttatgagttcagtaaatgaggagtgtctggttgagtgcttagaaggaaaaggggaatttggcaccataaaatcataatatactatttattaggaactttcccaggaatttaaaggtcatctgcctcccagtcccaaagaaatacaaccctgcagaaacctccctggccatttacaacctacctggctaagccttccctcggggcctgaaggactgacctatctacagctcaggcagcagactatcctgaggcctgctctaaatcttcatatccagcctcttctgtcctacacgggctacgaggctaacatactacccatgcatgtgcccaagctgcagttgtcagactgagtccctgttccaggaggtggtatttgggtaggtaattataaagtgaataatgaggttcttcacataaccatgagaaagtcacctccatgagaattcagaaatctaaagtccagtgtgatgagatatgatcacaaatggggtgggattcagctattatgtggttctgacaaatcttttcaataacaccttttctatcaacttggaaatagttctctaagatgcccaattctgatgtcagctagtcttcagggaatgcaagcaatatcacagtgcaccaaggaccacctagggggcaaactatcttgaagatccttatttatttattcatttattcctttgacattgcctttccttcctttccatgtatttatccatctgtttattcattcatctatttattcatctattcatttgtcattgcctttccttcctctccagctttatatcagaacaggtttgaaccacagatgaacaaaatgaagaagtattttccagattaacaaaattctctccccatgctgctgctgctgctaagtcgcttcagtcgtgtccaactctgtgcgaccccatagacggcagcccaccaggcttccctgt

SEQ ID NO: 35518 - DNA, 1403 bp, Bovine  19866880924119
  misc_feature (1)..(1): n is a, c, g, or t
nacatctaaatcatcatagtatataaatgattataaaattccatcaaagtgattttcttttggtcttattgatagtcaactacaaagcttattatacaatcagccagtattttctcacaatagttaatttattaataaagtatttcaacatttgatagatattacataagcacctcctatgttccagactgtgctaggggttggccagtcattgggaaacaagaattttagggtgaaaaattcttgattttctcattttggattttggacatggggccctctttatcttctctactcagaagagagattcttattaatagatgccaagagtttctttagctgtaacattgggaggcaattcctttttcagtctccccagtcctgcaaactcatgataggccgtctaccagcaggcactgctagaaatgacctatgaattatgataagtctggcttagcaaatcaaacagatatcttaaatcaacaagtctttggctgattcccagctataacaggactcgttccaaatcatcatctgtagtcactagtgaaaaatcaatgagcagctcactgggatatgtaatgaggaaaaagacatgaattgaaaggaaaacaaacaataaaaacattaaatatttagtgtgaaagaaaatcaactgcctacagtgttatcagcaatttatagtcttaaatttatgtaccatcttgttatttaaattagtgccttcccctaaaaaactaccataacaagatgcacttgagtctagtaaattttggcttgcagacataaggaagcaggcttagtttgtgctgcagcttttatggttttgccagcatggggcatgggcttttccaggggtaaacatgttctttctttcattatttgtgaaagagtaacatagaactagctaacagattattttttttttttctactgaacaactgtgaaacagttatattttgctcaaacatcaacctttggggaacttggacttgaagcagtaatttgtaactggctgcaactcagtatcatctgtagagggtttaaaaacttcaggtgcctgggctgtgtccctggatattctgaaaagttcacaagtgagtgattctgttggttcattgggattggggagccccaggcagcagcatgaacccagttggagggagctatgtcaggggtccctgaggaccctgagagttgggtaaaggctgaactagacatatccagataaagagaacaaaaatggagaactcagttcatgctggaaatgaagagaaaggatacaaatgcctttaataaatgatgcaaacaaaatgttaatttaatatgttttaaaaaaagatctagactaatgctgtccaatagaaacatatgtgaaggatgtatgccattcaaaatttaaa

SEQ ID NO: 35519 - DNA, 1318 bp, Bovine  19866880979111
  misc_feature (1)..(1): n is a, c, g, or t
natttccgtttgaggtgatgaaaaggtttggaaatagataatgatattggttggacagcaatgtgaatgtattcaatgctgctgaatcgtacacttaaaaatcactagtaaattttgttatgtatattttaccacaattttaaaatatttttttaaaaagagaagctgtggacgtcccaggtagcacggtggagaagaatccacttgccaattcaggggacacaggttcgatccctggtccaggaagattccacatgctgaggagcagctaagcccgtgcaccacagctactgagcctgtgctctagagcccaggagtcgcaactactgaagcctagagcctgtgtgccacaagagaagcctccgcaatgagaagccctcaacaaagagtagccccactctcctcaactagagaaagcccatgcaaagcgacaaagacccagtgcagccataaataaatgaataaataaataaagttattttaaaaaagagagaagctgcaaaggctgcttgtaggatttaagagtgagagtaaaatgcaattcgtaagggaccctccctctcttcttcagggatgctgggccccacggcctgtactatcttcctgagatgctgcaagaccacaactggaactaccagcccagatcccagcttcccctgtgactctcgccgtcagtcctctgggatctgagtagctttgttgttgattggaactagctccaccaccagtcctgccactagaacacacacagggcccagtgctggtttctgcagctttgagtttggtagaatgccagcaaacacagcttttactgtcataattggtctaaatttaaacgctcccacttgtttttgtttctcattggtatgtgtatatgtggacacagcctaggtttgtgggtataaagagttttgtcaacatggagagagtgaatcagagttttctgttgtctaaaccagcccttattttctatcttgatttccctatgcattgataatgccctccagcctttgagtcaaggagaggttggaatccaaccacttaattggaggttttccagttcatagcagttaacttttctgcaacttgtctccttaatttagaacaacagtcaaagaataataagcgctctacctcacattagttagggcctatttctagaactctgtgtggaatattcaggacacatttattgtctttgaagagtttttagtaaaattgtgaagggagaaatcaaagctgtcttgaattttatttgtgattttccatcaaattgctaaatggggttatttaatatttttcagtgaatgcagcatca

SEQ ID NO: 35520 - DNA, 1992 bp, Bovine  19866880999636
  misc_feature (1)..(1): n is a, c, g, or t
nattaaatgttggctctcttagaatcatcggtttttcatatagatttttcaacattttatttaatgttggaaggatagttaaaagaggagtgattctcagacttaagtttttgaatactcatttgcaaattcactgctaagaacaatctattactgcatttgaggtggtcagacgatcgctgtaaaaaatgcactagattttgtgttacctgtttatatattcatttgtgtgggggataccggctagctataagcaatgcattacacagttcagtcttaacattttatatagttgtttttttatttcattaacaaactgttgtgctgttctttggaaccactttctatgtttaattccggtctatcaagtgataaaatttgttgatttttgaacgtttacagttaatttctctaggattttgcttatgtttggaaatgtgaaatctgagtcattcctgaaagtttttgcattattgaagtatatacatctgttcatgtttttatcacaacttgattttatgtaatagagaaaaatttttaacaacttattttaaaaagcattaatctaattctggtttttttgttgttttgttttgctttaggaaaggggactaccacaggtatctggctgaatttgccacagggaatgacaggaaggaggctgcggagaacagcctagtggcttataaagctgctagtgatattgcaatgacagaacttccaccaacacatcccattcgcttaggtcttgctctcaatttttctgtattctactatgatattcttaattcccctgactgtgcctgcaggttggcaaaagcagcttttgatgatgtaattgcagaactggacatgctgagtgaagaaagctataaggactctacatttatcatgcagttactacgtgataatctgacactatgtacttcagaataaggaagcactgcaggatgtggaagatgaaaatctgtgagacataaaagtcaacaagagaaaccatctctgaccaccctagaccttccccatcctacccctcttggaattcccccattgtcactgagaaccaccaaatctgacttttacatttggtcttagaatttaggttcctgccctgttggttttctttctttctttctttctttcttttttttttttttaacagttttcaaaagtgccgggagccagcatgggagtccccacccatgacaaggtcatgtgggagagctctgatgggcaaggcgagtcagagttcgaggcccccgcccccctggacctgcctgagtgtctaccccaaaaccagaatctgtctgttttattatttcatgaccttcaccaactcctctgacatttacgggggctatccccgaccacctttctctgtaagaaaatcaacttagagctctagttaataagtctccagggtataatgggtgtgttccaattcaaatcccttagaaaactttctaacctgcctgaacaggtttccggactcttacagctacgcatgtgattgttcgcagcctcccaaccatgagaagcacaggaagttcaagatatcctaacaatgcagagcctcttggggagttagaaacggttataatagaactaatagaggatttctttgttgaaccaatgcctgctgccaagtttccatatctcctacccactcactgtaccccgggagtgtattgattaatatagttagcatatagaaatataagtagtaactttaatgttaataaccttagacctttgagctaataaattctttccttgattatcccccactgcaccttttgccctataggaatgcaactctatctagtgtgctcagggagtggcgctaaactctatgaaaaatcacctgaggagaaaataagtttttctggttaattaacccttatcagaagaagaatgttagcaggtctcctgaccagaagatgatgtaaatcacctaaagcctttgtttatgataagtttgtagaaagaaag

SEQ ID NO: 35521 - DNA, 1400 bp, Bovine  19866881000868
  misc_feature (1)..(1): n is a, c, g, or t
naggtggacacgactgagtgactaagcacaagtacagcacatagtcatacaactgtggtaagtgtcagagccaggatttgaatccaagtctgcctgacattacaactcatgtttttagaaactgaattatagtttcaggatcgtttgggtcctagaaaaactgaagcatcccgagtaactggggtatattttatcactgctcttgcttcagatgggtgacctccagctaattgttaaattctgtttagttctcctaaaacaggtgctggtggaatttcctttcaaatcactagccctctgccatgttcagaggacccagctcacagagaattgtccacatggagtaggttggttgcaaaccagtcaggatttcaaggcacaaacagcttgatagcctgtctgattgatgaacagtgatgatgtcaaaggcagattctccctaaagccaacaaaagtaaagcccccataactctttggtgcggatgacatactccattcttaccaagagtttaggcagcctataagtgctctcaccacccgtgtgcctcttggcatggggactcagtggtctatagcttctgaatttgttcttctgtaaagtcagctcagatcttattccccccttattttacccaccaactcatttcttactttcccataatccattcaaccgtgcagtgcagtacagtgcatgcatgctcagtcatgtccgaatctttgtgaccccatggactggagcccaccaggttcctctgttcatggaattctccaggcaagaaaagtggggtgggttgccattccctactccagggaatcttcccaacccaggggttgaacctgcatcttttccatctcctgcattgccaggcaggttctttaccacagtcgccacctgggaagccacagacttaggaactaaatgatttatttgttgttgcatgatgatgatgatgttgatgaatttagttgcttagtcatgtccaagtctttgcaacccaatggactgtagcccaccaggctcctctgtccatggaattctccaggcaaaaatactgaagtgagcagccttttcacttctgcaggggatcttcccagcccagggatcaaactctgatctcctgtattttaggcagattctttatcaactgagccactagggaagccccttattgtgcatgccactgatattttgtcgttgttactcaacataacattataaatagataatagatacacccgcttcataatttctgaacactccatttgtgattgcttttagttgagtcatatggacaagaggggcattcagaaagacggccaggtgaacccttgctcagattgtgaataattgtggtgctcagatggcaggtataatgagttcagagatggcttctaattga

SEQ ID NO: 35522 - DNA, 854 bp, Bovine  19866881045162
  misc_feature (1)..(1): n is a, c, g, or t
nattgtgttaatagagcatggtatttagtaagagaaaagcgatagcataaagcatttgcaggcaatatacacagatgtcagacaaatggtctttggggtcagacaaccatttatcagatcccatttccagcttatcatagcaactcttaataagtgattcctaaaactatcaaaagtagagtaaaccttttaacttgagctgtaaatattcattctttacaaaactgttggtgtagggtcaagccttttcctgtgctagtggagcggaccttcccatcagaatgccctcatatggccatagctatggtttgtggcttgtctccattctcttttgctaggtgtgtgctcctattgtttataataatatttggaatatcatcctcctgcgtttaggtcccctgactggagtttttcattttctcatttaaacaaacccatccttaattatctaagatttctagatgcttctttaaaaaaaaaaaaggagtataattgctttataatgttgtgttagtttctgttgttcaacaacatgaatcaactatatgtatacatatatcccctcccacctttctttctttttaatggagcaattacctaaagacaactctcaatcaattcaaatcttcctagaatttttacattttttccttttacagttttcttgctctcacttatttcaagagaaatattttaagagactcatctgcagcaagtttctcaagcattcgagttgattttcgtataaatagtaactcttttctcactcatatttcatcagcttatgtaatattgtattaaattatataattaaaatgaccaatagagaggcatcaacaggatgaggacaaaca

SEQ ID NO: 35523 - DNA, 1608 bp, Bovine  19866881061754
  misc_feature (1)..(1): n is a, c, g, or t
nttgtggagtttcagtgccatatgaaagaagaatatctataattatctgaaagaatataaaatatttctccttttcaaatatacagatggatgagaccaaattttctttatgttctttatccaaataacagatgtcaaggggttgaatgtagaaatgtgtaatatgcaaaaaaatatgcaaaatatgtcatttttctcactattttttgtttttaacaatatagttaatttttcctaaaaatgttatactaatacataatttggtattgtttaggcaccaagtcatgtctgactcttttgtgaccccatgaactgtagcctctccggctctgtccacaggatttcccaggcaagaatactggagtggattgccatttccttctccaactaatacataataggcttgttatttttaaatagagtaataaagaaatgctttagaatttattttagctttaacttctaacacagtaaatgtccataagtataatcacatttttaaaaaatctctttgtagtcctcaataacatttaagagttgaaagaggtcttaaaaccagtttgagaaccactgcactaagtactaagtcaaaggagaatcagtgactctattctctattctaagaaaatcaggaagagaagaagaggagagttaccagcatagtcaagaacaaagaaccattcatttttggtttatgtcctctaattgaataaattgtgaaagagctataccaatttttagtggcccaaagggtaacaaacactcagaggtcaagtcattctaagaagagggtaggtgggagtgttctgcagcactgtgaggttagacctccttccatttggactaatccatcacctttgacaggaaccgagaaaaaagacagtgatttctggggaaagaagtaaagtaatccaaaccaggatgacaaaggcaggaaacacaggtaggcaaactagagagaaaagagagctgtcccaaagaatgagaagaaaagtgaaaggaagacaaaacactagtatttggagggtaccttttaagggtagaacacaaactccacccttcatgtgtatcatcttatttaatctaaagggcaagaccaaaaggccaatattgttattacatatgtagcaccaaacattcttctttttgagacaccttactcataaactcttctcggattctctgaaaacacaggagggacactgtgctccctgaactcctctgaactcctagcccaggactggggattcaatggaatcatgtttgtattcctgtgcttattcatgtttgtcttcttaaatgcatagctgcttatgaaaaggcgtttatatttttcctttgatagtccagatatatgttaggcagcatcattacactttcaaattgtagacctccttgtggaggataaacacagagaatgctaaatttgcccaagccatagggagtaaaacaacagaatgtacaaaatgcagaacacaatgagttatgtcacaagggaatagcataaatatgaacacctcttatataggatcatctctgcagcataaagactctcagcagccacttttggaaattgatgggttggtgcaaatgcggagcatttctgag

SEQ ID NO: 35524 - DNA, 1929 bp, Bovine  19866881101631
  misc_feature (1)..(1): n is a, c, g, or t
naaaaaaacccaagtaagcactaaaaacaaaacaaaacttacttgtcgaataaatgaattaataaagtgtattcaaacttaggacagtcattatctgacccatttcattgccttttagtcagattagtctcatatgaaagtatttttgatttgtaacatatagttcggaagggagggataaaggtatcttcatttctgatctgaaggaagtgatgtgatgcagagttagcatattatggcttactgtttggggtagaaacttcatggggtgaaatcccacattgacaaaaccccagcaatgattaatgtggctcacctgtaactcataaccagcaatttctcatagttctcatgagcaactctgctgactctcagaaattatcctagtaaacaataaatcacaaaagtaattaaaatgcccccttagagttcagtagacttcttatattcaattccacacccagttatctgagagacattattgattcagatttaggaccagaaaataatacaaagtcatttacataaaatattgttaagatttgttatttgccatttttctctgcctttgtttggttcctatattcaagagtacgcccttgacatagaatgacttagatgagtgttgggtatagaatggccaagaaataatctactccttgaaggtataaatctgtcttcatagaactggaaaataaaacttgatctgaatatcagacttataattgagcccaatgtcaccttagccacaaataagacattggaaaggaagcacattaacagagttgatgtgtttcataatgttggctgcaacaaagtctgtgaggccaggtagttcaccagaattccaaaagaggaggaatgccttttaagttccttcccccttctccctttgcctctctttttttccctgtccagttttctccacacaagcattgcaaaattccaggagttatgcatctccccttccatcatcaggccagaccaactgcctttttaggatacacacttgccttgaaaagtcttcttttcctttgctgtgggggattgtgagggtttttctttttttttttttctgtgtctatttcacatatgtcctctaagatgcatcctttcttttgtgccaggaccaagaattgcttgagagtagggcagggaatgagaagaagaaagccaaaggaagtgaccattacaaggacactggactcctgaatgttgtatgagaggggaggctttcttctggaaacctgggagttaggactcttattggaacctcactggttgaagcccttgtttattgcacctctcattgttctcagtttttcaagatgtcaatatgcctggaattatagtacattctcctctgccccagaggaagttactgggcactgaactgttgatcaattgccttttctttctcccatccatattcatcctccccacccttctacacaggagtgaggggaaaattagggaaaatcttttatcatatcagattctcattataaaaattgtgaaaggatcaactgaataataaatgaaacacgactctttgagataacaaacaaaagtgctatatctataaaaagtaccctgtcatgatttcccttataaaacactccatgctgtcataaaacaccccaagactttagtaaatgtgtttattatttctgcacacctccccaggaatatttttagctgcttcaaacctcctcttcttatcttttcttcttccttcttctttctagcttgcttattttaatttcctcctttagaagtcttgttataagattttttccccagtttgcagtttaacaactaggtcaatcagataatgtaagggttagaaaagactttagaggtcaccaaatgcagagaagagggaaagcaatagatgaatcttggaaggcaaaacttattgtgcagtta

SEQ ID NO: 35525 - DNA, 2398 bp, Bovine  19866881174492
  misc_feature (1)..(1): n is a, c, g, or t
ngagaagaccctaatgctgggaaataccctagtgcaagaggagaagggagcgaccgagaatgaatggttggatggcattactaactcaatggacaagagtctgagccaactccaggagatcgtgaaggacagggaagctgcagtccatggggtggaaaagagtcagacatgacttagcgatggaacaacaacccttttgtaagagacatacatgtataagagaaatctgcatttttttaagggtataccaggaagagggggatgaccaaatctccagaaactcttataagtggagaaggtacccacaaatctgcaaaccaaacccttgttttctgtacttttctagtaaccttgcataagtggctccccattgtaccacatgtcaccccctaacatctttcttttgtctttagctgatgacagtatgtaaggtgatggctcaggccatttaagggagttacttttcctgggtatctcccatgtatgcaggaggtattcatatcattaaacttctattcttctcctattgatctgtttattacagaagcatctcagccaaaaatctagaagggtaggcgaaattattttccctttaccacacaggcaatgggagaatagtggagataagaatggaataattttctttaatggtaaaactggaagactttgaaaacttaatagatatgatttatagaagagaacgatattgcacattttcctgagtctgtcaacagcaaatgggaggtcagaaggtgattgattttgtgtagcatgtgataccttgggttttaggtgcattgagatggaggttgtcaagaaaggtgaccagagacacttggcacatgcattggagccatgggtaggaaaggtggaccatcaatttagaggtgataaaaacaacatctggatgagtcacgttgccaatagtttcagagcatatgaagaaaaataaatctggatgggggcataaaatgatggtgtgaaagttctgacactatcatagtgtcatagtgttttacagaagaagatgatgttttgagtccttcaaactccctatgtaggcaactgccatctctgctcataaggtagagagtggacttgctaagactccatctgcattgcagtggagccctgcagtatgataagtcccaagaaatctaacatttggcagaaaaaaatggcccatcccagtgtctatttggaggttttgttttaatcaagcatttcatttcggattcctatctggtagccttgaaggcaagcagtcacccttctgaactctgtttcctgacttccatcagggtaggtcacattttcaaggaaagttcttctacctgaccccattaacgttatcctagtaggtctggcatcaataaatcattgttttagtctgctaaaggatacataatgtagtccatttaaattctgaaaggtttagactttggccttagtccctgaaactctattatattaattgtctcactcactctgccctacttgttaccgtgtacacaatggaaagccaatgttgtaattcaaaggaatgtgacattatctctccatcttctcactaagcatccagtgtctctttcccctttccctttcctgctttggaatgcaatttattctaagtaccctgaagagaggcttcaacatttgttgatactaactagttctgatcttctctgtccctctccacatgctcggtggaaaaattccaatcgcaaaatagcaaataaaaacattaccaaatctctcagggaggctaaataaaggatcagatgctcaggcagcaaactaaaataccagaatcctctcaggcatatgtctgactttgacaaccttcctatttctctgattctcctattgaactgacctttgaacaccaagtcaaatttgtgtcttttcatgtaaatcagtatacgtcattatcaccggatgtcccagacttggattaccagaaaacccgaaaaacagtgttcaacactcaactacagtgtaagtgccatgcagacaccctcaggatttaagatcatcaactgtgccgaaataagcatgacaatggcttcattgctgtatttgcatttattgctttggagtactgagttatatgataaaatcatccagcaggtaaatagatgggaactactgaaatggaacaaagggaaaggattatgtatagaaggatgtgactctctttgcaaacacgcaaaaagccgtgtttactgacagaactgaggtgaacatttcacaggttgatgaagatttggagggcatcaggaaacagttcattcatgacaattcaagttaaaattttaaaacccagcaaatagaagaaaagcatcctaacaggaccaaggcatataagtagccaacatgttttcccttaatagaaata

SEQ ID NO: 35526 - DNA, 1113 bp, Bovine  19866881177805
  misc_feature (1)..(1): n is a, c, g, or t
ngtgtgtgtgtgtgtgtgtgtatatgtatatatgtatgtgtgtatatatacatatatatcttatataattggactgctttaacaattctgtcctatatcctgtagttaaaataaaacaacgatctgctcagcaggaaggaaaaaaaaaactctgttatgatcaaacttagcttcccattaaattttctccttgtaaacaaatcttggaaagcattttctctgggtagaaattttgcagactacatctctgctaacaaaagaacacgtatttctggacaacatagaacactgtattgatgattagtaatatggcttgccctcaaatcatatttctggggctccattacagaactgtcacagcagattaaaagaaggatgatataaaggggatgaagaatgacagaatcaaacatgtatcaatgtattaattgtacctattaatattttgtgtcataatgtggcagtgtttcaaaattcattttgcaagttgaaaaacaaatgattgcttaggagaacaaagctaaacaatggacaacctttgtgctgagagcagcaaattcattttaccttccagatatcctttaataactaccctttacatttttctaaattgatacaggaactaacaggaaacataaatgtgaagacagaaatcttagcagtaagagccaaaaagctagattgcaatgcttggcagtagttttattgctaaggttaaatatggcaattcttattttatcttgaagacagtaatctggaaaatcaatgacaaatgacataacctctgcaaaaaatcttacacacaagcacacatcctgacacgcagaactatcatgtgtaaaaatgcatgtgtgcatgcacataccataatttctataaatatttcaaagaaatggtgtgatactaagtgatggaagccagagtgagaaagacaaatacaatatcacttacatgtagaatcctaaaaagttgatacaaatgaacttaactccagaacagaaactgacctacagacatagaaaacaaagttttctacagttaccaaagtggagaggaggggaggaataaattaggagtttgggattaacagatgtacactattatatataaaat

SEQ ID NO: 35527 - DNA, 925 bp, Bovine  19866881185021
  misc_feature (1)..(1): n is a, c, g, or t
naatgctatagaattcctgacggctcagtccatggggtcccaaagagtcgacacgactgagcaactaacacttatcagacatatatccccaccctcttgagcctacccgccaccacccctccatcccaccctcaaggttatcacagagcaaaaagctgagctgcctgtgttatatagaaggttcccactagctagctattttacatatggttgtgtatatatgttaatcccactctcccaatttgttccactcctcccttccccacaccgtgtcaacaaaaccattctctatgtctacgtttctattcctgccctgcaagaagatgtggtacaaatacacgatagaatattactcagccataaaaagaaacaaaattggatcatttacagagatgtggatggatatagagtctgtcatacaaagtgaagtaaatcagaaagagtaaaatgagtgttgtgtattaatgcatatgtggaatctagaaaaatagtacagatgaacatatttgaattccatatctaactggtagttttgacatcttccctgcaccaaactatttctccttgtccactgtctctgtatctaaaaatacacaattttctcttcctcttttgttttattttctgttaactctctccttgtagttttctgtatcctacataaaaatctcatgcaattgcccttttcacatactattcaggtggggatcatgctgtttaataatgctaagctatgttttgaggtaaaatcttcttaggaaataacagtcacataatattgatcacagcaaggaaacatcatgcccccaacagtgatggccaagaagctgcacagcaaaggaaaatcttattcaaaacccagaaagcaatagattcataagaaggctgctgctaagtcgcttcagtcgtgtccgactctctgcga

SEQ ID NO: 35528 - DNA, 1613 bp, Bovine  19866881230530
  misc_feature (1)..(1): n is a, c, g, or t
ntgctaaaattttggcccaagcccataagggaagtaaaacaacagaatgtacaaaatgcaagaacacaaatgaagttatgtcacaagggaatagcataaatatgaacacctcttatataggatcatcctctgcagcatgaagactctcagcagccacttttggaaattgatggtttggtgcaaatgcggagcatttctgagtgtcctgtattagtgacttagagctactgcatgcacacaccagtgccttacaatcatttaatataaacatagatttatctttcctgtctgaaggttctagaagcctaccacacccacacatgcatctaggatttttttccagtggtaggaacatggataccctggagctgcctgtgttctccatctttatactattgagctggttacctgtgctaaatggcatgccctatggctatggaacaaagtttacctaagtggtcaaggcagagatcaaaccctcatttgagtcctaccttggtagtgaaattgacataactaaaacaagcagccaatataatcaaagaattctatgaaaagtatgttagtgtattaaaatccagcatctttattaaatagctactcacagcagaggccatcatgctgtcaagtaattaaacagggactaacattaggggtgattttcagctaatgtcagaggcattcctctcattaaagcctgcctaatcactacatcatgattgccaaaaaaaaaaaaagtgatattcaaaattgctgaaggcataaaaaatttattttcatcttgcctaattatctgaggtgtgaatatgtctgatttcaggactggggagaacataatctccatgatgattctatgcaacaaatttattttgataactgtgaaggaagttccccaaatctagggaaaaggtgtttaacatctgtattcaaaatgttgggagttcacttatgcaaaatttgcacctaagtcctgagcatatcttgctgctttatcacaaccaagattactcaattttttaatctttcacttcctttcagatccctccgttttcttggttaaagaaatggcttctgcatgtaaatttcttaagctcaatttcactgcacatggcaagcagaatacatatttcagaagcttatatatttccccaaatagcaaacaagttcagtgaacttggcttgctgtttacctctgcataaccttttgtgatgctaaaaaatactggatttccctggtggttcaactgtaaaaaaaaaaaaaaaaaaaaatctgcctgtcagtgcagaagccctgggttctatccttgggtcaggaagatcccctggaggaggaaatagcagcccactccagtattcctggacttccctggtggctcaatcggtaaagcgtctgcctacaatgtgggagacccgggttcaatccttaggttgggaagatctcccggagaaggcaatggtaacccactccagtattcttacctggaaaatcccattgacctagaagcctggtaggctacaggccatggggtcgcaaagagtcggacacgactgagcgacttcccttcctttcccagtatttttgcctaggaaatctcatggacagaggagcctgg

SEQ ID NO: 35529 - DNA, 1721 bp, Bovine  19866881233503
  misc_feature (1)..(1): n is a, c, g, or t
ntaccatttggtgttaatttgatctaaaggctttcttctccatatttagacattatgttggtatagctggtaatttgcataagagaaataaattaccctcatattaaaaggagttagttgaagtgtcttaaatgcttatgcagcagccacaagtagaacagttagaaacacactgcttatatttcttaattattgatatttatttatgagagtaattttctgcttaccaattgtcattaatccttacagctttatggttcatattctctcttatgcatgtggtattgactttgtttaacaaattatattattcgtacagttttctaaatttgctgcagaaacttggcattctacaaagtcttgaactgaagggaagaattttcctgatgaaacttgcattggcctaacagaaccatgaccaatgtgcatgatcaaagcccccagagagttaacaataacgaggtaaatggggacctgagaggtaccgcttaagggagataagttctgagcagactcagtgaggatcttattgtctgggagcttgcagttccaaggggaaatgaatatttctcttcatttccttgtccccggagccctaatcactggtggaaatagtatactctgtgattttaccaatctttaacaatatttttcagaacaagttcatatgtttaacaagaaatacccctgagcgctgtttaaatgcactcatagttctcttatgaagtcactcagcaaagactcgttatgctctgattagcttattagttcattctggatctgatagagagttttggggcattgtctatcaacttgcaagaaattaggacagcaaatgcctttgaattgtctttgcttatttaagcatgtctctgcagatgttcactattttaatatgtcttttatttggaaagtgcactatttgtttaatcaattagagatgtacagttctgaataaatgaagtttataagtagattaaaatgctaaagagacatactttccccctcaaatgagtgttcaaccctgcatatcaacatatgggtaatcctgaaagtcaaaagatcattttcaggctcccttagttcatggaatgataataaaaaattacacagtatatagtttatgaagggcaacccataatgatagcttcacttgtacttaggttatttacaaatgatcataaattaatttttctgtaagaaaggaaatatgagagctgtagctgctgctttatggatcaaattattgtaaatctgtggactcattagtggtattttcaagaagtgcaatgcaaaactcaactctcactactctttatttccccaacttctgtttactcctgttattttaatatgaataagttagtgagatggaaatgtggtgcaatagaagaaattagacttttgagttagatacagggctgtggccctggatagctccaagggttgccatcctataggctccgtgaagggcattcctgggttgtgcagcatacatcgtgcctcaccatagattaatgttggaaactcgattaaatagtgttgggcaaagttcttggctctttgaaccttcatttccttgactataaaatggagattattttacttaccagatattgttcttttggtcagttacaaaggaatttaccttccagatgtgattcttttgtgaagatgggggttttacaaggatttattcccataacagcacttaacatagt

SEQ ID NO: 35530 - DNA, 1178 bp, Bovine  19866881238693
  misc_feature (1)..(1): n is a, c, g, or t
nccagtaagtagataagatggttctagcctcatactatcccctgtattaagagcacatctaatgtcaaaaaattataatcttgttgctgtgtttaacaaatggctgaatacaatgatcctatatgatgacacaaaaactctccttcaagaggagaatttgacgatgcaccagatgtaaacatttaccttgaatttagtgaaaacagcaaaagtggaacggtgaacagcatgtgctctggagccagcctgtcttggtccatattctggctcaaccactaaggagctttgcaagcttggtcaagttacttaaactttctgtgaattggcttccttatgttgtatatggcagggatcatattagcaacaaaaattctggatgtaaagaaaatgaaagactaaaactctatcaataaataagattgcatatatactagaaagaatggtctttaaaatagacaggaacctagaaaggatgagtaaagaaatttgagggaaaaaaggaggcactctgttgttatattaaacttgaattgactgtcagttcacctcacctttggtttttatatacgttattattcatccatacacatctaatctttgtagtgaccctcaaagggttatcaactcccgtgcaactcttttgctcactgaataatacttcctgtttaaatttccagaaacatatccacatatcgtatcatagtcccagttctatttgtttatatgtctgggcaagaacatctgataaacacatgctgttgtcctcaagccactctgacttcttggtattcgtgagcacactcaagagacttactaagtgaatgaacgcctgcggaatccatactttcacctactgcccttatagtaccagagatagttaccagctcttctcaggactgttaagaagcatgtttacacgaagatagtatggaaaataatttctcattcacagcggtattaaagtgctccaaaagggtcatggtgaagaagcatagtacagctgtggtgaaatttcttaattcatcaagaagtctgttttcccaatacgaaaatctaggcttaatatgtgtcccataggcatataactactacttctgcttaacacactcttcatattattgcaggatggaaaggggggggaataaccctcaaacatcaggaaatcataatgcttttgt

SEQ ID NO: 35531 - DNA, 2084 bp, Bovine  19866881238861
  misc_feature (1)..(1): n is a, c, g, or t
ntcaggggatgagtgaagcagaagacttccccagcatgtccaatgtgggatggcgtttttttttttttttttttgtctttgactggaggttgctccagtactaccttaagaaattgctacctagcctcctgatagacacggcttcagctgtgtttcccgagccaagaaaattgaagacatttctatgtaccaccttggttttttattcaaaaagtgtagtgttaatttcagtgtaccatttcacacaaaaattattcatagctttagaatttttgagtttagcagcactttggagctgcaagcacattataaagactttattgaaatgttctcaggtaaacaaatgtgggcctcagctcagtgaatttacacaatgttcaagtacacaactgaattcaacctctgaattgtaattttcatctaattcaaattcttgcattcttcaaaacataaaaggaagactataaagtcatgagtgacgctaattgggctatgattttttttcagatccacttcctggttagaaatcaacattttgagggacttttttccaaatgtctcttagattgtgttcaggagtctttattaaaagttaatgcttatttttttaaaacagattaacttctgaagtctgaaatatctattttaatttatttgacttttattaatcaagataactaaatatagaaaaatggattaagtacatatacaccaaccttctctctctcacatttttaagttacttttttgaaagacaagcaaagattatatgtacttgatctttacaacttttattatttcaaaaatgtaaagatgataacacatgatatttgaggtcttaggagtgagaatctctcagatggccaggggaattattgaaattcagttcaaaaataattctgggtttattcacatggccaaattattttgtcttctttttgcatcataattttgattgctacactccagtttcttttttggctctgaaaaccatccagaaatattttggttattgagtatcataataactgtgtcatgagatagttgctctagcagtcaagtagtcaagttcccaatcacggtactgtgcctctggacacgtgggctttcatgtgtgtgactgcaggttaacttggtgtgttcacttattaatatttttaacaaaattatcctttaaaaaagtgggggagaggggagaaaaatgctgcggtgagacctctttgctggcttaaatttacttctcccatgtccaagtaaggagtgcttttttttaagtgacatcatacataagatgaattctccacttttcacgttcagcttgttttccccaaggggtcagataggtgaaagaggaacggacatgactgctgaagtatgctttagttctttgaatttatcagattgattaaggcgaaagattgtttttttttcattttctaatttttcagtattttgtttaagcaaaaaaattgttcaaggcccaaaactctaatcaatgatggtagaactttctccaaaatgtctcactattaaatatgtgttatgaaatactttggtgttagataaatcagagaatggaagagaattttaagaaaacaattcaagtgttttactgtctctttgtgtttgatagtcaactctgttttaggaagtccttttaagctctgagaatataaaacaattacctttcaaaccactgaagtgcaacctgaatatagttaacacctcatatggcttccaggtataaattaaccttgtatacaagccattaggaatacttaatgatcttttatttgtgaatcatcaacattccaaaatttgactaagtgtaataaaagataagcaatgcaataaaaattcttgaatgcaattaggaaacaaggcattatttttatgattttattataatatgcaacataatttcccctgatccccaagtcaatgaatttctgcattaattcctctttggaagaccactctaataatataaggaatcagtacccacccacctaccatcacttcaaatgcatacccaacaataggaaatccaggggctcccaaatattcccccatcagcccacagg

SEQ ID NO: 35532 - DNA, 1311 bp, Bovine  19866881272898
  misc_feature (1)..(1): n is a, c, g, or t
ncagacaggctgcagtccatggggtcacaaagagtcagacgggactgagcaactaagcacacacacacacacacacacacacacatccatttctccctgcatcgggaaaccttgtttaatcaatgtagactgcctttgtcacatgtaatcaaaacacacctactttgatactatcataactttcctgaaatacatttgctaatgttttcttttgacaagttttttgaaatgtgagttacaggtgtttacaagagaggacagtcctacaaataagaaatgacctcactaaagtataccaatatgcatggatttagaagtgaaaatatacgttaaaatataattgatgtttgtgtttgccatatccaagtaatactggttgtttttttcaccactaccttatctctgctgctgctactgctcctgctaagtcgcttcagtcgtgtccgactctgtgcagccccatagatggcagcccaccgggctcccccgtccctgggattctccaggcaagaacactggagtgggttgccatttccttctcccaatgcataaaagtgaaaagtgaaagtgaagtcactcagtcgtgtccgactcttagcgaccccatggacttcggcccaccagggtcctctgaccatgggattttccaggcaagagtactggaatgggatgccattatctctactgtcctatgaatcattctgttcaaggccagtctctaggcctcctagatatctttggaacctgtacttcagaaacactgttgacattgcaaaactggagtcaagatttatagtaagtcacttcccaggtggcactagtggtaaaggatctgccagccaatacaggagacataggagaagtgggttcgatccctgggtcaggaagatcccctggagaagggaatggcaacccactcccaaggattcttgcctggaaaattctgtggacgtaagagcctggcaggctttagtccatggtgttgcagagtcaaacgtgattgagcgcacacacatacacgcacatacttttttttaaatttgagttcatctaataaagttgacttgctctgggcccaacatcaaggacagatgtgtgctccctaggagtgaatgtagtttcagccatgtgggagatttgcaccgctcctgcatgtgtcctgctggggtctcacacacactcctgtcacatgcatacatcatgagatccaccgtcatcagtggctgctcacgttgtgttggaaaccttgaggcaaaacctttcctcttatctaactatgtgatggtaccaggtattttcaaataatattca

SEQ ID NO: 35533 - DNA, 819 bp, Bovine  19866881583777
  misc_feature (1)..(1): n is a, c, g, or t
ntttctctacaaacctcacgggcaacttgtaatccaaggaacactctaccctggtagtatgctctgttgtctaagcaataaggtaccatctaaggctaagttattgatttcagtgacttttagtcatgcttatcttcacagtaactgtacaagtaaagtattattgggaccatttttgcagaaggcaactgaagtccgaagggttaaattgcctaaagtaattcaacgaataaattgctaaatgataattcaaactaagtcccagagacagcaaaaaccaagatcctttcattattctaacttgattgctttaatcctgaaagctttagtacagcaccactcctgtcctttatacggcctctagaatgtataaatcattcacttctcttagtatgaataaatgataattgactgtaacttttcaaaactgtccttcatcaagtgccaaaatgccagatagtctgtatttagtcccaacatggccttcatctaatcaaagtgcttattttgggagcagtcgcttttgagtgttaataaactatagataaatttgatgggatttggcatattttggattcagataaaaagcacctgtatgccatttctggttttttccttagtgctaccaaattaattcaattatagcccttgtcaggcagaagaacactgaactgtggatggctgtgtctttttataaatcaaaggcacgattttagagttttctcagtactctggacttgatgtatacatgaagaaagcagcaaagtgaaagtaataaagcctgtcttaaaaaggcgtttagtcaccatagttcttgtt

SEQ ID NO: 35534 - DNA, 779 bp, Bovine  19866881901516
  misc_feature (1)..(1): n is a, c, g, or t
ncacgactgagcgacttcactttcatgcattggagaaggaaatggcaacccactccagtgttcttgcctggagaatcccagggatggtggagcctggtgggctgccggtctctggagtcgcacagagtcggacacgactgaagcgacttagcagcagtggcagatttagtggtctaagctgaatgaagcctggagttaagaggtgaggttcaggacctcagctctctttctgctttagtggaggacttgcatcctccggtagccgcccagcacctgcttgcactcccagctctacctgtactacttttggtgatgggaagaggggaccttgttggggatgcaggggtaaccctcagctcaggggctgttctctttggcctttgtttggttcttggctgctcagcactcttggcttttccatcattctgattcactcttctttacatctttcagagagtccaacattttgtggacccttggcattctttcctctttgttgcaccattaagcattcttgtttttgaattcctagtttatttcattggaaatctgggagggagacaaggcgaatacattcactcagctttcctctttgcaacttgaaatcttttagtcatttttggctcatctttcttcatcccctacaatatccattcagttacaaaatcctgtgaaatttccttccaaatccatctgtaaactgtctctttctctccacctgctgccatttcatcactgctgcagcgtcctagctggtctattttattccaccatgagcc

SEQ ID NO: 35535 - DNA, 1891 bp, Bovine  19866880081989
  misc_feature (1)..(1): n is a, c, g, or t
ntaagccaacttttcactctcctctttcactttcatcaagaggctttttagttcctcttcactgtctgccataagggtggtgtcatctgcatatctgaggttattgctatttctcccggcaatcttgattccagcttgtgcttcttccagcccagggtttctcatgatgtactctgcatataagttaaataagcagggtgacaatatacagccttgacgtactccttttcctatttagaaccagtctgttatctggatctcaattttcctacccttaccctctctacatcagagttacagttaaggtcctatgaggatacacacgaaaagtgctttgtgaaaaataaaatgctcttctggcaaagtaagactgggtttggtaatagtttttcaaacttctggaatttctctcagagctctacgaccaagcaatactgcaaacaagaaaacagtactgaaacagtccgacagaatgaggctctcagggggttatttgcaagcctgtcagaactgctaatcaccaagacaatgggagagacttctctatggacaattggattagtccataatggagccataataaggctgctcatattctggcacatcctcacaggactgggctgaagaatgatcactccaggaaacaaagctgaatctataaaccaggaggtctggttaaaagatcatgtggggaaaactatcttttgtacacacaactaatatattcaaagctcgagacctaagagaagcatggcactctgaggtatcgaatcaaccagatagttgatagtcccagttctctagtcctaattctctcctagcatttactagtccttttagcccttgaatctatatatatatagatatatataaatgcaatgcttagacctaggaatggggaagtaaaggggtggcgagagatacagggtgaggtctacgatagctacaggcttcctttggtggctcagaggtaaaaaatccgcctgcctatgcaggagacatggggatcgatccctgggtcagggatgatcccctagagaaggaaatggcaaatccagtccagtatttttgcctgggaaattccatggacagaaggagcctggcatgctatagtccacagggtctcaaagagtccgacaggacttgacaactaaataccaaacaacaaaacaaaaaaaattcctggtgctatgattcacctaccagggccctgctggatctccctaaggttcaccttctgtcttcttccatcttaccaattgttaatccagacttacctgcctattccaggaccctcaccagcagagtatttttcatgaacaaatgttacaggtattctaactattaatttcagttttttgtagtaaagcagttctaatttctcaaagatcaaaggtgacaatggatagtttttctcttaatgcttaactttggcatttctagcaaatttctaggagagttaataagtaccatttattagataatctttccatcccaattgagctgtaatgcctcctttgtcacacattaaattccttcataagcttaggaattctgttagaaaatagctacttatttttaaagtgctctgttgctccagaaagtacaactaaaatttataaccaaaagtaaaactaatgagacttaaacttaaaggactcttcctacgtgaactgtctaattctttactcttaatttttttaagtggattccccaacttgtatatatttacaaaacctggatccacccactctctacttccaaacccatctaccatgcctcagctacgcaggaaagcaagtgcaagcaacagtgcccgttctagggaatgtctccatgctctccctgtgtggtccctctatcccaagttcctggattcctcatgcatact

SEQ ID NO: 35536 - DNA, 2409 bp, Bovine  19866880319996
  misc_feature (1)..(1): n is a, c, g, or t
ncctgggttctagtcctgacctgctataacctagctcaaacattctgagcaggtcaccagtctatggaatctacttaacacgattatttggagaaacaaataagatatagatccaaaaatgattctctaaaaatgttcaatagatctatcaattatgaagaaaatttaaagcatttgatgtatataaatttgtactggttacaatactatttcctttccctgtgccacatactagaaaactcacaatgctggtctcagagaataagtagcttgctctcccccaaatcctaagtccaaagaggtcaagtgactcaaccaggatcacaggagaaatttagggaagagttacttctagaagtgaacacaaatggttatgccccctgccctccccagaagtcagaaaaacaccattcttcagagttaaggcttcctaaaagtgaactttaatcaactgtctgtatttgtatctttacactagaaacaaaaacaaactactatctgaaaaaattagagcttataattagaggtgaaagtagacagagccaaatgagagtgctgaatttcaagttattggttcccaccttgcttccgacagcctgggattttgataaaggctccatagtccgtgaccatagcaacctataaaaacacaaaaaaagaatctttatcacacaaatgagctctctcctgtagaatttaacctcatctctttgaatttccacttggtactgactgcctgtgtctgttgcaaaactgcctaaaagtgatattctgtcaaacattctttctgttctttttgagatttaaactgacaggtatgtatgattctaataaaaacactggtgagactggagttatgtcagatgatatgatggtacttgttgttcagtcactaagtcatgtccaactctttgcgaggcttctctgtccttcactatctccctgagtttgctcaaattcatgtccattgagtttgtaataccatccaaccatcccatcctctatcgtccccttttcctcctgccctcaatcttccccagcatcagggtcttttccagtgggtcggttcattgcaagtactgaagcttcaacttcaaaatcagtccttccagtgaaggttcatggttgatttcctttaggattgacgggtttgatctccttgctctccgagggactctcaggagtcttctccaacaccacaatttgaaagcatcaattctttggtgctcagccttctttgtggtccaactctcacatctgtacatgaccactggaaaaaccatagttttgtcagcaaaatgatgtctctgatttttaatactctgtctaggtttgtcatagctttccttctgaggagcaaatgtcctttaatttcatggctgcagtcaccatctgcagtgattttgaagcccaagaaaagaaaatctgtcactgcgtccatggtttccccttcaatttgctataaactgatgggtctggatgccatgatcttagttttgaatgttgagctttaagccagatttttcattctcctctttcaccctcatcaagaggctctttagttcctcttaactttctgccattagaggggtatcatctgcatatctgaggttgttgatatttctcctggcaatcttgattccagcttgggattcatccagcccagcattttgcatgatgtactctgatagaagttaaataagcagagtgacaatgtatagccttgtcatactcctttcccaattttgatacagtcagttgttccatatctggttttaactgttgcttcttgaaggttacttcaatatccttatttcatagaggaagaaagtgaattttagactttctgaaagtcaaacagctaatcattggatgaaatatactgaaagacaaatggatcccttattctaaagcaggtgtcaacaaaaccaagcctttgtgccgagtctggccggctgcctatatttgtaaataaagttttactggatcagaagcctgctcattcatgtacaagttttccatggctgattttcctatatgacagagctgagtagttgtaacagactatatggccccaaagtaaagaatatttgccatctggcactttgcagaagagattttaaagggttgtcaacttataatatgagtatattacaagttctagtgatcattatcataacagaacataaaattaaaataagctttaataaaaattaatttgagctgtgtgcttgggaatatagttttctgaaacaagtattcagggagagaagtaagttgaatggaaggaagatactaggttttagaatggagattgtgaggcaaaacaatctgtaggggaaaagagacagaagagtattctatcatggggtttatctaaggttgagaaataagcatgtgacctctgag

SEQ ID NO: 35537 - DNA, 1283 bp, Bovine  19866880392828
  misc_feature (1)..(1): n is a, c, g, or t
ncgaaataacatggtaactgtattttaaatgaaagaatcaatagctcaatgagattgagcttcttggagacggtgattctcagttaactggcccaggaccctttggagtttctgggagatctcaaagaacaatgggagaaaattcactggtctcacagccttcttcacatgccctgtgggggcctctctgtgccaggcctcttgtgtggcatgctttgagaacacggacatgaactggatgccatcccttcctttcagccctcccagactagtgagggatacagggaaataaatagatgaaaacacattggggaaagtaaaccaatagcagtagcttcaggaaccatttaaaggatgctgaactctgtggggagtttgacaaagactttctgaaggatattgggttttgaaagatgacatagagcctgccggagaagtcaatggcaccccacgccagtactcttgcctggagaattccatggacggaggagcctggtgggctgcagtccatggggtctctaagagtcggacaagactgaagcgacttagcagcagcagcatagagcctgccagaaggataaggtgtcaggaagggcattgcagctagagggagcaccttgatggagaaacaggagcagtcaggtatgctggaggaactagaggcagttctgggtggcttgagcaggcgctgtgtggtgtgggtcatggaaggccttacagggcctcggcggccagaacacatccttggggcttgactccaagggcactgggaagccttcagagggttttgaggagaaactactcaggctcatcttggtattttacaaacaccacttgggcagttgtgcagtggaatgcctggaggctagaagtgaggctgacgggaggctagatgaagaaaatgaccccagggaagagggaaaagggttttcttgaaatctgtcagagacatgagtgtcagccctagatcttctgactccagtgccgtgaatttctcgtgattcttaacccattttacagaagaggcagctaagacccagaaaaggaaagtcattgtatctacgtgatagaaatgagagtagagcctggtggttcccccatgccccgtctgtccgcatctcctcatgtgggtgagctggacataaggggctctgttggactgtgcctccaggtggactgaagaatgcatgtggccacagggagtgctggtgaaacacagcaagaacgtctacaaagcagtgggccactacaatgggccattccctctgacgtctcccacttcc

SEQ ID NO: 35538 - DNA, 1812 bp, Bovine  19866880436445
  misc_feature (1)..(1): n is a, c, g, or t
ntatcccccattttgcagatgagaaaaccattgtttagagagatttgtgcattccatctctctcagggcttccttggtggtttagtaaagaatctgcctgcagtgtgggagacctgggtttgatttttgggtcagaaagatcccctggagaagggaatggctaccacagcagtattcttgcctggagaatcccagagacagaagaacctggtaggctacagtccatgggactgcagagtgggacagggctgcgtgactaaccctttcactttctggtctctcagtaaagagccacagttccacatggagccctcatctgagtgcacaaacccaaaccagttgacacagatgacagccagcgacagtgcaagagtggcaacgtgtgccagggctgtgggagcccagcgagtgctgagggctgaggtggggagttcaggggcagcttcatggagggggccactggggttatatctggaaggctaaaggggaagttgtcaatgggagccagcagaagttccaggcagaagaaatggcacgtgcaaaggcacagaggtgagggagatgggtcaggagaggtaggcaacaatcacatcaccaaaggcctcgcattctaggctaattccagggtggatggaaggcgtcttagtagggagagcagtggcctggccagatctgcattttggaaagatgacactagagctaggtagtgactggaggcagaaagaacaaggaagacaatgagatcaaagacaggacaggggacatccctggaggtccagtggttaagacttcacctttcaatgcagggggtgcaggtctgatccccagtcagggagttgagatcccacatgcctaggggccaaaaactaaaacataaaacagaagcaatgctgtaacaaaaattcaataaagacttaaaaaaaaaaagaaagacacaacagttattagatactagcccagatgaaagggcaatcgggactacagataaggaaacccaagtcagacagggcccggcaacctgtctgaggagacacagtgcatcactgcctggggagtggggactcaggggcagagaggagcagagccctccacacaggaaagctctgcccctgaccatggaggtggtgagtctcaaagccctccaggagcctctgctgcagctctgctcttggcgcagaatcaatcaggtgaatattaaccctcctcctcaaaccagatacaaagcaagaaactaagaacggcaaggggggtgggcgggggggatgcacattgtatctcagctggagagatcctagtggagccagtggagcacagcgctgggaaggaggaaggcaggaacaaaggaaaggcacccagagggttttaggtgatgcttcagagaaagcctagcccaggaatgtggggtagggtctgctggcacaaggtcagagacagggggctttgtttgtgtgagcctttaaacccccttctgggaagagctcagacggtaaggaatcgcctgcaatgcaggagacctgggttcaatccctgggttgggaagattccctggaggagggcatggcaacccactccagtattcctgcctggagaatcccatggacagagcagccttggcgggctacagtccatggggttgcagagtcagacacgactgagtgactaagcacaactgggaaaagggctcccttttctagagacctacgccccctccccctcccttgaggttctcaagggggctgccaatcacagtgccccaccccctgcctggggccaatcagagtccttccttgggggggttttttctgattggaa

SEQ ID NO: 35539 - DNA, 2277 bp, Bovine  19866880444795
  misc_feature (1)..(1): n is a, c, g, or t
naattgcccagggaaaggaatataataagagcactgaggaaagacccttggggaataccaacatttaaaaaatgcctagacagaatagcttgcagatgtatctgacggctatgcctgatgaaaagggtagggaagtatactgtcagagcaagtttaaaaaaaacaaagactaaaaggatctactagatttagtaccagggagatcactggtgaccttgaagagaacagtgttaataaaacaacggaggcagagccagactgatgagcagtggtcaggagacatggaatcgagaaatgaaagggagataaggcattaaagacagtgagtgtagaaaatattcaggggatttctcacaggtaataagagcaagactctgggcccaaaccctgggttttgaatcattggtaaaatggtattgtgtgtgtgctcagttgctcagtcctatccgactctttccgaccctgggaagcccattaacagcacttatttcataggtccgttgtgaagcttaaaagaattataacgtaaagctctaagaacaacaggtggcacagtggtaagcaattcacctgctgatgtaggagatgcatgagatgcgggtttgatctcaggaagatcccctggagtaggaaatggcaacccactccagcattcttgcctggaaaattccaaggacgaggagcctggcagggtccgcaaaagagttggacccgacttacggacaaacacgcacagcatacattgagaacagtgcctaacacgcttaagtgttagaggatgatgataacagtattatgattgtaaccactatcaccatctttaaagaagtttggctgtaaaggggaagactgaaagggcaataacaagacaatgtggaactgaaggcagactctttccccaataagagaagacctgagcatgatgaaatgctaataagaagcaatacagttggttaaaaggataggatttgggaaaactgacagcataaggtcccagagacaggaaagaaaggttgaaatctttccatttaagggactacctgtagataaaatgacattccatccatagtaacagcaaaggaggcaaggagagatgggagtacagtacgatttctaggtagaaacaacataagaagttgagtatttacccaataattactactctcatgataaagcataaggtaagtcaaagtctttgaaatacctaaggaagccaataagtaaaagcagagacaaacggagtcgctgccccctccccccacacatttcatacttactggcacctgctatgtccagaaactctactctactgctctactgcattcggctcattaatgcccaagacaactctacgcgatagatattgttaatccccactacacacataaaacagaagttgaaagaagttaaagaactagcgtgaagtcacaaaaaattagagaacagtagaactgagattagacctcaagtcaattacttgaaagcttgagctatattatactatcaagaagtctattgcctcttttcgtcaacatcactaccttctcacattcttagctacggatcccccaaaacttactttctatagtttcaaaaacaaaaacacactgaaagattagggtacagaatcacaaactgatttattgctatctcaatgaaggcaatgcaggttaaaaaaaaaaagtttcaaatgctgttactcagggaatacacccttcatttttcagagttcccacacagggacttctcacttcatataaactgcctggtccctgatggacagggaccatataagttgtaatgcaaccctgacacagaagtcaataaagacaagacagaaagaaaacaagttctagtttatctttcacttaggtggtataaagtgcaaagttaagaagttggaaagacttacctctgtaaatggagacaggtgaaaagtaaatataacataaacatctaaaataccttgatatcattgtctattccaccagaaataatctgatcacttgtatcattggaaagtcacagctaaaacttggtaggtgttctgaaatgtctggatggctgctttcttgcggatatcccaaagctgaaaaagaggacaagacagtctacagtaacatcactctaagaaacaactgcacagtacacccataaatctaaggactgtgggaagtgaaaacatcagtaaagggaccctgttcagaaatttgtctgattatcccatcaacatggtgagaactgactataattttgccaatatatctgaatgctggt

SEQ ID NO: 35540 - DNA, 1455 bp, Bovine  19866880455132
  misc_feature (1)..(1): n is a, c, g, or t
nagcagggggaatgagagggagaaggtagaccagaagggctgggaggcccactgtggctggggcaggggtaccgagccctctgagtgctctttgggtaaaggttcacggtgtgggggtggagagcgataagcacctactgcaggggtcaagtgctcccagtcaacatctggaatgagttgggaggtcatttctcctggctgagtcactcttcatgtgacctgatggaaaaaaccccaattccctgccttatttagtggcccctcctgtactgatgctcccaaggaggaaacactgatgtaaaccagtctcactgctatggtaacagcaaccacttctgacttgccatcctgatgagaggccaggtgggaagtctgcctagcaactgtggtgggtgttagaagtccctctccggggcttcagaatcccccttccagcactgtccagaccttggctcaggtcccggcttctccttccagtggggaatcacagccagctgccaacatctgggcagctcttcacagctcagaagaatggtgcaatggatgccaccaccctggaatgggattgttagcccccctggacagatgaagacactgaggctcggagaggtaaaggggggctctggcatccttccttctgtgctgccttcactctcccatatggtaaaggtctgctcatctgtgcaagtctcctgctctgattcatctgtggcacctaggaaagaatggagtgtcactcccccttcctgtcaccctcttcctttcttggtgatctatcggttccaggggacctgcccccagtgttctattctggcccaacagaaggctagaggaagggatcatgtgaggtctgtgagagccagggtggtaaaaaaggattgtgagagaccctgcacaggagggcagtacccctcctgcccctctgggtgacacagctgaagtatttccctttgaaatgcctggctttgaacttcaatactatactaacatcgatgactggtactttgtgtgcacttaaccttgtgccaggggcttccctggaggctcagtggtcaagagtccacctgccaagcaggagacatgagttcgatccctgggtgggaagattccctggagaaggaaatagcaccccaccccagcattcttgcttgggaaatcccatggacagagaagcctggcgggctatagtccatggggttgcagagtcagacacgactgagattaaacagcagctctgctccaggttttgcggcaagtgctttgtgcgcactctctcgtttaaatgagggacggggttttgaggcaagtgctttgtacgcactctctcatttaaatgagggacgggctatcatccttgttctatggagggggagcgtggcctgagatctcagagctggagagggcacgagcagtggcaaacccaggtgggttctggagccagagcctggctcttaa

SEQ ID NO: 35541 - DNA, 1691 bp, Bovine  19866880458551
  misc_feature (1)..(1): n is a, c, g, or t
naaatctcagggatggaggagcctggtaggctacagtcccatgggggtcacaaagagtcagtcagacacaactgagcgacttcacttcacagacggggcacggaatctgaatgtatgcagcaatggacttgtcagcccctggtatgggtgttatcagaaggagccaagggtgacttgtgggcttctgtcttaacatgcccagatggatgaccatgccattgaattcggaggccaggaagaggatcagctgtgggggagacaattacgactttcaccttgagcctgttaacactgtaataccttggaaatagtcaagggggaatttcaagtaggaagtaggtggttagaaatacaggactggaattcaggaaaagggcggcattagagtcactgacatggcaggaagcatactggaacaggctgcagggtgagggggaggtgaagaaattaaggcaggatagacaatttctgaaatggagatatgaaaagaaggaaagaaagctcaggggccactgttgattctgaaggtgaagttacctggagaggatgatggaatgtttccaaggatggagaggccgtccttaccccctccccaagatcctacataatgatagaccaaaaataaccagtcttactgtcctgggaggcagggtcctgagccctggtaatggatgtcatcacagagattgattctgctcatttgctgggcggcaggccagacacagttcctgaaggagggtgggggaggagaggggtgggcattcaacgaaaccttggctctaaggtcttctgggaagagggaactctggactctacagagtagggagctcccaggcacaagatggacagacaaacccactgccttgggctctctgcggcccttgtcctgttccttctgaccaggcaggaacaggggtgagctcactccacaagcctcagctgcccactgaccctgctccaggctggtatgtcccaatccctggtggtggcacagcacagcaccagccatcaatccaggcatccccagggtcaaccgagaaagtcaatatttaatttgggcaccatgttaatgccatcgattgctgactcccctcctccacttcctcagactcatttgtcacttccccacccatggggggcggggtggggtgatgcagtactggaacccaggggcggtggagctcagccagggtcagcttgggaaaactggctgcatgtgggggtgctacccttagccacccagcctcccattctccctgaaaaccactgatctgctttgtttgagtttcctgagctcttgtctccagcaaggagcaggtggggaggtatacattcctcccaggcagggactgagcctgactccctgcagggtccgtatatagagcaggtgtggttgcaggctgagcattgaagggaaggatataaaccatgaaggacccaccgtgggacaaaagtgaggcccaatcctgagacccagaacccgagggccgtgttggctcaggcttctggagcccctcccaggtgcccaccactgtgcccgtgtgatgctgtggaacccacacagggactttatatggactccttctctgggccctggaggtgggcttcggggagagttgagcttagagacctagagcccctctgagcagtgaaagaggctgaggggagggcagagcccatctcaaaactag

SEQ ID NO: 35542 - DNA, 995 bp, Bovine  19866880491518
  misc_feature (1)..(1): n is a, c, g, or t
ntcccattaaagtggaactagaattcccttttcacacatgaggaaacagtttaaaaaatattccagggccactcaactaggaagtgggcagagataggatttgaacacaagactcactgacaccaaaagataatgatgcccttcccatcccaacctctcagagtcaacttaccagtctggggccgcttcctgggctggattcttctgtttggtcctggttggagctgtctggccatctgttagtgccctgatcctgggcaccaggcactgggtccattttcaactgtttagcacacttggaatttctctgcctcatggatgggcctgagctagccttgctggctacaggctccaggaagctggagggggtgtcaccaagtccctgccctggcctccccccagacactggtcgagccacgacctccagctcctcctggttgtgtgaagcaccatggccatcaccatcaccaggcctcatgatgtgctcagcttcttgctgtgctgtggaagcctttccagaccctcccaggcacagctcagggctctggagaggatcctgggcagctagctgaagtgacggtcctccagtgggcacagggaagctcacagggtcacaggggctgcctgggcggggtcccaccccttacagtgggcaaatattcaaacttctcaatccctgagtcacagtccacccaacctccacctgggtgtccaggcccagacccagtgtccttgcaagagagaggactgcacgggcctcccaaggacgccacgtcagcaccttgcagggagtctcccacagccttgggcttgtccccactctgaccaagccataagaagctaccttcctgaccctctgagggggtctcagacttcctgcttttctttcttgcccccacacacccactacaaagattcctgggacaacttccagctaagacatcgtgcagaataatctggaccctcttgaggccctgagccctcccctgggcagg

SEQ ID NO: 35543 - DNA, 1549 bp, Bovine  19866880531795
  misc_feature (1)..(1): n is a, c, g, or t
ngcatggccccaaagcagtcagaggggttacagtgcccggtcttgcccggcgggcctatggggcctgggggaccggggatgccaggaatgccttgctggcccatcggcccagtcgcacccatcttgccgtaccctggaggaccctggggacctaaggcaggaaggagtcagagaagggggatcaggaaacccaggtcataagaaaagaagaaataacagtcatggtaaataatagcaataccttacatctgatgactatttctccagctacaccatattttcatgaagacttgatctgatcctgacattgacagaacagtgacaataataccactggctaattttattcagtttccacctgccaagcagaagccaagtgctttctctgcattattcattgaatcgtcacaacgactccatgagaaagaaactattatctcattttggagatgaggacacaggctcagagaggtcacacacctgccatgtggtgaagctacatctcagaaccaggctatcaaacttcagtcatttctctcttaggcttgtccaggtaatatagccagtaagatgatgagcgggacctaagcttgcattccctggccccaccacatccgactctcttccactctgtcacgctcggccacgttaggacttgagaacaggcacgggatgtcccacctaaccctcaacactcctgccccaccaacgcacacacacgtacacacccatgccctagtagagtctcttatactcagtgtcattactataaatgctggttgataggcctatggttatttgggacactacacaactatgctatggaaagaacaccaagaaaggagctctcagccgttccagattcacagtctccaagactgacttttcctacctggggggccaggaagaccaatttctcctgcgatgccaacacccgatgtctcccttttcacctttggtaccaggcaaccctgaaacaaaagaaataagataagacgtcccatcctggagtagaaaaatgatctacctggtcagattatttgaaacacacatatacacgcaaacacttgattcacaacagacctcgtgcaatgcttctgtgtgcccccaagaaccaggcatgtacccagagggcagacctacctctcatcccgggcaagccctgccgtccttctctgccaatctgaccggggagtcccggtgatcccggggagcctggccggcctgggggaccatccttccctgggggccctggtcgccctggagctgctgccatctccatgggaaactgcatcctggaggtgtagtaagccatcctctctgtaagaaaggacagggacaggtcacagggcaccctgggcactcagaacgacaggctgccagcatagagtccaagacagccattcttcagagggacgtcagagcaaggaacacacaggtggatctcttaaatggtcgcctgtgccctctcccccacatcgctccccacagtgatcttcctgaagcccagatctgattccagcatctcttttctccagcagccttcatt

SEQ ID NO: 35544 - DNA, 1497 bp, Bovine  19866880700653
  misc_feature (1)..(1): n is a, c, g, or t
nctttctcccagtcttaaatctcttgcgagggaccagaatcactctgtccttcacacctccaagggcaagactagagtcagcagctgtgtgattctggcaaatcactcattctcttggagcctcactggagggttgggattctggatcaccacagctcttccaaaccatataatgccatgtaaactatgtccattgagagaaaactgcagtgatcatttggtccatccccctgtgcccatcacccagccgagacagatgctaaactctccagatcccaaggaagcaggctctggcttcttgggccactcaccccaagagttctcttatctgatctcattggggctcagttttcaaatgtgcaatatgggaataatcccctgatcaagcccctggtgccccctagtatctcccaaccatccttgcccatctctctcaccatcctcccatccatggggactcagatgcactctggctttgagcctcctgtccccttgccttcgctctctgcactggcctccacttcctgcttctgacccatttacagagcaggactgaagctatcccttatgaatattcacgtaggtaatgagggcttgggattgggagagcatctggggagaggcattaatgagacaccatccacctactgtccccacacacagccccctgtcaaagctgccctccctcccaaagggtgctcgggagtttgaggcaaaggttgaagtaactgcaataataatatccacagcaactattttcaagtgcttacaacataccaggcaccctactaagagcatctcctgtaagacgcttttcagatgggaactattttcccatttaacagataaggaaatcgatgctccaagaagtaacactcacataagtcatatgtgaaacctgcacagtgattacgtgcagagcaaggatggaacccaggttttgttagactccagaactggtactgttaactcgtgccccccgtatgcacggggccacacctggacctccccatcccagcaaatgtgctcacagtggtcttcagtgaccaaggctttaggaaagggctcaggtgctggaagtgactccatctggataatgggaagacacgcagacaggcgtgagactgtgtgattcacacacacacacacacacggtgcactgtgagtctagagtgcgttgatacaggtagagtgtgttgtatgtacctggcagtgagtgtgtgtgacacagatgcccctgaggttgcccagagacgcactgttctgccactgttccttttccagttgaccagggggcctgctgggtgccaggtcagggcacgtggtgtgaaaaggtcaacaccgtccgtgccctcctagagcgacagtgtggtggctttgtacccaaatgtggcaacaccgcagaaggagcctttgtgggaggtcttcttcatttgggaggtcttttttgtgggatgcggctgaaggtaagggacaagactgtgggagagcagaaaa

SEQ ID NO: 35545 - DNA, 769 bp, Bovine  19866880722515
  misc_feature (1)..(1): n is a, c, g, or t
nagagaaacttggagagcacccagtgtgtctcctggggttgagcagacaacagacaaacttgcagatcaagagcacacgacctcaggcagttctgggtctgctccctgacagtgatgacctagatctaagacctcctggacagtccccagggaagacatggtatccttgttggcgagtatgtaaactttcataagggaaaataggtgcacaaatttttggcttcatttaggtttcaaaagagttagatgggggactttgcaggctccttgcccacaaatccctcccattctgtggccacaggagagggaatttaaggagccctatttcaggagttgggacacagcacaatttagaggaaagaggatggactgtaatatatcaggcagagctccattcagtgttgaaagtcacttgctggatgatatagacaagtgatttaacctttgtgaattgcagtttcctcacctataaaacagagattataactgtattactttctaggattcttgtgaagattaaataataacttgtaaagagtttagcatagaatctggtgtagaaaataataagttataccattattattacatttgccacaggcttgcttataataacaaaaacaaatgggaacaacttaatgtcgatcaatggggaattggttaaataaagatgttacatccatggcttccctggtgggctcagtggtaaagaatccacctgccaacgcaggagacagcagttctatccctggtagggaaagataccaca

SEQ ID NO: 35546 - DNA, 1355 bp, Bovine  19866880764313
  misc_feature (1)..(1): n is a, c, g, or t
ncctggtggaagagaaaggaggagatttgtcttgagcacctaccctgttgccggtgatgatctggtgatggatatttgtaagggtgatatcatcacaggaaagctagtacttactgagtctttgctaaggggcaggcactggagtaagtttttctcctgtgttacatcattctgtctctgcatgtgataggtactgtttcttattccccacccttagatgaaggatctcttattattacccttttacagatgagcaaactgaggcttagtctaggaaacttgcccaagggccacatggcaaaaggggagccgagatagtagcctgagcgggtagattatacggagaggaggaagggagcacccccagctgggatggggggacgtggggagcagtgtggaggctgcgacctgggaactgccccctcagccccacctgggggagatgggatgattttattacttttaacaaataacacttactctgagtgtttattatgtaccaagcagtatgccaagtcctttgcatgatcacctcctttaatccttactagaacctacaaggtaagtattatccctattttagagatggtaagacagaggattagcaaagttaataaactacttgcagaggggctgtcttaactccagagcaggccctcatagcctcagctgagctgcctctgatgtctgtcggcttgaagcaggggggctcaggcttccgtctgtaatacagacaagtcagagatgagcatgtacagactggtgtcactctgggccccttcgggcccttagctaaacacagtagagacattgagagcaagcgatgggggccttccagctcaggggagcacccagagctcctgctgtgctcctgccatctcgggcgtctgtcccgttttcgccttggtgccggtcccctcgaggcccctgaactgctgtgctctgtggggctgatggatggcagtgctcacggcaggtttttgtctgctctgtgtgcccctcctctccagctctgtcccagatgggctacaacctgagcccccagttcacccagctcctggtctcccgctactgcccgcgctccgccaatcccgccatgcagctggatcgcttcatccaggtctgcacccagctgcaggtgctgaccgaggccttccgggagaaggacacagctgtgcagggcagcgttcggctcagcttcgaggacttcgtcaccatgacagcctctcggatgctatgaccagcccatctgcagagtggggagcgcgccaggcgacaacgtttcctggctcctggggtgggagaagcatgtgggcctctcttcctttcctgccccttctagaaaaagaattctc

SEQ ID NO: 35547 - DNA, 1891 bp, Bovine  19866880777703
  misc_feature (1)..(1): n is a, c, g, or t
ntaagatcatggcatcttgtcccatcacttcatgggaaatagaaggcgaaacagtggaagcagtgtcacactatctttttggggctccaaaatcactgcagatggtgattgcagccatgaaattaaaagatggttactccttggaaggaaagttatgatcaacttagatagcgtattcaaaagcagagacattactttgccaacaaaggtctgtctagtcaaggctatggtttttccagtagtcatgtatggatgtgagagttggactgtgaagaaagctgaacgccgaaagaattgatgcttttgaactgtggtgctggagaagactcttgagagtcccttggactgcaaggagatccaaccagtccatcctaaaggagatcagtcctgggtgttcattggaaggactgatactgaagctgaaactccaatactttggccacctcatgggaagtgttgactcattggagaagtccctgatgctgggagggatcaggggcaggaggagaaggggatgacagaggatgagatggctggatcacatcactgactctatcgatgtgagtttgagtgaactctgggagttggtgatggacagggaggcctggcgtgctgcgattcatggggttgcaaagagtcggacatgactgagcgacttaactgaattgactgtactgatggctttttctcctctgttaaagaacagttgactatatctgtggaaagctatttctaggctctcagttgaatccttttatgtattttcttttgtcaacattacacaagattactgttgtaagtcttaaagctgtgtagtatcaatcctccaacttttttcttctcttttagtattgtattggctattctagttcttctacctctctatgtaaactttagaatcagtttgtctgccgatatctattaagtaatgtgctaggattttgattgggattgcactgagtctgtagatcaagctgggaagaattgacatcttgataatgctgttttcctattaatgaatacagaatatctctccatttattcagttctttgatttaatcagacttttgtagttttccttatgtagatcttgtatatattttgttagatttacaaacatttaatcttggagggtgataagtaaataatcaggtatttgaagaaaatgggcaccactttcaaaagaatcttctgagatggtcttgatcacctgatggaagcataatagcagctggctcagtcaacatgtttatgtttgtgcaggatttcagaaacaggaatattttgtgagagctgcccaaccatgctgggtccatcagtccatgatgagtccatcattcactcatcatccagtaacaagaaacttatatgggggagattcagtgaagatatggaatggaagacttgagggctccttgaccttgatatctcagattgcctaagtgacatcaaatggtgcccaggccagcatcctcccttcatatgaagatcattactgacaagaaacaatacggccatcttccaatgaccacatgtattccatttcaccagaatgattaaggcaagcttccagggctctctaaaaaccagctgccacatttcaaagactattttattttcctcttttctgttctttaaataagatttcttcaaaagagcaggttttgctttgtctgtagtttactgttttctagtccaagctgaagacagggactgtggttaaaatttgttgggggattttttcaataactggctttctgtgcttctttgagttattttgtcttaaaaaccaaatagatgcctttcttgccttgtaggcatttttagtttcaaattttaccattcattgagaattcttggagttgtccacactcagcctgcagcaatttgt

SEQ ID NO: 35548 - DNA, 1637 bp, Bovine  19866880782483
  misc_feature (1)..(1): n is a, c, g, or t
nttgtgtccaactccgtgcgaccccatagatggcagcccaccaggctcccttgtccctgggattctccaggcaagaacactggagtgggttgccatttccttcatccaatgcgtgaaagtgaaaagtgaaagtgaagtcactcagtcgtgtccgaccctcatcgatcccttggactgcagccttccaggctcctccgtccatgggattttccaggcaggagtactggagtggggtgccattgccttctgcctattcagtgcctacaatacatcaaattctatacaaatatgaccccatttatactcaaacattactgggtgaaacagctggtactatccctattttacaactgaagaaacaaactcagagaagttaaatctctaagtcagaaagctgttgaagtagtacccaaataaggattaaaacccaggctttctctaacttcaaacctcatgcttttattattgcctctcaataggcagagaggggcacactttaagtgaaaaaagagctacttttgtaaagttttgggaaattcagcttataccccccgacactgtcatccacctaaatgcaacaaaagggctctatcgacacctcagatgttcagctgcctgatctttttctttttcaatttctctccttagcctcacttcttgtggagagctaacaagcaggctgtaaagggaaggaaaaaaaaaaaataataaggtgaagcttcctagaaatgccttacccgcaggcaaaagtacttctagacaatctttgtgaaattgactcctttaaaagatcttttcttgggtctctggagacctttgggatgtcccaagagtcaaagaaagaaaaagtatcctgtaaacaacacagagaggtgacctgtttggttcagagtcagatgctgacaataatcattatcttacccttttgggtttccctttgtctttataatgaggattatcctcacttaacaggtgcagaaatcctgtccaacatcacaaaattaatgacagaggaggtatttaaacccaggttattctgtatgtcagttagcaaattcaatcagtgttgtggcatttcttctactataacttaacctttccttttttggtaggccttatcacaaccgtattgtaagtgccaaaggatgagaactgcttcttaaatgtatgtctgagaggaaaacctgagttttgaagctaaacagaactgggtgtgagtcccaactctgctacatgcttgctgtgtgatcttggggcaagttgttaaacctcagtcttgcttcttacttttaaaaaggaagattttttttttttaaacagaaaaaagatttcatgaacagaaaaatattaatactagagaagttagaaaaaattatatacagattttattaactggcctggcttaactaaaaatgactatcatgtacaatccattaactgaacatttaataaatgctacataaggagcaagacagtcatgatttactgactaaggcatccagagatagtgtttctagaagggcaagattcacaggtatctgctccaaaaggtcaggtgtcacgcccttctccagaatatcaatgtattcacttcaaacatctaacaacagcactcctgcccctgctatcaaccattt

SEQ ID NO: 35549 - DNA, 703 bp, Bovine  19866880830435
  misc_feature (1)..(1): n is a, c, g, or t
ntggaagtatggcctgtggccagaggacgggcaggcagttgatcagggccccccatggttgttggggccctaattactcctggaggcctacagcctgtcctggccaatctgcaacttctcagaaacccctcactccctcctcgaacccctcatccaatgttttagctgatcactcgctcactcctggtttcctctgaaccaggcaacaccagacctcgtcctgggtccttcctgctttatgctttgggttacaaggagtcctttgcccatgcgtgaagtgaggctggcatctcatttgcccctatgcctagcacggggccaagcacagagagggtgccaatgatttaagaatgatgagtgtgtcaatcaatgaacggcggtgtgtgtagctgagggggctggttaatgtgcgaagaagtccctgaagagcagggcaggagcacctggatgaggcgacagctgtgtcccgagaccagctgggccctgacccggaaccgcttgatgcagaacatgtccaaagacccctcccagggcagctgggtgggcagggccctttgtgggcccagcaggcatctggagcctaggagggagagagagacagggccaggcagaacaggtcatcagggcttccccagcagctccttagttttcagagaaggtcttgtgactccagtggggtgctggaacactggtccaagtaagg

SEQ ID NO: 35550 - DNA, 1134 bp, Bovine  19866880840977
  misc_feature (1)..(1): n is a, c, g, or t
nactctgtgagaaacaggtactatcattctccacttacagacgggtgactgctgctcagagaagataaggagcttgccaaggccacataatgagtggaaaagcaaggtccgattgatcggcccctgctctccctgaccagtgaaccagggtatggatggatgggcagaagccggggggtgggaggataaggcactggtcagtgcagaggatggagacctggtcctgggtataaccctgaatcagccactgacttgctgtgtggcctttgcaaaatcctgccctctctgggccttagtctcaccattagtaaaatgagcgctctgagctcagatctctgagatggtcccagcacagagtcgccctgtgtctgaaagcattttctgtgggtgatatccacaaggacagagcagacactgagagctgcagtggcttaaaggaaaagcgctaccttgaagccagagagacccaggctcaaatccggctctccactggcttgccatgtgggcaaatgacctcacaggacaaaatgcggttagtgatagacacacaagccctcagaacacagcacagccccgggaggtgggacatgcgagggcagcccttcagggtgtgccaggtgtcagaggagggggagtaaggccttaccgactccacaacgcctcctgcatggtgcggaccacggtgccccgtatcccaatatccaggggtggcttctcctgttggggctgaagctgagctgtggggagagagtgtcatgggctcccaggggatgctcaggggcaagggtgtggggcaactcaaggctgaggggcttcaggaggtaaggaaggggtcccacctcagggacccaaggtgtctaggatgtctgtctgctgagcccaggcagccagcagccccacccctttggggaaggactgcaggcagatggtggggggaggaaaaaggagtcccagcaggggtcaggccaggagctgggcatgagcccgtgtgtccccagaaattcctggaagacaggcggctgctgaggggcaccctccacagcccctcacctaagtcctcgccccctgcttgttcaccaggttcctcctcttcagcctccactgggcttgcgctgtgggggaaggggtgaagga

SEQ ID NO: 35551 - DNA, 1419 bp, Bovine  19866880914656
  misc_feature (1)..(1): n is a, c, g, or t
ntcagctcctgccagcaggtatccacacctagctgggaacctggagggtgctttggaccaaaggcaggaggctaccatggggccaaggctagaggaaggcctagggttcagtggggcctaggactttgagtgaggtctagaacccggtcccacaccccctggacccctctgcagcctctgggagctgcaatggacatctctgagaagcacctgtgtccccagccaggaaaaaggtccaagaggctgcgggaggttccggacggatcccctgtggccatcgcaggctcagccctccttccttacctgggcctgccaggatctacagcagacccatccacgtccctcctcccagggactcacctgggtggtggcaggatgaggcccagggtgcggtagagcacagcaccaatcacaaagtaggaggaggaatcctcggggtctgccggcaggaggcgctggtgggagtggccggggccagggggcacggttccggggcctctccctctgcccaggctgcccgctgccccagatgcggccggcttccctggggaggagaggctgagcacctccttgggtaggaagaggcggtcctctgagtaccgcacccagtccttcatgccccggcggccccgcatggggaacgtgatgtcgctggaaacagcggagacaggctctcgctgaatgctgatcactgccatggaccgagagagataagagacggagagaaccatcatggggaagagacagacgtgggggagacagagcaggaaggcagatgggagacgtcaaggttggtacagacacagaggtggggcggacacatagagaaacaacaaagaaatgggggaatgggaagaaaatatggagacaaaaaattaaggagttaaatgagggaagacaggaccggagaacaggagagtaaaacaggaagagccctcggaaaccatcccctcccctatggcatcctgcatttggccccgtccagcagcccctccccggcctgcctctttgtacccaggttatctgtgacaatcagagagctctggaaggccttgagagcatcgcccaccaggtgaatgaagtcttccaccacccggagcaggtgcacagagcctggggacacctggggacagaaagggtgtaaggggccgaggtgggagtgagccacgggggaagaagcctggtagcccagcccctcacctgctgagcgtcatcccacttgtccttgttctctgcatctaccatgaagctcaccacctggaagaagcgctggggagacagcagtgggggtcaggaggtcaccaccccagggacagtagcttccccgccacagccacacctgccacaccccctgcagactcagctacaggggcttggcctcccccacttccaaaagagggcttctaaccttcagccccc

SEQ ID NO: 35552 - DNA, 1357 bp, Bovine  19866880921830
  misc_feature (1)..(1): n is a, c, g, or t
ntgaggtatcatggcacctaagatggagacacaggtagtggagacagagaaacacagagaggcaatatttatgaagtaaacaacaaaaaggttcaggcatggatttcatagggtgggcatagagcagtgaggcaatagatagaagttaaagatgactctcagattcctggctgtgtggtgagtttggggatgctagtccctaagacagggaacttgggaggagaagcaggctggtggtgaaagcaacggggagaaagagagtttagcaagacacgtttattaaatgcctgttttgttccagcctctgtctatatataaagacagaaatagttcctgcacacaagggggacaggcataaaaaattattataatccaaatattacacaggcctcataaccctgtgaactcaaacaaagccatacaaacactaatcattccaagttcctgttgttccccctacaaagttcccttcaagtatcttggggacacttctagggacttttcataagcgactgtcagactaagtgttggggccaagtcattgggcacatcagccccacactgaccccctttgtccctgcccactgaccccaggaagggtgccttctgtaggaatgctaagagcacccctggactagagtgaggcaaacaagcagcctggccctggaagtggattcctccttaagtgttgctggcacatgatgctctcaagtgctggagcaagcctgggtctaattgaaggagttagtttctcaagtcatctgagccctgaagcagcactgctagtgctgcaagtgtgagttctactggggacatggtgagtttgatgggtctctgggacatcaatagggggatgtaacaggatgcaattggctatctgcatttggaacacagaagtttgggttagagatctaaattccagatcatggagtatggatattaggcacaggacccaggtctgaactcccaacatttaaaatgccctgcccccacttcacctggcaactttcatccaaatctcaccttccctcatttatgttggcagttggccagtcactccttcctgtgcattccagcagcccttggtatagtcctttgtgattaagcacttttcacactgcctgataactcttgatttacatatttgtcctcttcactctacagtaagctccttgagggcatggactcttattcagtgttggccatcatgccattttcatccaccacaccacagaggcaaagaccaaaactacaggaaggaaaataaaggagatgtagtgcatatatgcaatggaatattattccaccattaaaaagaataaataatgccatttgcagcaacatgtgtagaccggag

SEQ ID NO: 35553 - DNA, 1140 bp, Bovine  19866880939661
  misc_feature (1)..(1): n is a, c, g, or t
ntcatgaagttgaaagttgggactctcaactctgtctcaaatgacagatttggtcatttggttaaaattggagtttcaaggccagaaagccaggactgaagcagccaagtcagagagcgaagatcagagtaacaagattagaggccaggactccggggacagggccaagggtcagaattgaggtcagagataccagaactgtagtcataaactcaggcttgggattatgggattgaggttcagagtcaagactaaagtcaggtgcttcagggtcccagagtcagggaccaggaatgaggtcacagaatcagaatcacaaggttagtggccagagtcaggtcacaatattacaccaggactagggtcagggttgtaactgaagtcagggtcaggtctacagtacaaggtcaagaactgtgtttggggtcttaaggcctgaagctgaagctccaattctttggccacctgatgcgaagagcctactcactggaaaagaccctgatgctgggaaagactgaaggcaaaaggaaaagggggctgcagaggatgagatggtccgactcaacggacgtgaatttgagcaaactctgggagatagtggaggacagaggaggcctggcgtgctgcggtccctgggtttgcagagtcagacttagcaactgaacggcaaccacaacaaggccaagtgtcaaatatatcagagataggactagagctacagggtgagagccagaggtgaagtcaggggtcacaactggatcctaaggtcgaggccaggctcactgggatgatggtgtgttccagacctggtgagacccggaagatgatcagcacatggactgccgtgtgggtgaagatctgcgccagctggacggggctactcctctatctgtggaccctggtagcccccctcctcctgcccaaccgcgacttcagctgaggcagccccatgcagctggtccaacctggtgccttggggctggtgatagcaggctgagcccccacccgcccccagggcttgcccctgagctgggcccctctgttcttagtgccttcagggaggacaagcatcagatccctccctgccactgccccagctctccactcaagctgccgcctccttccccttgcccctacttg

SEQ ID NO: 35554 - DNA, 1769 bp, Bovine  19866880998548
  misc_feature (1)..(1): n is a, c, g, or t
ncaaaagggcacctgaattcacccctgtcaacaccactttgaaatgttttctgagctatatcaggacagttagaacgactataacagctgcaagttccctgaggttgcaaaatagatacttgggaaaaggttatttgaatcacctttcaaaataacctacagcacaggagcagcatgcaaagcaaaaacttccaggctattgttagcattatttaaaatatatgtttcagagcttagcagtttatgggtcagcttaactctttcatttccccattctgtctaacctattgagcatatttaaaggtcctcttcaagtatccaccactagaagcggggaaggaagctctctatgtacaggatatggaataaaaacattccaaattacatcttgtcagcataagttttgtttgagccccagaagcttttctgctgttagggcattttggtccaagtttcccctaagtcagttacacttcacttcctctcctaaacttcttataaatcacattatacttctcagccatctctctgtgcactgagtatagtacaagataaacagacaagaacccaaatcattcaatttggatctgctggtggccttttaaaacatactgtctatccactaattgcccaataatgacttgatgtttattttcataaaatgcaacgttcaaaaatcttcagaaaccatacagtgaaggcagctgtttcacattacatgtaaatgtgaagtaaaaagggtgaaatacctctataatgccaagggattattattctttgctcaccagcttagttcaacatggattcaccttccctctcttctcacttaaagaatgcaaaatttcatctttcatgtcctcttcctccaaatgcttactgaagtgagagagaatacaccagttcggaatgatactaaaacgcagtcatctactcttacaacaaaagcatttgtggggctctgtgtgcataccatattaatcaggatcctagagaatacatgtgggtgaaaaatatttgatggtgggtattacaatttcattattaatgctacatactttgaagacacaaaataagcatgagtagaatggagtgggattaagacttaggaaagataaaacttttatgacaagactggcagaaatagtgacaggccatggtagcacgacttgagaaaggaactaagtcttgggttaaataactctcaggaggccttgaccatgctgagaatttcacaccgattcaaacgcaataaaagctctcagggattttaaaagcagagtaatagtaactctttgctcactgagagaaaacaaatattgccgtattggtgggcatctcctgatctactaagcggctccgtaattaccagcaagcttcacaaaaatagcctctcagcttactaaaatctacctgacagttgaattcttttcttagtaaacagatacaaatttaactaaattctacttgtggatgatctctaaatgaatatctcatctcactagaaaaacagttcagagttaaggctatggcttaaatttgatgtgctcttcatccagaaagatctaaattatttgaatgatttaaaccaattaccaagaggaaacctggtttgtaaccacatgtgtggaatgaagaatgccactagaatctattgtttttccatcatatccttctcaatttgctgacaaatcctgctgatgactcatatccttctgcactaaccaaccagtcactctgttccctcatgataggctttcactgataatgga

SEQ ID NO: 35555 - DNA, 3302 bp, Bovine  19866881108269
  misc_feature (1)..(1): n is a, c, g, or t
nattggcactcagaggttctaagagggagtcctggggagatgcaggggtgaagggagacgctgggctacaggcctggggcccctacctcagggcgtccctcctggcctctgccttgcttgagacactaggcctaaggagccagggaggctaccagtgtggtaaagatgggctgccttggcctggctggggaaagcagtgacttaccggaagacctggcaaacccaggccaggagggcccacgtcgcctttggcccctgcagaaggctggagatgctgggccgctacggcaaagctgcaggacgagcaggactccccctggggaaggaagagaagggatcagaaaggctggcagtgatcagaggggggcagccagaggacggggtccctcaccttctctcctttgaggccttggatgccagggtctccctgcaaggagaagagatttatgggctgagagactgggtacggtagggcaccccaaatttcccagccatctatgaggacagcaatgtcacataccacaaacccttcaaacagccaggagtcccaaggggctcaaggtcagcatcccagacttggggctcatcaacccacgtgacagacagacaggaaagaaggccaggctaacctaccccactggaaactgcctgtacatacccgatcacctttttgtccaacagctcccagactctcctgaaaaaaagcatctgtgagggagtggagcacgcagtccaagccaggaccctaaccacccctgcccactcctttcttccaccctcaaccagcatccaatcccaggaggagggcacagcctcactcactataagggttggctccaccccagcatgcccaaaaggcatcttaagccttggcttaaagaaccctctttggttgctatggagacctggggcagccttctagcccagccctaaactctatggttcagtccccacccccatggaactaagatcctagactctctgctcacgaggtctctatggccatgagaagtttccagcccctctctccaactcctctccatgattatgcccccaggctttttgatggagacccacaggccaccctaggcactcaccctggctggtgcaggatcacctggttctcccttgggtcctggctttccagggagccccacaaagttctggaacccttcaggtagtgttgggcacacttcacaggggtcaccctagcagaagggaaagaccatgagcggacagggtgaggctgaaaccctggggaagacaaggggtgagccagggcaaagtgggcagcaggaacactagcggggtagagggtgctttctgttcacctgaatcattcactcagaatacaatccctggacatcaaaaactacctcctcacaacaagccataagaaatcattgtgtcccatttatgggtgtggaaacttgggcaaaaaagagaagctaactgacttgtcatattcatgtatgtggcggaggtggggatttgaacctggctatgtaactccaaagccaggccctttatttagtagtcaaaggcatgccattggaacaaaggaggggtgggggtcccccaaggaaggtctcaggttcagcacccttgatgcttaccgtcccttcagagataggcttgccctcccaccccacctcggcgtaaccaggcctgggactcaccttctctcccttcagcccgggcacccctggtttgccctgttggagaagcagcaggcgttagccgtggcagagagggccggaggacagaacccccctccctctggaggccttggtagaggaggtctgggcatggtgggcagccgtgctcccactgggtcactcacaggtttcccgccaggaccttcctttccaggcaccccggagttgccctgcggtcagaagaagggttaaggagaagggtgctggccctggcctcagcccatccaccccttcaccctccagtcccctctggatagcaggacaatcttgccaaatctcttgtctcctctcggtcagttttgtcaacactcccttcctgttgcctgtccttctccgtgtctaacccgagtccttctgcttgcacaggaagggggatcacgaggcctctgtgtgtccctgccccagggcatcaggatgggtggtgacctgggtgagcccagaggaaccacagcagacagacatttccaggcctcctgctcttcaaggcacaaggccctcacatgagtttgggccctccagttggaccactgtggtcattaaccagacttaggcctgtgaacccaggccaaggccttcacatcagcaagcactggcatggggacaccgcccactgaggggcccagccccttagccccttccccaacctgcccgctgcctccctcctgctgcccccagccccattttcctctctcctttcaccaagcagggggttcccgccgggggttcccacatgggcccccactcttgtccatgcttaccttgtctcccttggggcctggagggccacctgggtccccctgagggcggaaacagggtgggtcagccaggggcctcccattacagtgaggtccactctggccctttcccccagcctagccccctgggacccagccccacctcccctctggctgagagggagaagggtctctgaggggaaaacaggcaggaggagccaggggtactcaccggggtccccggaagtcctatgccagggggcccagggaggcctgggggcccgggctctcctgccagcccctcaggcccaacaaagccagggtctccctagcacagacataaggtggatgtgagagaaccaccgcctctgagccccccctacccgctcctccccgtcagacagccacagctcaccttctgccctttgggccctatgacacagacttctcctggccggccctgtgggcggggggaggctgtgagaatggctgaggcctggcacctcccaggacagcagccgcactgggacgtggaaatgcccaccctcactgccctgtcccaaagccagactccacccagtgccccaaggccatcagatgtcaactcagggcttggaggtcaggggctcctggactgggagtcatgttgcgctaagtcgcttcaggtgtgtctgactctttgcgaccccatggatcctctgtccatgagattctccaggtaagaatactgcagtgggttgccacaccctcctccagggaatctttcccacccagggatcgaacctgcatctcttacatctcttgcattgacaggtaggttctttacccttagcaccacctgggaagctgg

SEQ ID NO: 35556 - DNA, 760 bp, Bovine  19866881124475
  misc_feature (1)..(1): n is a, c, g, or t
ncaaagttgtggtgaggggtccaggccgagggcatggagctcctaacatggtgcacagcaggagaccaagtactgcaggcaacagctaatacttaaacagctaatgtaccaggcacttactaagctctttatatctgttacattgtttcattctcataacaaccctatgaggtaggtactgtcaccatccccatttcacagatgaggaaactgaggtcactaagctctgcctggcctctaggtctcagtgaaaggcagccatgcccatcacagccactgaggaagtctggcttcaaggggccccaccctacattcccaatctgcttaccctataccccaacaggggaagggatgtgtccagggtcacccagagagtcaggtgtaaagatgaggtcatagcccaggccaccctcccctcccagatggaccccatcacaatgtgttaagaccaagagaagtgaatcacagagacagaggaacaaagctgagggtcccagggctgggccttctcctggggaagcaagcagctcagaagcaaaatccacagagtgaagtttattcccaacaaagttcccctcccccctccccagccagggacagggacagacaggctgggggtgaagatggggctccaggagctgaggggcctctgagaaacagggaagagccccggccccccgggcacaccgtgtctggctcccccagcctggccgagtccactgtgcctccctgcccagccctcgggagaggggagggggcg

SEQ ID NO: 35557 - DNA, 894 bp, Bovine  19866881174386
  misc_feature (1)..(1): n is a, c, g, or t
nacattaataaaccaaggaatagaagtatgagtatattattcatagtcacatgaataaaaaaagaaagaaagttgttcccaagagctgggcaagtgagaagacatttttaggttttaatttctaaactttctgttggggttgggtgttgcatgttcatctacgtgaattatatttgagacaacaataattaaaataagtaattgaggaaaaaatctagatttgattctgatattcctctagaggttcaggtactttcagaaacgccccattgccataggatcaacatgaaactctcacgcaggcattcaaggccctttctcgtcaggcacttcctcccggaagccctcgggtggaagagggcgccctctgccggagcagcgacgccagcacgcccgaggtcccgccctttgcgtatcaacagactccgcccccagccctcgggggctcttggcatcatgtgatctcagcccatttacacctgggtgtcgaaccccgagaaggggagcccagagaccccagaccccaggtgagagcgagtgggtcggtgggttctgggttccctgagcggtgggagactgcctggtcaggctgggaacgtaattgggaatgtctgtcaggcgcggcccgatgtgagcgtgatggacaattaacatgagtgatttagagctgggctttttttcggggaccgaatcccggcgtcttccactttttatctgcgcgtggccttgggcgagccactggatatcagtttcctcgcctgtggctgccagcatgaaatgaaataatgcacagaagtacataattcataaatggtaactgttgcctttaaagctcatacaagcaaatgtgtgaactctcagaagaggggaagactttataaaaggtggctgtag

SEQ ID NO: 35558 - DNA, 1826 bp, Bovine  19866881207733
  misc_feature (1)..(1): n is a, c, g, or t
ntggcctttgcttatccctcttcctggtccagcagttggttcaagggtgaacttgtggcacttccctggtggtccagtggctaagattccacattcccaatgcaggggccctgggttcaattcctggtcagggaactagatcccacattgccataactaagagttcaaatgccacaactgaaaaaaaaaaaatcccacatgccacatcaaagacagtagatcctgtgtaccaaaaccgacacctggcaccaccaaataaatttttttaaaaaattgtttttaaagagtgatcttgtgacccatgcagagccaacaagaatgctggatctttgttgaatccatcgggaaagatatgaacctggctttggacgtgacactgggaggctataagtttggatttgctgggggttgccaggtagagagaatgcctgagtgccatgcaaatccaaaggaatcagagctgaagaacagaaagagactgaaacctgcaaactctgagctcttgcctaaacacttgagcagacacgtctaaagtctgtacctcaagcttcaggtacttgaagcaataatgagacaagaattcacattctctctctctccgccttaagacaaccaaaaaatccttacttggcaaatgcatcagtcagggtcccagctgaaagcagatggcacactcaaattagaatcatttgaagagggtttatttactatggtatagacagtgtaaagtggaaatgagtgttagtcactaagtcgtgtctgactctttgcgaccccatggactataacccaccaatctcctctgtccatggaattttccaagcaagaatactggagtgggtagccattcccttctccagggatcttcctgacccagggattgaacctgggtctcctgctttgcacacagattctttaccatttgagccaccagggaagctcagtgtaagagaacctcaatgggaagcacggtgacctgggactagtaataactgaggagttatcactacatataggcctgaagaacagaggagaaaacagtcacctggacccagaggagggcctttggtagaagagcagtggctgtccatcacagagtaccgccagcttgcagagggagccaggggtataaatacctctctctcctcttgcctgtcatccacaggctcctcaatgaacaggcctagcaagaagccagaaggcaaaaagtctgtaggtgtagcaaaaccaggcagacccaaggcaggatgggagatggatacagagaggcagacaggagatggcccaaaagcctcatctggcggtctctcggataaagtcccatgaagaactttggaagctgagttttagttctctcatagttccctgtacagtgctcacctcccttccctggagaagacccccaggttggcacacaggagataggaattctgagcatctgggaagaagagataggaattctgagcatctgggaagaagatgctaaccttgcagagagaaagaacctgccaggccagtggaccacgtggccagagccctggatcctcaggtcctcaccccgccagctcctttgaccccatggaaatctgtctgccagccggtttggccccaatctcaggcaccacaggcagcagcttggtgacttccctttctctccataggagatgtctgcttccttctgcagccaagccagagaagcttctgggattccccaagactggccggggcccaagagggccctgaggacagggctgagctgcatccaagtatcttgttttggccacacagacacctgttccctcttcttcctttacaaaacaactcac

SEQ ID NO: 35559 - DNA, 1692 bp, Bovine  19866881245601
  misc_feature (1)..(1): n is a, c, g, or t
ntggcagctgtccctctcacactgtaagttcagggagtgcagagctgtggctctcctgttccccctgggtccccactgagcccagcacagtgctgggcacaggcaatgctcaatttatttagagaaagacagaaagggagagatgaggaaactcctctgcagcatctgaaggcacccagtgacatcagagaagagaaatagatatatttggatcctctcctatgggtctcaaagagccttggtttattcttgagcactgctgggtcaactgccctggggaggagacccagaaaggagaaggggtgaggggtcaccattcatggtgtgtgaggcttaccatctgttatttctttccatcctcatgacaattcagaaaagtagatggcctccctccatttgggaggaaaggagactcaaaagggggaaggcactagttctgggtctctagctagtaagtggcaggcttgggatttagaagccaggcctcttcccaaagatactgcttctgaacagaccatgcaccaagggaggggtatgagggtgtggagggaaaggttgtctaagacttgatttcatggcaggcagaggcagagaaccccaccaccataactagccaaagaggaaaattcccagttattgggggtgggctgagggtggtcagcatccacagacttaggccctgacggggtaaagggagggtctccatatcctgggtcactggagcctccgagctcagcttctttggcctctacctctcgcatctctcctgtgccagcagcacatcccctagcgtagcggaggcgtccagatggcagggagggccagggaacagctgaagatgctgagtaggcctccgtcgcccgccttcccatggccccacggatcatccggtgctgccagcccatctcattggctctctcctggttactcatctctcctcttctccatctttccagcctgtggttgctgtggaaacacagaacagtgacatcactatagggcgagggctggggtgacgctgctcttggcagggactggttcctgctgcctgctagatgttaaatccacatctggatttaccaagggcgacaaaacggggtagggaggacaggaaaagggacagagctcacacactccctccccttgtgccgctttcccccagtgtagtgagcacaagagggcggggaggatgcaggtgatcagagggatgagaagctgcacacacctaggagggagaataaaagttaaggagacagggtatggcttgggagtcaattccagtgagccaggtctgagggtggggcacggggcgggtgaagatggggggtagagcttcgagaataaagggtctggggtttgtctagtttctcaaagcaccgtgctgttcagcttagggcccacgaaaggatgcaaaagacttctgaagatctctagagccccctcctcacagctacagcagtttttaatcctgtctcataaataagaaaactgaggatcagagaagcaaaacaatctgccttgtgtggcccggcaggtcacagcagagctgagagcaggtctcagaagtccagtccagcactaaccatggagataatcattatcctataatgataataacagtagcagcattgaacactgattcagtctaccctgcttagcatttaagagcctcctacacctcggtgtggtaaa

SEQ ID NO: 35560 - DNA, 847 bp, Bovine  19866881263297
  misc_feature (1)..(1): n is a, c, g, or t
ngtttcacagttctgggggaggggcggtcggatgctttgcctgataactgggaaacagtcattagatactgaaagaaggacaattaggcctcagcttcaggggcacagagagagagggagggagaagagggcaggggagaggaaaagaaaaaaaaaggggaaggctctctaagcaggaaagaatttcagtgcctggacctggaagcaaacagctgattttgggctccattgcctctctgcctcctgctgtgtcttaataaaaataacaatatgcaacaggtagtgagcgctttcgccctcaccagactctgttctaagggcctaggggctttatctctcaagtctattactctgatgattctgtttgacacaaggaagttgagagttagggaggtgaagtcacttgcctggggcacccagccagtaactggaagttctgcgacatgactgccaaaaacctgtgttctctaccccgtgtgactccgcacttctgaggttgtggctaggtgacccacaaggtggtgggcttggccaggggcctccgcgatgaagctctcagcaaatgcctggaaacaagcttctctccggctcgggtttctactgggaaggaagggacaggatcctctcagcttcttctgaggctccttgtcacctgagacacccttccagagctccctcccccgagcgtctaagcccaggaataaagggcctattcactgggcctctcctagctggcttgggaagtggccaggcagcagccctgcggtcagtccccctcctccagcctggcccctcctctggactcgacacctggtatctctttcttgtgtccctgagcccagggccc

SEQ ID NO: 35561 - DNA, 958 bp, Bovine  19866881275750
  misc_feature (1)..(1): n is a, c, g, or t
ngaagattcccctggaggagggcatggcaacccactccagtattcttgtcaggaaaatctgatggacagaggagcctggtgggctacagtccatggggtcgaaaagagtcggacatgactgaagtgactgagcacagcacaggaggaagaaaggtggggagcttggccagatttgtgtggtgctgcatgtggggcttgtgtgtgaatagtgtacatgtgtgtacatcttaggggtgattctcaccctcaactccacgtgtccatgggtatgcatgtgtgcatgagttctctcttctgcaggggcaaagcagagttctccctttctcccagccccactcaccaccccaaccctaacctccatccttgtctgggtctcttaaaaatggggagaaggcagagacctcagcaggaatggtggcggagggcccgggcccggttgtcccctcttgtccagaccctccccgggtctgggcagatagtttccagcggggagggggcgcgaaagtggcagcaaggactggaggggccagacacacccaggtggacagggacaggctgcggggaacttggggacgctccaggagccgacgtgagggtgacccctccagctgctggggatttctctgttaatctgggactgctccgtttgcatctcatttgcctatatttgcataacaaggacctggctggcaccagaaattgaaattcctagcctgggtaattatgtgaaaaagtctctggagaccagcaggaatcctggggccagggaaacagaggcaggaagctggatgtgtcgatgtactggtacccattcaatcccagagcctccattccttccctaatccctgcagcaggaggggcggggatgtcaatgagaatggggtgggagggataacaaggttaagaatcaagtcacccttgagagccccagcacccagacagagcgggcacagccttc

SEQ ID NO: 35562 - DNA, 975 bp, Bovine  19866881288003
  misc_feature (1)..(1): n is a, c, g, or t
ntgaatgagtcagctggcccaggctcacctggctggaccagtcgaagctggtgcccagggcggccaggacacgcagcatccaggggctgctgttgcacttcccccgcgtagaagggtgagacccgcggcagggcctggcggaagacctggtggcggctggccagcacgtccaggcggccaccatgaaagcatctcggcagtcctgccaggacagtgaaagagaaagagaaggctgggtagtgggttatctcacctgatcctcaaaacaacactatgcagtaagtgctattgctgttgtcatttcagatatgggggaaaaaaggttcagaaagaagtcactggctcaaggtcacagagaaagtactggctaggatagaagataccagatcttctaactcttttttccagtagtcgtgtatggatgtaagagttggaccataaagaaggctgagagccaaagaactgatacttctgtggtgctggagaatactcttgagagtcccttgaactgcaaggagattaaagcagttaatcctaaaggaaatcaaccctgaatattcattggaaggactgatgctgaagccctaatactttggctacttgatgcgaagagccagctcactggaaaggaccctgatgctgggaaagattgaaagccaaaggagaagggggtggcagagaacgtgatggttggacagcatcaccagctcaatggacacgaatctgagcgaactctgggagccagtgaaggacaaggaagcccggtgtgctactgtccataggtcacaaagaattggacatgacttagcaactgaacaaccacaacttctaactcttaaaatagagggacaagagggaaacaatctttgtagatcaagaaaggggaaagacagctccaatcctcaaccaggcagcttggcactgggtaaaacccccaagcggggcatgggagggagctagaagggaacagaacga

SEQ ID NO: 35563 - DNA, 1123 bp, Bovine  19866881296611
  misc_feature (1)..(1): n is a, c, g, or t
naacctttctgctgaggaccctcaaagactatctaagctacctctgaaaccaccgatgggccgatatcccaaaatgaaataccactggactcagaaggcctcctttctgaagaacaaaagatggccttggcagcccccacccattatgctagacagtctgagactggaaactggaactgcaccttctaccaccacttcttgaggtcacttagtgacctttcctaatattctcctgatttgcataaaaactgatagcactgaaataatgataacaacagccaatgtctgatggatatcagtaagccagacactgttttgtgttcacaaacatggtctccatcttgagaataaatccaaaaactgttattgtccccatttaacatctgagatgagagaggcacagggaggttaaggcactttcccaaagacagccagcatgtaaatgcaagagtcgagactctcacccagggaggctgacctgggagcccacgctcttggccccagcctctgtgatggagagacccggctcccagcccccaaggttcctacaagaaatcccacacaccgaggggcctggtttcaggttgggcagagacaggccgggctctcacctggatcttgggcagaatggcaacgatggagacacagacacagagagtgaggttgaggccaatgaaaaccttgccctcgtagcaggcaccgggctgggtgtagtagacgaacagcagcgccacggccgtgatcgacagcgcgtagaagaggagggtgaagaagaagaggcctgggagggaagggcagcagcaggtgggtctggaggcacaaggacccccgtccctcatcgggcagtcatctggtctcgggtcccagcttcctcctccaaggagtgcctgctaaacttctgtcctcatccagtctttgtaagcacccaccccaccctgaactaaaatgattcacgtgccacaaataaagtcaccataagtataaagacaatgaatagagaacagtctttcaaagcgtgaactagatgagtggtgatcagggaggtgggacaaccaaaccaaccccaagtgagcctttcttctcgaccgattcagaaaatcgatctgaagaaggacccattctg

SEQ ID NO: 35564 - DNA, 591 bp, Bovine  19866881306820
  misc_feature (1)..(1): n is a, c, g, or t
ncccccccatcccccaggggctccctaggcccccaggaaaatgtttcagctccccagaatggtgttcccagtctggccctacctacgtcttagaactcagctcctcccaccgccctgtgctctggcccaaatagtttctccactagtcatgagctcacatcacccattctagcatccaagcctttgttcatgttaattactgtccccctccccatgtcttccctcctccctgcctccccaaatcttccccacctcctcagtgaaggaggccttgcctgcctctgctcctgccacccccaacccccctccacacatcccgccttgtcagcccactttctctcctttcctctataaccttcacttagcaaaggtctgagcaaacctcgtcctcagcacaaacagttgttcaaagatctttaaaggagaactgtaggctttggcttaggtcagggaggagagccggcttccaccctgcaggggctctgagggggccaggccagcagagcagcctcctttgcagctatcttgactcggccaatggagtttgttgttattgctccaaattaggcaccaatttgcccgtgtaattgt

SEQ ID NO: 35565 - DNA, 2400 bp, Bovine  19866881353639
  misc_feature (1)..(1): n is a, c, g, or t
naactgtttgtcttgtattagtgcttttaaactggcttttgaatcctgggagggttctgcaggggctcactcacaagcttgcgagggagggcttgcgagcctgcctcattgaggctccagaatcgccacctccaaccacagcagctttctcttgtgagtttttggatttgtatttatccaaaggttctttagctaaaatttaacaaaagctgtatacatttcttgtaatctgcggaacaattcagtgaggaagggattattatgtattttgcttgtgagagaacaggcttagagagattaagccactggcacatggtcatggagtcagctgatgggagcagagtatggaactgagattggcctgtggcttcattatctgtgaaggaggcttgccatgagctctgggcagcttccagggcagaagagcgtccacgatgctgagtggggaaggacctgccacccaccctccctcaagaagcttctcttccttgagcaggcagtccctctttagatcaagtgtgaatttggccttggccttgaaggtaagtgtccaggaagccatcaaacacaattaaaagagaaagtccaagttcacactggcggttggtctaggacttgtctggatggcagcatcctcaatttttggagctaggcccagttgccctctgtgcccttgacctcagcccacctgccgaggccttggctgtcctccactcagcctttggctgtcctccactcggcctttggccagcctccactcggcctttggccggcctgttagggagatggagcctaacgctctgagtctcagggatccctggctagtggcgtagggacacgaacaagagcgggagtgctcccacgcaggctctactgtacccatggcccgggcttagcagccaggaaacctgcattctggccccagcccttccacacggttttgtgtgatttttctggacttgagtttccttctccataggggagcgctaatactaatagttaatgtgtattgagtgctttgtactagggtctctgtccgaactcttcacgtgataggcctcatttcattctcatactaattggtaggccggcactttaaaagcaaagaatattgaggtttagagaggctaagtcattggaccagttaggaaatggcagaaccccaacttgaactggtctttttcactcctagccgttgtcctgtaatgctttaggaatagggtcttgcctgcctgtctcacagagccgtgggtgagtccggggaaatgtttttgcatcatgagctagagtccagtaaggaagatgtgctctgggtgaatccatgcaccgtgcaccattggtgactgggagggtcaggggcattactggagatcgcgtttggctgggaattctgcaagtagaggtgggggtaccatggagtgtggattttgaattcagtttgattcatttgcctgctcactgatacagtcaatactcacggagcatccattctgccctgggggtggggataaagtggcaaaccagtcaggataccagcccttgtggagccccttagtgggcagggaagggcaggtttccagggcagccaggagagcaggtttccagccctgcctctgcaggtcatgggcagtgtgactgggtaagctgaatgtcttctggacgccgcaggttccccatctgaaccatgggatcatgagtccagcccagcctgtaggatcagttaaaagaaaggccatggcagggctttgtaactgtagcctgccgtgccgtggctagtttctggccctgtccttctgaccgatgtcttctcttcttgcagggctgcccaggagctgggggacaagcacccggagcccctccgggtagctactaccctggaccccccccacggtggagggcagtatgggagcggggtaccccctggtggcggatatggaggaggtcctgcccctggagggccttacggaccaccagctggtggaggaccctatggacaccccccaccctggggggctcccttctggaactccaggaggaccctatggtggcgcagccccagggggcccctatggtacaccacctccaaattccttcggtgccggaccttatggacagggaccacctcctccaggtaagtaggggtcttggactccagctgccttgagccttgttccgagttatccagggccctgtatgcccttcttgtgaatgcacaggcagcctgctctctggcttctaagcatcttgtctctagctttgcttgcattagcagaatgagaagtctgttaattagctttgctgtggtgacaacaattctgaaatctctggcttacagcaacaaacgtttatttctgttcctcgctcacactatttactctgctacacgtcgacagctgcagg

SEQ ID NO: 35566 - DNA, 1021 bp, Bovine  19866881398165
  misc_feature (1)..(1): n is a, c, g, or t
ncttggctgtcttcctccgagcccgcatctgcttcacctcggccggaaggcgcgggcccgaggctggggctctgcacccaggccttgcccctgctcctccagctggactgagggccgcttccagttcctgaccagggctgacgtggtgccagggatctgtccagcacacagacagcagttgtgggtagcaccttgggaggggtgttctgctttgctgggctggactctggggcagggcagaagtgagcaagggaccaaacccttgcagtaggaaggaactaataatcatgataaagaccaatatcctggacttgagtatacttccgtttttccattagctcattgtgagccctcccacaatatacctcttgggaacatgttattggcctttagttatagatgaggtaggggacgctcgacaagtccccaggtcacagcctggggcctgaacatcctcctagctacccatccatcttcctcagtggtgagttgtgccttcccctggcccatgcctgactcgaggaggcccgagcaaggggtgaacaggtgggcagcatggaatggcctgggcctcagagcacaggtcccagcctaggtcggtgcctgtaggcctctgatgattctgggctcctggagcagcacagataccttcacagcctctcccacactagacacctgaatcaccctacagcagaagggcatggggctagagttcaggaaacctggggtctagggccggctcagccgttcatgagctgtgtgaccttggtatgtgactcacttttcttttctgagccttcgtgtttcctgttggtcagacaggactgagcaactttcactttgcacaatgtttgagaatctatatcagaactggagaagggaaaggctacccactcaagtattctggcctggagaattccagggactgtacagtccatggggtcacaaagagtcgaacacaactgagtgactttctctcactctgcacttgttcctgttgactgggggactgtgaggagca

SEQ ID NO: 35567 - DNA, 932 bp, Bovine  19866881416473
  misc_feature (1)..(1): n is a, c, g, or t
ntgggggtcatgctcttctgtagagcatcaataggagcttctaaaatggtgtgcgctctaccttgcacacctgctctgtgggaccagtgcccctggtggccagcctcctccttaccatggagccgggcaccccgggcaatccggggctccccgcaggccccggagatccagggtggcctctctctcctgcaggacccggtggccccgcaggtcccatggagccactcttgccgggcccgccaaggcatgccagctcttcccttctctcctgcctggcccttctgtcctgaaggccccgggtcaccctagaggacaggaagtctcacagtccaacattgccaagagccgtcaagtttatctcacagtgtctcaagggtctgccccggcttcagtgccacacgcagcccccagcatctccctctggatcacagcatcttgacaggctgccccgtgtctctgcccccaaagcagtccttttaaaggatggttttcatgttcttactccctgctgagaaatttccatgtctcccagttgccctcagcataaaggtttaattcctcggccgggcattccaggccatcatgatggggtcccgactatgtcttctccagcctcgttttcctgcccgggtgcttccagccacgccttgctggttatagttctgactcagccatgtgtcttcgtcctcccggcctggaatgccttccctctccccagtgtcctcctcccactcggctgtaaggtccctgttctctgtgcaacctccccgacgccccaggctgagtggatcgctccctccctctgattccatagcactgcatctaaaacccaacaggctccagtgttagtgtgactggactaagtgggcaccgggcccaaggctaggagagagggccggcaggtgagtaaagccaagcggatgctcgcagaa

SEQ ID NO: 35568 - DNA, 795 bp, Bovine  19866881555919
  misc_feature (1)..(1): n is a, c, g, or t
ncagttcagctgcaggaacggaatgtacatcccaaacctactggggaggacagtggtcagggcaggcctggccatgggccaggatccccaaccccttaaccacccagggaatcttctttcctccttgggctttagctctcctggctgctccgaggggagattctaccagtccttaaagctatccagcctcccagccagtgatcagtcattcaacacctgtgttagccccgcgcacggaacaagccctgtatggagtggcgggaatacggtaggagacaagacccgagtctcagccctccgagtctactgctgtgcagcagaagtcataacaccacacattccctcggcacatcctgtgctccagatgctgcactaagtgctttacatgcactctcttctgtttctcctaactctgtgttaggtactgttattttgtgcccttttcagcagaggaagctgtggttcagagaggtggaggaggggctctggaaaagtcacacagttagtaaggaagttatagaactgggattcaaatccggaactggctggtacccgaaatcaagacagacactcaagaaacactaaaagcaattcattaattaaaaatgtacatgcttccacaaaagagaggtagatgtggccaagagtgcctataagggcagctcttaagtttacagagagggacagttcaggaacaatatttgctgtgtgtctattatgtactaggcactgaaatagacccttaaacagtataaaccccttcctctgaggcttaagtaaccttaagttaaggga

SEQ ID NO: 35569 - DNA, 3471 bp, Bovine  19866880282727
  misc_feature (1)..(1): n is a, c, g, or t
natatatataatggaatattactcagccataaacaagaatgaaataatgccattagcaatgacatggacagacctagagattatcatactgagtaaagtaagcaaacacacaaagacaaatatcagatgatgtcactcatatgcagaatctaagagaacaaatgaacttatctataaaactaaaactgagtcacagatctagaaaacaaatttatggtaatgaggaagtaaggggtggggaagggataaactggtagactgggactgacatatacatactactatatatgaaatatgtaactaataagaacctcctattagctcaagaaaccctactcaatactttgtaacagcctatatgggaaaagaatctaaaaaacagtggagatatatatatatatatatatatgtatatattactcactttgctgtacagcagaaactaacacaacattgtaaatcaattatactccaataaaataaaaaacctcacacattctcaagtctcaccccatactactgaataataaaatctgtggctgggacccaggaatctgttttaataagccctccaggtaattctgacatgtgctcaagtttgacaaccagtgccctggtaatatagccccttgtgttatatatatattggaaaactgatgttcagagaaggatttaaaagacttgagagacaagaaacatttttccaccatttattcccacagtgtctggcatgtaatatgggcatacaataaagatttgttggaggaaaaaatgaatgcctcctccaaagagttgtgctatcacctaatgatggtgctagtccaaacaatataaacctaacttaccagaaatatacatattcctaatgagtgtgtttctttgaaaagatatgttcaccatgacatcaagaattataattttttttaaattttattttatttttaaactttacatatttgtattagttttgccaaatatcaaaatgaatccatcacaggtatacatgtgttccccatcctgaaccctcctccctcctccctccccataccaataatttaaaaactattacttttgagtgttgcgtaaaaaaggaagttaccaaaggtgaccactaacaaaactattccgtttttccataccttgttattttgccgtagtttacttaactctagtttatacttttctgcttcttctagagctctatttaagcgaacttccatggcactttgactagcaacagcctgtttttgtagtcttcttttattctctaattcctgtacagcaaaagagacagataaaacatttataaacataagttctctctgatattttcaatattttccatttctatattcctcgctttctcctaaattatacacagacacatacacagccagagactgaacactgaatgatagaggtttcagggaattcccacgctgaattggttttaggaaaatatatccttaaagatatagtcacaaatcaggctttcagattgctttttgtttggaattttctgcctctttttactgatcccaagatatagtatacatttcttctgtatttactttataaacaactttttataaccatagttctcttggaaacctcccaaaacaccaatttaagacataaattctctcattaatattgtgcttgtgtaaacccgataaaatatatcatttaagaaatatctgttaaatacagaacattctacattagccagataagaaaaccccaattctgagcaaaaacaacagattttaaggatatttttcacatcctggtgtgggtttagacctgcacttcttcaaacagactaagagctgctgttgaagaatctacaggccacacaggaagaaacatgaacatatagaataaactccaaattccatcccaatctggcaccataatctcatctactcctacaaatgtcccttcagctctatgggcagtacttgcttggatctctcctgaagagtcatgatgtttcttgcctctgaccttttgctcatgctcttccttctcccctgatttctctccacccctcatttttaactggctaacacctattcatcctttaaccctcagttagggctatacactagggttttaccttctcccaggagcctttcctcactatcttctcaggctggatgaagtaccctttctttagagattctatggcacattgatacatatatcatagtgcctgcttgtgtggaactgatctccatttacttaatttccctcactatcctgtaagctccttgaagataggaagtactttaatttctatgttcctagcacttcggtggcaaataaaaagcactaataccatgtttactgaactgaatttattttgtaatacttaactcactctactttgcatgccctacaatgtctagtacatcgcattatacaaagcagataataaatatcatggaattgaaatgatgcagttaataacagagttgtctgttttcttctaattttttctcctggctatatcactatgttttatttgaaaactgatctccttggctctgagtaattaaggggaaaacaaaacaaaacacatgctgctctttatgcaggtttctaaacaaatcaaactgtgtctggataccatctgctctcaccagccttcttcacagctttgtgggtggtagcgacactaagagcagcctgacttctctcactgttcacatggaaaaggcagattctcattagctaccaaggccacagttcttgctgcttcatttcagcctcttctcataagaatacagaaatcaatctttgcccttctctttcttgctagagactctgtaacctactccacagaaaaatgaaaacccttctttactacatgatggtcccctatcaataaatcaatactaaatcaatactgccccatttcttgggaaaagtgaaaaagaaaaaggatacaagaatagtaaagtaggaaataaagttttcctatatgagaaaatccactaagcaaagggttaatcttatcaaaaacttgaaaagctttctgttttcagctatgcttaagtactttttacaaaagaaagtacagacaagataccaattttattattgagtatttttaagatgaaaactctctcctacaacaagtttattattaccctataaattaagaagtttacatgttgctagagaaaaattttataaaatcacaagtcctgaagtttatactaactttaaaaggaaaagctggatagcttatagaaaatcaagtctaactttaaaactcaaatactaagatatccaagaagaaataatttgtgattgttccataatttttaatgcattcataaggcactgggagagtacaaaaaagaggtatatactggtaaccaagtgaaatgaaagtcactcagttaggtcccactctttgggactccaggactataaagtccatgcaattctctaggccagaat

SEQ ID NO: 35570 - DNA, 1332 bp, Bovine  19866880351270
  misc_feature (1)..(1): n is a, c, g, or t
nagataagattcccatttggatcctctaaatgaaattgtcatcttcaaaagatgggtgtgaattttagactctgtcctctggcttttctgtaacttttgctttctatttatcaaaaaaatcatatatgaaatgaggaactggagcaatatacaacaaaatgtctgaatgccattaagtttctatggaaatggcactgttttatgaagaagactagttctttgttttacttcaagaatttaggccttccagaaggtgaaccagccctccaggatggaccataactttagatcatgaggctctgagtgaccatgctttctcagcacactgtggagggactgtataaaggaacaaaatgagaaatatttagtccttgtgtatcaggctgacattttagcctattaaataattcttcaaaccctttaataataccaatctttctactcactataaagcaaatcacattgtgggtaaattaaattgcacagaagcaggcctgtaaattaagagagaacttttctttccctgcacaaaggctgatttagatagcatgggatcattagtgaccaaacagatgcccctcatctataacccagagacagctctcagctgtacagagaacctttcttttcctacagagaggtgaactcaaaacttgtcactgatttttgcaccctcttaatcttcctgtttattctgtgcttcattaaagtcaatctccatggggcagactgtcatccgagctcagcctgccctgctgtctgctctctccagagagcatccttcatcctgataaacgggctgtgagctgaacacgtgactgagctccttaaagtaaacagattacagaaagcaaccccttccacactcactcagcagaactggataagtaggagctctgacgtggtcatcgtggtggagacaatgctttcccgatagatggggtttcagatttactgttataaaatgatacagaggatatttatctttatcactgtgtcatcccatacctttaaggctgcattagctaatgtcattcattggccaaatgtttccctcaggatttggcattgttataggatgtctgctgaagccaagctctgtgctaggcatcgcaggcacgaatatacatagaggaagagaccgtgatgactgcaatgggaaacacagtgaagctctgtgggaagccagaaggcatgccaccatcacaagaccagccgtgttgtaagcttagcgtctgcctgtttgttggactcacagaccatattatcccggagcaagtgttttatctgcatgaaaaggcaacactggagcccacgacggttttcaggcag

SEQ ID NO: 35571 - DNA, 1611 bp, Bovine  19866880432515
  misc_feature (1)..(1): n is a, c, g, or t
naactccctaaaaggggagacaccttggtcaagactgtgaacagagaaggatgcaaaagtggcagagaggtcattaagcaataagaaacaaagcagcaatttaaggtagtctgtgccagttcttatacctgggcggaggaactctctaacaaggccatgagtgactattaactgagtaacagccaatatctgaccacttagtccttgaaggcatcttgaggcatgaaggtaattttttctttcacttgccttcattcttaatgattagcctcagaaagcttggataggttagtaaacgtaacaaatgcataaatgaattattcctcatttatgactaattagcagcagcagcataataatcattacacatgtaaatcaataagattttcacagaatcagaatattaaacataaacttcatgatcatctaatattaatacaaactgctaaattttcaagtgaagacattgctattatagagggactaagcagtatccctgaacccagttaattatagttcaacattaactatgttcatataaactcaactgtattgttttttatgtaaatagaataggtggcacgtcataaattcaacaattttagaggcactaccggtaactaacataatgtttttgatgactcagactaagtatttttctagtggtatgcagagaatgagtttgtaagaaagaaatcagtatcagggctagtgcactgggacgacccagagggatggtatggggagggaggagggaggagggttcaggatggggaacacatgtatacctgtggtggattcattttgatatttggcaaaactaatacaattatgtaaagtttaaaaattaaataaaatttaaaaacaaaacaaaaaaaataaataaaagcataaaaaaataatattcattagaaaattcattattttacttgatgctaatcaataattcatttatcctttaacacatgttaatctaatacacaataaagagaattcagtaacatcaaatgaaaggaattcaaagagacatttttaaaaaattatttcaatgttttaataataagctatggggcatttatttaactttagttgaaaatgggtcaatgaaactaatcctagatagttctttttagttttactttttataatagaaaatatcaaacatatataaaagtagtgagactggttcagtgaaactctgcttacccatcatccatttttaacaattacaaacttaaaagcaattttatttcatctatcaaacaaatgcaaaacatcacaatacattttctaaatacaagaaaaattgttctcagtgttgcttttttaagcaattgtgatagaagaataaatataaacaaaaaacctacctgttccaatgtcttcactaacaccagaaaaaatatcatcatttataaaatcaggtaagccttcttcctctagttgcccttcaatcttgctaattgtttttgcaagagaaaagtctgagaaatcctctggaatggcaacatcactggcagtctgcacatgagagtatttcaattttacactaaaaaaaaaaaaagaaatatatatatgtgtgtgtgtgtgtgtgtgtatatatatatatat

SEQ ID NO: 35572 - DNA, 1212 bp, Bovine  19866880444185
  misc_feature (1)..(1): n is a, c, g, or t
ngctggtctgcaagctgtctccactcaacaggtctttaacagtgctgctgaaatctaactgttgctctccaatttctgattgtgcttgattatccccaggagaaaaactgatctgatcggtgctattacttttggtgaggtaagatggtgcttggaattcataaatagaagtgctggaatcaatcatattctgcggattggcactcggaaagacagtggacgtttccaaaatctgagtgagattcatccgggcggtgtaattggagggcagattgttcatgcccaaacctctcacagcatcatcattgtcagaatcaagtttactcaacaaaacattggttattttcttactgttcgtttgcttttgaagagcgtttgggaaggctgtttgcatcatgactgtcaatggaactgattgacttctttgagctatgttgttggcacatgcatctgtgtggacatttgtgaaaacatgaacttcgggggttactggacttccaaagggggtcacgttggatcgggggatattagatactgggtagagggtgcttccactaagattacgctggcgatgaacagcagggctcacactccggcacctgaaagttgctgctggcagatgaattagttcctttattatcaagaggggcagggaccgcaaaaccctcctgtttattggtgttatttacagtggcaccttgatgctgcacaggagagacaggagtcaaacgacaaaaatgactgtcatgatgtctggattgagactgataagactgcccaggcacagcgaaaagcgtgaggttttcctgaaacggtcttccactagttcctgatagcttgggagaatgccatggccagaaacagatgaattaccaaccccactatacccattattcatccattcaagcttggttttgtcagggtgtgtggccatgggtctttgcattggtttcacaggactacttgagacaatgctggcatcatgatacgccatactggagcttattggggtaaatgcaaaaggattcctgcattccacggggctgggagggacactactgctgcagttagagtgtggcgtaccgatgggtgtatgtcggctacttcccaaagcactatccacaggtgttgtctgggccagcctggagcaagggctctcccgtgacagactctgcgacccagcaatcatttcagatgtgggggtcggggttg

SEQ ID NO: 35573 - DNA, 1086 bp, Bovine  19866880596399
  misc_feature (1)..(1): n is a, c, g, or t
natattttaagaaaggcaaattttgaaagttgaattaataattatgttttgatttattgtgagaacaataggggaaaggagcattcaccttatatttttaaagtatgagtaagttgtataggccgcaggctgaagtgtttaataatgtagtggagtgctcttttggtaaatcatgtgatttaattattctttaattgataatttatatttatacatctattacaacttaaccgctgattttaatgtgaggaaaacttctaaagtacaatgtacttcagtttttggtacttactctgaaaaaacaaaatgacaacaaacaccttaatccccaaatgtacacttttataacttcattttaaaattgtactggcacactagcatttaattttcagctttagaaatcctatttgcaaaattatttatttatatttaaaactttaaacattcgtggatcataaacagtgttagtggctgtatttatgtatagcctcatagcccctcctccacaacactggatgtatgttattcattaagtgactatataaaataaagacattacaaagtgaaagctctttcactcccatctcctcctaagaaatagtatgtgcatgtgtatatgtataaaattaaaatgacttaatagataagattgcagttatttagatatctcatttcacattttttgaagcaacagtatctttttaccaattattttatcacttgataatgttctgaaagatgatcagttttggactatgtcctatatcaacctttggtatcatcactaatgagactttaaaattacattatacagaagtgtggtacttaataattatcaaatgagctttgcatttaggttgatcatagtttctaaattattggacttcatgtcacaaacaagtctgaacttgtcctcatattttacagatacatagtatgtaatgtaggcctttagctagacagtgaattgtttattatctgttcataattaatctattctgttcattaaagtaaaatactgttagataacagtatgtccatggttatttcaagcattaaatgagtgtttggaaaaaatattgagta

SEQ ID NO: 35574 - DNA, 3032 bp, Bovine  19866880612960
  misc_feature (1)..(1): n is a, c, g, or t
nataagcgtcttttaatttcctggctgcaatcccatctgcagtgattttggagccttaaaaagtaaagtctgtccctgtttccactgtttctccatgtattggtcatgaagtggtgggaccagatgccatgatctcagtttctgaatgttgaattttaagccaacttttctactctcctctttcacttttatgaagaggctttttttttttttacttaaatttatttattttaattggaggctaattactttacaatattgtattggttttgccatacatctacatgaatccaccacaggtatacacatgttccccattctgaacccccctcccacctccctccccagtaccatccctctgggtcatcctagtgcaccagccccaagcatcctgtatcgtgcatcaaacctggactggtgattcgtttcttatgtgatattatacatgtttcaatgccattctcccaaatcatcacaccctctccctctcccacagagtccaaaggactgttctatacatctgtgtctctttacctcagtctgtataatacaagaggctctttagttcttctttgctttgtgccataaggatggtatcatctgcatatttgaggttattgatatttctcccagcaatcttgattccagcttttgcttcatccagcccagcatctctcatgatgtactttgcatataaattaaataagcagagtgacttcagcaagttgtaatctttttgctggcggaatgtcttgcctctgtgttgatagctactgactgaccacagtcatggttgctgaaggctgggatggctctagaaatgtattaaaataagaaagcaataaagtttgctgtgttgattcactccttctttcaggaatgatttctctgtagcagacagtgctgtttgatagcattttacccccagtagaatgtctttgaaaagtagagtcaatcctcttaaaccctgccgctgcttcatcaactaattttatgtaatattttaaatcctttgttgtcgtttcaacagtattcacagcatctttaccagaataagattccatctcaagagaccagtttctttgttcatccataacaagcagctcctcatcccttaaagttttaggatgagatttcagcaaatcggtcacatattcatgcttcacttctacttctgattcttttgttaatttccaccacatctgcgttacttcctctattagagtcatccatgagtgtcagatcaggttcttctaaacccctcttaacattagtagtttgacttcttccataaatcatgggtgttcttcatggcatgtggaatgggaaattctttccacaaggttttcagtttactttgttcagacccatcagagaaatcactatcgatggcaacaatagttttacagtgcccttcttaaataatagactgaaaaatggaaactacttgatctgtgggctacacaatggatgctgttttatcaggcacgaaaacaatagtaatcttgttgtacacctccatcagaacttgggtgaacaggtgtattgtcagcaaacagtaatattttgaaaggggtttcttttcctgagcagtgattctaaacaggcttgaaattttcagtaagtcatattgtcaacagatgggttgtcaccaaggcttagttgttccattgacacatgataggcagagtaaattagcataattattaagggccctaggattttccaaatgacaaatgagcattgatttcagctaaatgtcaccagctgtattagtctataattagagaattagtctgtcctttgaaactttgaagccaggcattgacttctttctagctatgaaagtcttgggtggctgggcgcctgggcccccgccccctgacgtcgggtcgctgctgtttcttgggctctgtgcaggttgctacttagccaggtcttgtgcctgtagctgctttcgccatctgctccatggctttcgtgaccaggcagttcgtgcgctccatgtcctcctcctccagcgcctcggcctcggcgaaaaaaatcctcgtcaagcacgtgactgtcatcggcggtgggctgatgggcgccggcattgcccaggttgctgcagcaactggccacacagtagtgttggtggaccaaacagaggacatcctggaaaaatctagaaagggaattgaggaaagtcttcggaaagtggccaagaagaagtttgcagaaaaccccaagggcactgatgagtttgtggcgaagaccctgagcagcatatcgaccagcacggatgcagcatctgtggtccacagcacagacttggtggtggccatcgtagagaatctgcagatgaagaacgagctgttcaagaggctggacaagtttgccgccgaacacacaatctttgccagcaacacttcctctttgcagatcacaagcctagccaattccaccaccagacaggaccgattcgccgggctccatttcttcaacccagtgcctttgatgaagcttgtggaggtcattaaaacaccaatgaccagccagaagacatttgaatctctgctagacttcagcagagccctggggaagcatcctgttgcttgcaaggacacgcctgggtttatcgtgaaccgtcttctggtgccgtacctcatggaagcggtcaggctgtgtgagcgaggtgaagcatcgaaggaggacatcgacacggtgatgaagctgggcgccggctaccccatgggtccgtttgagcttctcgattatgttgggctggatactacgaagttcatcctagatggttggcatgaaatggactcaaagaaccccctgtttcagccctgcccatccctgaataagctggtagcagagaaaaagtttggcaagaaatctggagaaggattttacaaatacaagtgagcagcttccctggctcaaggacgaagccccgtaagcacataccagcagctccccaagtgcccacgcgaatggtcttggtcagatgttccctcccacagcacgatctgttcgatgtacgt

SEQ ID NO: 35575 - DNA, 1993 bp, Bovine  19866880709194
  misc_feature (1)..(1): n is a, c, g, or t
ntatagtgttacctgaagactaatgatatctgcgtcacagttaacaatttcttccataattccctttttcctgtattcccagtttaatgcccaggatgggcaatagccatatagctgccgggtggcatatttatcacataacacattgtaacacataaccgtgaatgatgctaagaagtgggagaaaaaaacaaaacaaaagggagaaaattaggcaaccttttctaaagcaatatcacatgtacacctacacgatcatacatgccatacaaacacaactcaaatatcaccactgtgaaacgccttgggcaagattctgttaaactatataaaaacttcaccagagtccatccaccttaccaaagttcttttaccagaatcagacttatagctcatatttgagattttttaaaggatattttaataaataaaaattcaagtttcagggaattcgctggttgctcagtggttaggactctgcacttccactgctgggagcacaggttcaatccctggtcaggtaactaagatcctgccagtcatgcggtgtggccaaaaataatctaattttaaatcaatactaacttttttacacataatttgctgagcaaaacttttctctataaatggcataaaagtaaattacaaaagtaaattttaacttttttatctttaaaaggctttcattacctttcattaacaaaattttcacacttagtacttctttgagtctcttacttctctcactgctctgagccagaagaatacagactaacaaagtttagttataacagaaacctttttaaccaaatcaaacgctcatttttaaaattaaattctcattttaaaattcccttgaactgtaaaaggactgtgtgcatgctcagttgctaagtcatgtccaactctttgcgaccctatggactgtagcccaccaggctcctctgtccgtgggattttcaggcaagaatactgcagtgggttgccattcctactgcagaggatcgtcctgacccacggatcaaacccgcatctcctgcattggcaggtgggttctttaccactgaggcaccaaggaagccagtaaaaagactacaagtaaactaacaagaaaacagtttgtatcccctgctactcaaaagtgtgctctaggaaccagcagcatcagttatcaccttggaactcagaaatgcaaagatttttggcttcacaaagacttactgaattggaatctgcaatttaacaaaatcctaaggtgactctatgcagaagcacaccagtttgaaaatccctgatttttatcactaattctctatcctatctattcattagaatcacattatagaactttttttaaaaaaaaagttcatcactccagactaatttagtatgttaggattggggcattaatatttttaaaaagcatcccaggtaattacaatgggcagacatgggtgagaatcaaatacttaataaatggtaaggaatacaagaaatgaagtaacgctcaactgaagttgattcagagtcagatgataggaaggtattatgagaaacttagttcagaggtctcctggggatctgactggtggtcattatgtatactggtacctttttcaccatctaggattaattcttaagtttaattaccattatagttttggggctataaatcacccttttaacaactgaacgtccctaaaattaagtatcagcatttggttacttcatattaaaacagtaaaattttcatcttcaaaataaaattaggtatcataaaaactgtgactttagtaacaacttattttaagcagaattctgaactataaaatgtctaataaacagtacgaagccctataaatgtcaaattatcattggtctgaacaaaaagataaaggtttatattttctgcatttactgaagttcaagaaatgctgaatcctgttattaaactgctcaaatcttcaccctataccatttctatacccctggc

SEQ ID NO: 35576 - DNA, 1624 bp, Bovine  19866880709707
  misc_feature (1)..(1): n is a, c, g, or t
ntgtttaagttagcttacccaattttaaagaaaaaccgtgaaagtatatcttttagccacacaaaaggcagtcaaatttaatttaaaaacattaaaaagaccattttttcaaaagtatcaacaacaacaaactataatattaccacaaaatcaattctttaaagaatatttttatatatatttctaggtcaattatttgtttcaggttaattatttcattaaacgtaaaatacatttgcaaggtacatgtaattcaattagcaaactactaatacgttttttcacagtatcacttaattgctttttttaggagacaaaataattgaatggattataatctcttaacaattagtgttttaaaagttttgcaaacggaattaataattctaaaacatacattggaatgtgaaatgtgatttttattcatcctcagtaaagtagttgcttatattaacatctgggcattggtaataagaattattatattcatcagatttcaaaagagagaaaacaaactagcaaatatttaatattttatttgcccagaaattttaaaaaacactttaattttgatagtaagtgttatataaacacagataagcagataagtttctttgcctcaaactattatgtactgtcatctagaattggtttagtcagaaatactttttttaaaatttcctaaaatctggcaagatcttccaaacacagaaattttaaaaatctattcaagttcaaaacacttaaaatactttggaatggccaaattacacaaaaaattgttttggttaagattcactggagttaaattactactataataaagcaaaattacccaaataacaaattaataagataactaggaaatgcctagcaattgaaaccataaaaatataaaatttagagttcaatattattgaaggaatgagttacattttagaaggcattcttaactggtagctaaagaaaaacagggtggaacaaaattcctgtggttaagggtatatacaaatgcaaataccatttatttttcctctgctttaaacattcagtataatagtttttatcaatgatcaaataaatatatgtatttcaaagaaatattttctctatgttcacttataagaaaagtttcacatttaagtagactttttactgtttaatactttaagtggctttcgatattttacttttttcataaagcttaaagagggcttaaaagggctttttttcaaaatgcttaatgcttaaagcatttataatgctttaaaataaatactaaatgagcatttttgaaaataagaatgaaatacggagttagactttaaaacaccatgccactcaaggggaaaatatactaaggcaaaatattataaaacaaattattagttaaagcctgttcttatgctacagaatgttttatggcttaaatcactttggaaaggttttttttttttaatgcatattttgtatgctgataaaataataaatagagtgaaaaactattaggcattttttagattcataaatatcaagttcatgactacaaagtacttgctagctaaggaccaaaaaaatatataaagcagccaagttataataaattttaccaaaatttcacaga

SEQ ID NO: 35577 - DNA, 1582 bp, Bovine  19866880765262
  misc_feature (1)..(1): n is a, c, g, or t
natggactgcgtcacgccgggcttccctgtctatcaccaactcccggagtttactcaaactcacgtccatagagtcggtgatgctgcccaaccatctcatcctctgtcgtccccttctcctaccttcagtttttcccagcatcagggtcttttttccagtgagtcagttcttcgcatcaggtagcctcagtattggaatctgattgtttgctgtatgcttttctatctaggatgtgaaagggcaaagcattatctaggccatttgcaacattaggtctgtaatattgcttttcaaagttttcatactcaaagtttctgaaaaaccacctgtataaagatatgcttatgtaaatgggatgattgacacgcaaggtctgcttacctacttgggaataaacaagatttttgccaaaaattcttcagagtggtttcctagaatgtatttgacatctgaatcaaacttcagttccaagattccttttggatatcttcttgcaaagattgaactataggggagaagcctcataagcttttgggcaagattttcaactgcagtagtgggaacttatcaccttagttcattaaacaaactagatagtacttgaggttccccctaaacttgaagacacttttaataactttgctttgagaacttctctctttgttgagaacttcacttcttcaactcaagaaaatgaagacttttaagcctaataaatagggatgttgataattgtcactggaagtttcaggtcagatgctcagatatgtctgccacatatatcaagctctattaaaaattgtaatgtttattgttgttaaatatatgtaacataaagtttctcattagtactatttagcatattcacagtgttatgtaaacgtcacctctacccagttctgaagcattttcatcaccccaaggaaacccactaagcaatcagtcctcttactgctctctggtagccattaatctttctctcaccatggatttgactgttctggatatttcataaaagtgaaagcatttgataaatggttttttgtgtctgacttctctcacctagcataatgttttcaaaggttcatccacgttgtagcatatattaatgcattattttattttatggcagaattttaaaattataattttttaaaatgtatgcagtttttttcctatcctctaaaaataaagcagcaaatccatctcgcatacttctttttgacaattaatggatctccacatggaacaaaactttattttgatgtttaaatctttatacagtatatcaaataatctgatgtttaacatacttgccacatgatattcttgccttgatataatcaaagttaaggtcttatacaccatggatcactgttttggaggccagggattagcaggaagtgacaggtgtatccaaaaccaaaattctcatggtaaactcagcttcactggactagaatgccatcactgtacacttaagtcattttgttctcgtttgcttattagaattctgatgtcagttttagtgaactctcagattattttcttctgtgtgtggagtcccacataacaaaagag

SEQ ID NO: 35578 - DNA, 670 bp, Bovine  19866880770478
  misc_feature (1)..(1): n is a, c, g, or t
nctgggtcaagatcccctgggtggaatctgtacatcccagtgtgcctagcacctggaatagtgatctctacacacagtaaatatttaaacaaacaaataaacctcccaaattgccttcattgtatataaattcttttctttttcagatcttccatctaataaatttgggcttcagagagaaaactaaaaattaatgtatcttcaaactgttcagtgaaactatgagacaaaaaaggattcaatttattttacgagcaatatttcataaacacatatcttttaaataacaaggctaatattctatttctatagaatcatacggttttgtctaagaaaaatactaaaagccaacctatattctacagaatgtaatcacatttccaaaaagtttaaattcataccttagtttctgaatgtaaatgaactgtcccttcagataatggacgtctacagataaaaaataaacatcatatattaatagtagacggtactaaactgagacagaataaaattcaacagcaattatatctgaaaggaaaatatataaaactatcaagtagactttgctataattctaattatacacatgttaacttactttgagtgagtgtcacaaacaagaaaagtgctttggtcaaataattcatctttgggaagaaacactaaagtg

SEQ ID NO: 35579 - DNA, 1410 bp, Bovine  19866880849457
  misc_feature (1)..(1): n is a, c, g, or t
naaatagttattgtttcttcaactgcagtgaaaaccatttactataaagctcatgactttagagtttactttaaccataagcctaggattttcattttgctttaaaattagagactgaccagtagtaaatcatctggctcttaaatattttgagtagttgtttgacatgctacctgccctgagttgtctgtcttccatacctacaccaaaaatttagagttcttttggcttgtctatattgaggccagctgtgatggtgcatcctagcactgtttctggttccagaaagaaggcagttccttgctctcctctataatctaaaactgatgtaattgtcttcccctgtgttcagaaagcaagttaagcagtttcaagcccctcaactttacggccttatttaacttaggtaatggatatatgtgtgtataaataattgaccaatttgctctccccagtgagaggtgtcttgaatgatgtaatgtgcagaactgatttggtttctgtctcactattagtttttggtattattgagggaaatgaacttcacagtggtaggaaagacagaagtatggcttgttgttgttaaagatgttttgaagaagaacttaggttaaatcactttttatattagaaaaatgttatacactaaaattatacaaatgaaaataattaaaatgagcattgtcgttcacttaaatttgaacaagaacagtgtgttaagtgctcacctgaagtacctgctgtgtataaagtagtgtgctggagactggcatttgaggaatgcccattcacttgtaatattaaccttgtaatgttaacctaagcaataatgtgtactaaaacctctcttttattcagttcaaggccagggaatgaggtgacaagtgctaaagcatgggaaaagtagaccccttagtttctttgtggataaaatgcaaaatttatactagatgaccttgcaagttcctttagcttaaatttctatgactctgtttcaaaattaatattgacagcgatagaaagtataccataagtacagagaaagactaacatttaactaatcagcagtcagcagaacattttcattggacgaattactaggtcttgctggtgtttccttgggtgctagcccatgaggactacctgaaggtgtaattcacttgttacctgtgcaagacttctcttacatgagattcagtctgcaaatatttattgagtatatattacatttaatgtattctaagagctgttgttgattatgcagaaatatgtaagactatgtagtactccctgttgttggggagtttactagttgttggttaagagattgtactagttggttgtttgtgtgactgttttatttataaagaggtgctcaaacttataagcacctcataggaactttttttc

SEQ ID NO: 35580 - DNA, 761 bp, Bovine  19866880953589
  misc_feature (1)..(1): n is a, c, g, or t
ntatccctctatcccctcatatccaaatacttcaagacagagctcaagtgacaccttctctgtaaaaccaccaagtcccccaggagaccatcactccctcacctgagaccccctcatgcttcttaccttcctcttgggttccctcccttggtgattagggcatgcatcctattttccatgcctcagtgaaaggtccaggagagccaggcccctctcttgagaacctctgtctcctgcacagggcatggcacagtgccttgaaagtttccttagacacctgtggagtaaatacagcatcaattctctggatccatttcccattctaagagagaagctatatcagctttcctagactctactattttgatgcccaaatttaaagtattacttattgcatgcctgaaattgcaggcacatttggagggcaggggtcaagacaatactacacatgaaagaattataaacagaataaaatgttaattgtaagcaagggaaaacaacaaaggaatgcatggagggaggagataaacttggtcaagagatgccatggaaggttaagaggaagagaatttccttgaacttgcctttgaatctccatataaagagactccttaggtcttgggcattttaagcctgaaacaaaggctgagtcagggacactagagggagccaaggcctgcagactggagagaaagcttccagggtgttagccttgggttcacagattctacaacatttgcttagtagattgagaaggctat

SEQ ID NO: 35581 - DNA, 1603 bp, Bovine  19866881172371
  misc_feature (1)..(1): n is a, c, g, or t
nactgtgaagaaagctgagtgccgaagaatcgatgcttttgaactgtggtgttggagaagtctcttgagagtcccttggactgcaaggagatccaaccagcccatcctaaaggagatgagtccaggtgttcattggaaggaatgatgctaaagctgaaactccaatactttggccacctcatacgaagagttgactcattggaaaagaccctgatgctgggagggattgggggcaggaggaggagaaggggatgacagaggatgagatggctggatggcatcaccgacttgatggacatgagtttgtgtgcactccgggagttggtgatggacagggaggcctgtcgtgctctggtccgtggggtcacaaagagtcagacacaactgagcgactgaactgaactgaccaggacaagctcaaaatgaccaagtgattgacagtcatagcttcagggatagtgaaacctattactgtctcctcaaggaagtatccccataccccataatgggaactaggactttgaatacagcagagcctaaattgtgggagctgctgctaagtcacttcagtcgtgtctgactctgtgcgaccccatagacggcagcccaccaggctcccccgtccctgggcttctccaggcaagaacactggagtgggttgccatttccttctccaatgcatgaaagtgaaaagtgaaagtgaagtcgctcagttgtgtccgactctcagcgaccccatggactgcagcctaccaggctcctccgtccatgggattttccaggcaagagtcgtggagtggggtgccattgccttctcatagtgcaattacaagttctaaggattaggacttgctatgttcaggtagccattactcagtttaatatattggggtttcaaatttctcaggctcttccaaccaaatgtccccttctaacgttcacagaattgagtccagtattttctccattaagtcctaactgttgaaaacatgaccaacctgttgagactctgttcagtttcctgtgtggcgctgccactcttgccattgaagcttggacttattttcatcacaaccttccttaaagctgcaggagatactctttaaacactgccatggaagatttctgacttttgccattctgtaacactgctccttctcctccttccctcaataacattgacattacctccatataaacccaagaagacaagctggaaaacaattagaagttcaacattttatttaaaaagtgaagactatgctgtaggtaatgcatggtggtgtgcgtgtttatgtgcaagtgtatgtaattttatcttctctctcttcatgccacatttctaaggcaaagaagttatttctgagttacacatggcctggaatgtctaaaccattgggaaaattctcattttcttaccaaatatagattaacattccactttagttattaagagatagtgaatgataacatgaatggcttgaggggtttgcaaggaaccacttataaattgagctaaaggtcttatctacctgcacgaacttgtttatctttcaataaagatagagaagagattcgagtgcagataaatatttacaagcaa

SEQ ID NO: 35582 - DNA, 2521 bp, Bovine  19866881189751
  misc_feature (1)..(1): n is a, c, g, or t
ngtctcccacactgcaggtagattctttaccagctgagccaccagggaagcccaggcagtcactcctaatttcccctcaacttcctcaatctcagacaacctctaatacattttctgtctctacagatttgcctactatagacatttaacataaggggaatcctacaatatgtggtctttaaatatttttgaggttcacctatgttgtagcatgtgtcactacatcattcctttttataattgaataatatttcattgtatgtatatatcccattcatttgtccattttgtttgtccattcatttgttgatggacctacaggctgtttctacttttttactaaatgaataatgatgctatgagcattcatctacatttttttgtttgaacatctgtggtaagtagattttaaaataaaaactgtgtcaagttacatcaactaggtaagtatttttataggcatataaaatgctataagcattttataaatagaaagtatcttcacatttttatgtacatgttttgtgtcttctttgtttctctatatagttatttcttatcaacaaatataaaaacaaattatagatacacaaccatggagagggggaattcaagcagtaaaaaaagatacatagaacatcaaattataaatctttcatctttgtcccaccctcagagaaaatactgtgaacagtttcttaggtcctgccagaagtattttttcaaatacctgtatatgagagagttgttctgcttttacacaaataggtgaatcatacatacaacgttctgcacatttgttccttcatttagtatattttgaaactaacactctatcaatacataaacatctgtctctttttaaacagctgatgaggatttcattatatggctataccatactatgaaagtgaaagtgaaagtcgctcagtcatgtctgactctttgcgaccccatggactatacagtccatggaattctccaggccagaatactggagtgggtagctgtccccttctccaggggatcttcccaacccagggcttgaacccaggtctcttgtactgcaggtggatgctttatcatctgagccaccagggaagccccaacctatacttagtgcttagtcaccccatcctttttcctagctaacagaattctaattttattgaaatattggatggcaatgcatgtcagggataccagcagctactccccccacctcacctcctatgagcttacttctgattcctctaagcttcccagtaattccactctctttatccatgactgggttagaaatatacacacaacataattctggcccaagagatatgaaagtctcgcagggaaacttttgaaaaagggttcttcactttttaaaggagactgatagggtctacctctggacatcatcattggaggctatgtcgtttggaactgctgcaggcttcttgtgaccaaggacagaaagccaagagaatcccagagaagctgggcttcacatgaccccgttcagctgctgcagtcactacctctcttctatgcctgcttcttgtgaggagaaataataaatgtaactgtcatttaagccaattttagctgttacagtgactctgttactggaagctgaaagcatcctaaatgatacactacagaagggcctactttaaatactttacatgtagggactccccctaaattctctaatatcccctgatattcactcacgagcacccgtgttttctcttcagaaggttcagcacattggtaatacttttgagaaactagttcatagggctccacagtagatagtaagcctggttgagggtagggactgtgagtgagtgagtattaagttgctcagtcgtgtctgactctttccaaccccatggactatagcctgccaggctcctctgtccatgggattctccaggcaagaatactggagttggttgccaggataaatttatggataaaaatacataggaaaaaataccagactatcacacaattagtggtggctttatggaaattaaattacagctgacttttatttttttataaaaatatctaaggtatacatgttgcttctgtaacatagtactaatatatgcatgaacatatacacattatgtacatataacaagatgtgtgtgaataccaaagatacaaactgatcaccatgggtgtacagggaatgagtggtcctttttcagaggctcctatgctatgctgatgcacagcatatgagtatatggttccctaatgtgtcagactgttttccctcctgataatttgcctctcctggtctcacgtgagcaactctaagtgcagattttactatactttgtgattgaacattaacttcaatttggagttgtcctgtctgttaatttaccagtaacatttctggttcaatagtaaagaattagcctgcccatgtaggagatataggttcaatccctggttcaggaagattccgtggagaaggaaatggcagcccactccagtactcttg

SEQ ID NO: 35583 - DNA, 4765 bp, Bovine  19866880490444
  misc_feature (1)..(1): n is a, c, g, or t
natggccctcagctttgtttcctggagtggggacgccatcaaacagtgagcatctgggtcggtccagaggcttaggctgagccacccaactcactataaactgggcagacctgggcaggtgattcagcaacttttcctggatgagtgaaaggctacagagaagaatcctcaccctctggacaattaaaaggaaaacttgcagaagtctttaagggatcagccttgaattttcctccccataccagcctcaaagagtaggaacatggaccaagctaaagacgtgggaatatttactgggggtgatgggatgtactccccccaccacagacatgcacaaactcacaatcagatacacaggcatcactttggtcttcttcaattatccatcatcatctgacatccatgaaataagcttaaccatttcagaaactgtattttcagcttgtcccacctctaggggctagatgatccctaagtttacaagattctgtatgaagtcacctgttctctcaatcttaaactagcccccataaaatcttcaaagggaactatttggaaacaagcagatataaagagaacacagggtgggtacatttggactcagaagtaggcaacaagcccaccagaagtgaagtctgaaatccctgcaggttgagggttaagggttgagtggagagtttagcacaggcaaatcagaggagttttgtgtttctggagagcaaggctgggacagccatcctgccttgtcctcccattgctcctcaagggcatcctggaggaggctacacctcctaagctgctagaacacagggtggctctggcagctagggccaggaagagcattctagacagagagctggaggtggaaggaggaagatggaatcctagaacaggaggggcattgccacaggcaggatgggtatttctcggctcttccactctgccggcctcatccttgcagcagcaagacctgggatcatgatgaccccttggcccacaaaggaagcccacctgcagaaccagttctggaccaccacagcggtggcccccggctactccctcccatgcacagggacacaaccctccttgtctctgggccactcctttccaaaccaccacccagtgccgtggtgctcctgctctcccagcagctgccggtgtgaccttgtgaacctggggtcccaccagacaccttggcctgggggccagattgttctcgagtttgtcccccagaccacacccagggactgtggccggtgggggcaaggcttgtgcacagacctgtataaaaatacagattctcgcagacagttccagagctcaggaaagaccaaaggagaaagagagctcagagctggacagatggagatagttatactgttcacccactggggactggggggattaaagagaggatgcccttttagagcttagcacaggggctagcttgtaaataagtgcctagtgaatggcagccagtagcttggagccctggaggagtcacctggcttcagtcatgtgaccaactgaggcgggatttctgtacttaacagagctcagctacttcttgtttgttttctgctactgggggctgtcaaaggtgggctttctactaagggaaggaagctcggtctctggggagcatgtaaaaggagaaatgaaaaatggaaaatgatttagtgagtacttcgtatgttccgggcttcctgggtggtcagttgtaaagaatctgcctgctgatgcaggagatacaggagacgcaggtttgatccctgggtgggtaagatcctctggaggaggaaatggcaactcactccagtattcttgcctggaaaatcccagggacagaggaggctggtgggctacagtccattgtgtctcagagaatcgatcacgagcacccaagcatcatgcatgtgccaggacaaagtcctcaatgcttttagcatcaccttttttcttgcatgtattatttttgcctttttggggtattgtaattatgaaaaatttttcaaatatacatagaagtatagagattagcctatgaatgccattatgcccatcacccagttttaacaattactggaattttaccatctgtgttcatttccacctctcacttagcccttgccatcaagaaacagcccttgagctgtttctggcttgtaagccccactcgcaaccccactggatcataagctcctaaaaggcagaaaccatggacttgggatcctgtcatatctgagtcttaggtcagttcctggtcagctccctgaccagggatcgaactcggggccccctgcattgggagcgcagagtcttagccactggatcaccaggaagtccccattcccccaactttaagcacactgctctttatccttatcacctccttgttaagtcaggatacttgctccaagtgaactgtaagtcagaaaggttacatggtgtgccaggtccccacccaccaggaatcaaccaagccctgccagtgtgtgccttgcccacgtgctctcctgatgccaggctgggggtgggatggcctgggaaataagggcagaatctggttgatgtccccccggccccgacacgtgcgtgtactggccctggttcgctctggcaggcaccatgagggttacctgatagctgtttataaagcccagaatctgcttagtgaacagcactatggtgtccagagcatcctaaggctcagatacgacaggatcctgagtccatggtttctgcctttcaggagcttatgatccagtgtggtttacaaaccagaaacagctcaagggtgatggcaagggctaagtgagaggtggaaacaaacacactgggaggtgcagaggagggactaggggagtggggaaagctgctggggaaagagacgcagggctggtgtggcaggagagcacaggctgggtggccaaagacatgagctggaatcctagttcttctacttaccagctatgaaacatcaggctctcaagcctcagtttacctcatgggtaaaatggacacaattatgcctcttcagggcacgtgaaaggctgagctgtgaatgataagcgtcactgcttgtttccttctcctgtgttccagtgggggtggggtagcaagccctggagtgaggcagagggctgatggcagtgcaaggtcgcacccttggcctcaattccctctgcttcctggggcaggaatcagcagtcagtgatgctgctgccattgcctccagtcttagactctgctctctcttccaagtccgtgtctctcttctgagtcaggaccctcccatctgggagctggaggaggttctggactgtcattctggagctgatgctgacccgaccccctcctttcctccctagacaattaaaaagcctccacatcggtccccaccagccgggtcgcacgggaaggctgccgcagtcgtcacagacagctgtgtgcagaggcagagtgggtgtctgctcggggggctgagtgtacgcgtgcgtgagacaccagggaggtcattatagccttgtcttggatgcagacaactaaccgtaagaggcattctcgcactaatgtgctcacagaggatgctgaaattagacttgaaagataaagagctgagactaggattgccccctccccagcagccctgcagccttcggagtgatcagcctccattgttagggctgggaaagaaggtggcacttagccatctatgtcacaagtgatctctattcgggacccttgggtcaaccagctcccagtcctggcatccgatcagaccagaattacttggcaggatggcaggagggactgagatgcggcctcgccccgactggaaacacacaatctcatcttgccagttggagtggttctaacctgattagctacagaacgcgatgtgtgtattcccctctctctattataaaaaataaagtaggggtggaataaataagcttttgataaaagtatggctatgtgcctgggttttgtattcttttggttgaagccagaacacatctgtgttcatggacacacacgtgcgcgcgcgtgcacacacacacacagagcaggaaacagatctcatctcagttcttatgtgacacgtctcagtgagttgcagctcccgggccgcactgtgcagggggaaatggagggtggagaagacccggaaacagacacagaggaggaggcaggggctggcctgcttgcggaggccaggaaggggcgcaggcaggcgtgggggagaggtctgtgtaagaggaaatgaacgttggtttgggggatgagatgtgatcagattcaagaggtattttgaaggcagaatgaggaaggttttctcatctcatgggtgagatgggccaaggattaatgttcaagtttttgggaaagtgtatgaacagaccagaacccagaggctggctttgagccctaaccatggcacttgtcctgaaggattcggagggaatcattccaataaatttaagcctgtctgtaaagtaagagcagctgccttgcattgcctttcggtgggaaagccatatcttaatgtgagatctcaaagtagtctacatgtgaaatggtcatttccattgccacttttccctcctcgtttttctctaattgtatttcattttctcccatttctgtcacggatctgtttttgagcatctgctgtatacagtgacatgggcctgtactcacgctcaaggtctggatgctctaagaccggacggtctcagaggtttccagaccctcacacgga

SEQ ID NO: 35584 - DNA, 1981 bp, Bovine  19866880515137
  misc_feature (1)..(1): n is a, c, g, or t
natttgcataaagtttgaaaacatgcagaacagtatcctgtgttgtttctggctacatgcatatgtagcaaaagtaccaaaacactcaggagaatgataaacaccatatttagggcagcgcttacctctgacgaaggaggcaatgggctcacggagagaaacataactgctttcagaatgtcttcgttcttaaaatgtttcttctaaaacagaaacacaagaaaatatagtcaaagtaagcttggatattttcatattatttttttcctttttctataggcatgatatatttcattagagaagtacccatttcaacatcataggcaaaatgccaggagagggatgaggttacatacaggctgggtgcctctgtgatagtctaggtctgggggattgggagcagagagcagaggttggtggtgaaagtgaggtttgggggctgatcctgggtgggcctgagttggtgggattggggaggagcgagtacacagcccgcacctcagctatgccctctgcgacctagttcctgccacctctgcctgggccaccttggccaggcttggtgctcagcagctattaaataacaacaatgaaacggtgtaaatataagaggaggagagatgtgtctgcctcgggatcccactgtaatccgtttcccgatttaatgagagtctggagacccagcatgaggccactaaaagttaagaatgccgggagtattcatagggctgtgagacccccttgctctctgaagctgggaaccaaggagcatcctggcagtcttccctctgtccttctgtcctgaggggcagttgatcaatgtcagaggccagctgggtagggacaagtgagttgcgggtggaggagggaagtgctcaaataattacccattttgagaagtttactcccaattccagctcaaattacagagaaggctgggagcccaggtcatgtcaacagggaaacccgagaaagaaaagtgatctcccggtgctcctgaggcctggagaacacagggtgtgctggggagagagcaggcagggatcaccagatgctgccttctagaacacttagttctattccagtttgcctgaaaacaatgatttcccctgtcctgcctttcctctgcttccccgaccctcttacgtacccaggttcccaggtggcacatgcggatggtagaactgacatgtcagggctggaaggggccttggaagccccggaacccagcccctgctcattatatagatgcccttggtagccttgaaggagctggggcccagtcctcaagaagcatcccactgcaggatgagggcagatgtcatcctcaacaaggtggctctggggtgagattccccaaggtctggaagggttgcgagacggtctagcgtgtgtgtgtatcagggtgtgtgcgcaggacagcgtctgtaccttgtttatcataagcaggcagataacagacgtgttcctgaaaagtgaagtctcaattctcatctgaatacggaggagtgctctttttaggaaaaaccttgaggtgatgttggcaagcaagggaagagttgggcaggctctgctgataggaggagacaccgggacagcctttctgggaagcaatttggcagtaggtagctgaagccgtaaatgtccatatcctttgggctctatccttgaaaagtaaccaaagatggccatgaagatttctgttaactgctgtgttatttacaaaagtgaaaaaaaaaaatcctatatatccagtgataggagaatgattaaataatcatacaataatagaattgaaatattctaatacattttcaattacatgaaaaaagatcataatatgatcttaagttgcaaacacattatatatgtatggcaggatcccaattggttaaaaaatacacacacacacacacattcatacttatattttagacggatattttgacctacttcaaagctgttagtgattgctatggtt

SEQ ID NO: 35585 - DNA, 658 bp, Bovine  19866880621306
  misc_feature (1)..(1): n is a, c, g, or t
ntggaggtgagcacagataagcgtagactatggctcccaagggtttctagctccagccagggctccagagatgcttatccttcactgcacattcacgcgtacgtgctcacacccaaaaaactccctccagaccgctttccttccttaaattgagcccatttagaaagttttctttcctctccccactgaagacatccatcactttccccagcagaggcgagacggccacgactccttccccgggtttattaaatccgttcaagagcctatttgtagctgtcacagggaagccgagggggaggctgggagctctctcagccgtgcagccggcatcacaacctctgggccggggatcaccctacatatgtttctccgtaacaggcagagctagaggggcaccgcaaggtctaatgtgcttgacgctggggattacggtgggggggagggggttaaggaaactcagctagggctggctggtcaaggatggagcccaccccgcaggtcacccatctcctaggcactggaccccacctcgaacggcacagtgaagagcaaatacactgccaccctgtcccagaccccaagcagccacctcggtgtcacagacgggagctgggagccctaggtgtggggaccatcatgcccccatgcgggctgt

SEQ ID NO: 35586 - DNA, 1591 bp, Bovine  19866880676469
  misc_feature (1)..(1): n is a, c, g, or t
natgagtttgataagaaattgtcttgttaacaggattagccacggaaatctctcgtcccctcccattcattctgtaatgctcctgtctcatgtcctgtaattttctgctggtatcagaggccccggaccacctcaggaatattcatttctacttgttctttgatcgtgtgactgctgatatgccaggacaccccccacagccgctgggcctccaaggccttgtgaaattacaccgaggccctcactggctcactccctccagagccagcggctttcagattttctgctgctgtgacccaccccctcccaccccaactccttcccacatcagctgccagatctggggtcgggattacctttagcttaaagaccaaggaggcagatgtttctgaagctttgttttagttgccaagtcgtgtcctacttttttgcaaccttgtggactatagcctgccaggctcctctgtccatgggatttctcaggcaagaatacgggattccattcccttctccaggggatcttcctgacctagagatcgaacccagtctcctgcattggcaggcgggttctttaccactgagccaacagcccatgctggagcttacctggcagaagagtgcgagatgagtgccccagcccactgccttctttctacccctcccccacacgcatccctcagaagatcctagaaaaggagaatacagaagtgttcagtacagtggatgacagtatcaagctttgaacctgggttcacctcctgggtctgtggcacaatttccccagcctctctgagcctcagttttctcatctgtacattgggaatgacgatgcttgtctgtaacacacggagtatagtacctgatacacagtaggaactcaattcatgctcttctccttctctgctctttcaagacaggaatgctactgagggtggggcatacttgggattgaccaagaaattattgtttcggctttgactcacatccccagactctttcctagtaccaattccttctgacctttgtcctcccaaatttctttctctttacacactttcagggacatgtgcagaggaatcttgatggccccttcaacattaattaaaagaaagtgcagcatgtatggagaaggtgatggcaccctactccagtactcttgcctggcaaatcccatggacagaggagcctggtaggctgcagtccatggggttgctaagagttggacacaactgagcgacttcactttcacttttcactttcatgcattggagaaggaaatggcaacccactccagtgttcttgcctggagaatcccagggacgggggagcctggtgggctgccgtctatggggtcgcacagagtcggacacgactgaagcaacttagcagcagcagcagcagcatataaggtgaatccgaaggaaagatagcgggagaagaaaggaattgcctgtcctgtgcccctaaaccatgggttgagagcaaagcagagggtcaggctaggcagaaagcccgcctctgcatcagtaagcgattttcatggagaggcagatgcacaggggggcggtgccaggaggatgtaacctaccca

SEQ ID NO: 35587 - DNA, 2832 bp, Bovine  19866880742281
  misc_feature (1)..(1): n is a, c, g, or t
nttttcacttcacttcactgccacaggctgggctcaactcttgatcaggagtaggataagagcccacaagttgagtggccaaaacaaaaagcaaaacacaaaaaaacaggacagttttcatgcagttactcactaggcctagtcccacttatgtaattatacagaaatggggctggagcacatatattatttcaaatgagtgaacttcctacttggccttaggaatcttttgtttgatgtagattgaaaaaaaaaaaattattttttattagagcacctattctagatccacattcatcttcagtttccatcttcagctctggagattctcacatactcctatgctctggcctagtcccttgttattaaaagtgtggttagtgcatcagcagcaagggcttcaactggaagcctgtagaaatgcagactcttaggccttagcttgacttattgtatctaagtgatttgcatgcatatcaaagtctgcgaagcagagttctagccacattgaacttcttaaaattctctaaaggagtcatgaagcctttgtacatgctggtcttcccaaatgggaaagaccctcttccccatatgctaggaaaattggcttcttatttagtctccttatttaattagttagtgagggaaccagcaagatggtaagtcgagttcaagaaggatacaggagactggtaaacacatagtctatggaaaaaagattgctggaataagattgaaaattaaatacaacactgctttttattgacacattgtgcttagtcactcagtcatgtccagctctttgtgaccccatggactgtagcccaccaggctcctctggtaatggggattctccagacaagaatactggaatgagttgtcatgccctcctccaggggattttcccaatccagggatcaaacacaggtcttctgcattgcagacagattctttaccatctgagtcaccaaggaagcccaagaatactggagtggatagcctatcccttctccaggtgatcttcctgacccaggagttgaacaagggtctcccgcattgccggcagattctttaccagctgagctaccagggaagccctattgacactactattactactacctgttgacacattagcataaaacagtaacatttagcataatcttttctacctgacaaagtcatttatagctgatcttctacaagatctaattttacagactctaggctctactgggtaaataataagccatataagatgacagcccctagaatttgatgatccccttcaggtttcttagagaatgctctagtatgactttacaaaagcagatagtaatattttgctttatttccaaatttgggataatttttcttaaaagtttaaatttgatggtgctggagaaaactcttaagttccttggatgcaaggagatcaaacttgtcaatcctaaaggaaatcaacagtgaatattcattggaaggactgatgccgaagctgaagctccagtactttggccacttgacgcaaagagctgacttattaaacaagagcctgatgctgggaaagattgagggcaggagaagggggcgaccgaagatgaaatggttggatggcatcaccaactcaatggacatgagtttgagcaaactctaggagatagtggaggacagggaagcctggcgtgctgcagtccacggggtctcaaagagtcggacatgacatgagcagctgaaaaacaaggacacctgacttctgcttctggccaagatggagtaatggagaccagatttcctatcccacctgaaacaaccaaaaaattcagacagaaggaaaaaaaacagtggttttcaagaaagaaccatatgaaaggattagagggagctgtgtctgatgctcacacagggctgggaatactgcctgttcccaccagccagactggaaaagtcgtaattcacagggaagtggggagagcacttaggaaggtcttgtctcagaggtggggaagagttagtcctagacagtattgctaaaaacccacctaataaatcttcaagcaagacccaaaaacatcagttggttcccaagtaatttaactgcttcccagaagaaagttcaagaagatttataagaatacaaaaatatccccaaatcacaatgtctggcatccactaaaaattaccaggcatacaaggaagccagaaaacataagccataaagaaaagaataatcaatcaatggcaactgacccagaactgacacagatgttagaattagcagagaaggattctaaaacagcttttataactctattccacattttcaaaatgctagagacatgaagatcggagaaggcaatggcacccctctccagtactcttgcctggaaaatcccatggacggaggagcctggtaggctgcagtccatggcgtcactaggagtcggacatgactgagtgacttcaatttcacttttcactttcatgcattggagaaggaaatggcaacccactccagtgttcttgcctggagaatcccagggacgggggagcttggtgggctgccatctatggggtcgcacaaagttggacaggactgaagcgacttagcagcagcagcagagatgtgaagatagacaaaagacccaaattaacttttaagagttgaaaattgcaatgtctgaggttaaaaaatacatcgagagtgatttgtggcagattagacaaggcagaagaaatgttcgtgaacatgaaggcatagcaataaaaactatccaaaatgaaacaggagaaaaagtgtttttaaaaatggaagaacaccagtcagctgta

SEQ ID NO: 35588 - DNA, 873 bp, Bovine  19866880751720
  misc_feature (1)..(1): n is a, c, g, or t
ncagccatctctccttcccagacgctggattctgacctgagagactttgtttactcacccctggtggcaaatattgacactgaaagcaactctgcttctgtggttgctagttttctggtcccaggaaaccttggttcccaagtgacaactacattttaggcccattagcgagcctaccaccaaaacacaaaatataaatctctcttctactcctgaccttttccaatccctggaaatcaaggtttcttcttcggtcgccagccttactccacccagaatcttctctctctaaaggcagctgagtggaagtggaagccaacctgttaccctaggagatggtaggtgccctgaaggtagtaaatttactggatggtctataggcctggcctggaatctatacctagaggcagcccaataaatgatgggggtagagagaaatgatgacaatgacaatgatgataacaacagctgttaccactacccccgccccatcccttccccgcgtcatagaacatgtcaggtgctggttcagttcagtagctcggtcattttggactctgtgactgcacggactgcagcaggtcaggcttcccctgtgctaaattcttcacttgtattacctgggttaattcttacaagaattattatgcccatttatagatgaggaaactaagctttaggaggttaaacaacttgtctaggatcacacagcagacctcaagcttcttgctcctcactcctacaaagaaagaaaaaatgaggaagagggagaaaaaagaaaggatagaaaaaggaagtgacagagggagtaagtggggaggaagggaggaaggatttctaaataggctgacctgaagcaaaccagagaagacg

SEQ ID NO: 35589 - DNA, 1847 bp, Bovine  19866880858712
  misc_feature (1)..(1): n is a, c, g, or t
ncctggcttcttcgagcgcacagattaccaggtctggagtctggcccccatctctgctcacttggtagcagttgcatccatgttatcattctcaacagttctgaagaactctcgtctctctgtttcattcatcccactcatccaagcaggttttgtgatactcatggagaagcagaccctcacagtatgtagatatgttagaacttgaaccccagtctacaggacagaaggggaaccctgctatcacaaaaaagggcacagaggacctgaatggtaataaaatattaataatgtggaccaaaaaaaaatgttgcctgccgtttcagtaaagaatgctgccctccatcaaaccagcagccactgctcacgacagtgcaccctgagggaattcagggtagagaaaaacagcgtattggccctagatagctaagatgcatatcgaaggaatgatttcaataagcccagaatcttgcatcttcccatacatagaaaggcactaagatccttaacttgggatggctggtttttatgattaagcagtgatctttccacgtttagctacttttttttttttccagtagaaactcctatatatcctggtttctctcttacctctttgcaacagttctcagagctacttgagaggccatctcccagactacagtcctcagtaatttttcattgttgttcagttgccaagttgtgtctgactcttcgtgaccccatggattgcagcatgccaggcttccctgtccttcactatctcctggagcttgctcaaattcatatccattgagtcagtgatgccatccaacaatctcatcctctgtctcccccttctcctcctaccctcaatctttcccagcatcagggtcttttccaatgagtcagctcttcggatcaggtggtccaaggattggaggttcaactttagcatcagtccttccaatgaatattcacagttgatttcctttaggattgactggtttgatcttgctgtccaagggactctcaagagtcttctgaagcaccacagttcaaaagcatcaattctttggtgttcaaccttctttacggtccaactctcacatctgtacattactagaaaaaccatagctttgactatatggacctttgttggcaaaatgatgggtttttaatagtcctcaataatacccccaaataaaacataatcctcaacttttaggttgtatgttttttttcagttgacaataacataatatatacatgtaaatttttcagtatttttatgtccatagtctcactttgaccctgtgagggaacaggaaagatactgatggacccattgtgcagttgaggaaaccaaagctcccgagactacacaggagcccagcttaccccatggctaggaaagacttcattttacagagacagaaactgacaaagatgctagggtctggcccagatcacacagctggagggaacacaaggggtgtcctgagcctttttcagttccagcaggcactggctgggaggcaggaaccccctctgcacctctggacggcgcagagggccaactgcccggcagcccctaccaccgtgagtccttcaggacacctgatcgcagcatcacctgctctgccatcactgccttggccggtgccccgctattgtgcaaccaggcacggggctggggctggctccataaaatcaacagccagttggcttgatctggctgattctgcccccctggagttcaaccgtgacagcaatgaatcaggctaatggtgagaggtggccgttcttcctctctgtggcctggagacaggtatttccaaggctcctccccggctcaggcaaacaca

SEQ ID NO: 35590 - DNA, 2122 bp, Bovine  19866880905824
  misc_feature (1)..(1): n is a, c, g, or t
nattccttcctctctccgcaccctctgcccctcggactgcctcccagctcaagcctgctgaccgtggggactctgtgttcttcagctgccatgccatcaactcatatggggaggaccggggcctgatccagctcacggtacaaggtacctcacctgctccacgtccccagccccttcctctgggccctggtgctcactgccaactcccctcaagagtgggggacactccacacccaggggcagtgacaggaaacagctctggggaaaagcctcagtccactctccctcctgcccagagtggtgccatagggtccttccaggacactgcagacagtgaggtctgtgatggcagaaagccctgtggagcacactgctgcccccagaagtgggagacctggatttgtgggcccagaccttgggggaggtgtgcggagggaaagtcaagatggaaaacctgggagctctgcatggtgggaagcaggccatcagctgtgaggggtccctccaaaaggggctgaggaagagaggggaacagagcagggacccagcacgcccacttctgcctctgagcctttagatctaagtttctcctccatccctatgctgccttgcccaaactccagggctcaggaccctcagatagaccgttgtgtctccaatcctcccagcacagatcccttgatctctgcagagggtcggcaggaggctaagctctctgctgccatcctcacccctgcccccttcccttgccactccccagagccccctgaccccccagagctggaaatccgagaggtgaaggcccggagcatgaacctgcgctggacccagagattcgatgggaacagcatcatcacgggctttgacattgagtacaagaacaaaacaggtaggtgagggctcggcccaccatagcgccttgcaccacctgcctggacggtgtccctccagtgtgacggcccctggctgtcagggctgcccatctcagacagacacacaagcccttgtgttttccaaaggaagggacattggtcaggttaggaaaccagggggcaggtagaaggacctctacagttgatagggaggaaatgtcagtccgtccttcccaggactgaccctgggcagatccatagggtggtctgatttaaagcaacttaaaagtcactgagccaggagctactggctgtatatgtggggtcagagacatcacagtttcactgggtcatctaggcactccaggtttgggatgatggggttgcttgggagtcagagaagctggtctttcccaagaatgagtcactggggaggtaggagtccctggaaagtttagatctaagtttcttcttagaagccctctaaaacccctcccttgggactctattaatagcttctaagagattgccttccactgtgaagccgcttagagcaaagtgaacaatggactcctgtgtctctggggaaaccagggacccacaatcaagtggcaggaatggcaaggaggggacagatgacctgaacaagaggtcaagccaagaaagagccataggtgatcacgtttgtatctgcgtgactatttctaaaaggtacaggcgacaggggggctgccccggagaggcccctgggtgacttcagtgcaggtgagagaaggagaaacatacctctcctctagggtcctttcatactttcagaattcaagaccataagcccatataagcctttcaaagtaattttaaggtaaaatacagaaagcaaatctggaaaactgaagcctccccaaccgtccttctcccaccaactccaactcatcttccaggactcagcatagatccaaggttttgtttcctcagaagccttccagacccttcctctcttccttagcacagcacagtcattggctgactgactatccgctcccccaaagggttagccccaggatagcatccacagctgtgtttacctcttgagaagccgccctgtccagggcactgggtgcatcattcttgaggctggtttctacaggaaggaaccctgccctcagaagcttacagtctaattggggagaaaagtcagctcagagccagacctcccgaggtcactgtcagtgcagaaggagagccataga

SEQ ID NO: 35591 - DNA, 1625 bp, Bovine  19866880938614
  misc_feature (1)..(1): n is a, c, g, or t
nttacctatgaaagactgtggggagaggagggatgagaggctggtacatggtccatgttcccgggattctcaggggaccagacttgagtgagcatgcgtgtgggactcttatttcatgagctgcctagacgtcccttcagaatcctagctggcctcatgctgtgccaagagttggagaaagaggttaataccatgttgtaggctctctttgttagaggcactgtgattgcagtcccttcgttgctggttccttttccctatgcagagttgtccctttcacaggaaaacaggtctggaaaccccaagagaggacctcagatcctcagaatacctccaggcctccggttacaaaaccatggggtttttccatcgctccagcatttctccctgcattgctgtactttgcagaggccctgccacgtttcttcctttctccaccaagggccttggttttcctttcctttcctttccacttgaccagattgctcgctgagtgcccctccagcacgatgacccatcggtgggatataggaaatggttctagttggcttgagttctgcaggttagttgaagaagacagacttctgttcatgacacctgtaaagccggagttccaaatcttgctatacagctgaagtccaggggagctctttgaagaaacaccagtgcctgggccccatcccagatcagaatctctaggggcagaacctggacatgaacagttttaaacctcctccttatagggtggctccaagatggagctgggagaccagtgcttcagcatcttgacagccaaggtggtgtgatacttttttgagacattaatttttgttttgcctttggaactttttcctgctctcggtcccacgccgatggccaggccattatatctcctggtctcagatcttgtacaggaatgagaaactacttgatacctgctcttcctgccttttgtaaaaccataagcaaacagcaaagatgaggatgggtgttctggctggggaggagagcctccgaagagggcagtgaacaagcaggagacaaacagatgccagaggcagggtggtgctgcgggctgctcagtgggtatggctggaggaagtggtcggacttcacagggtctgctgtgggtagctccatggggtctgggactgaggatagggttcttatattcaaatgaagcataaagtacacagcctttgacccagagtgatgatgcaggtagggacaacaggctggtgagcaccagaaagaccctggaccttggtgcctcctgggggaagccccagtaaggatggagattgaatgtcctgtctctccagcagtcacatggaaagatgatttaaagaatgtggtattttctcatagacctgaatttatagaccaataattatattcattaaaataataataaaaatttttgagtgtttactatatgcccagcactgggctaagaaacttttacatatgacctcattttatcctcacaaaaaatctgtaagtgtatttttttcccttcacttttctgaagaggaaactgaggatccaagaagtaaagagactttgggtcacacatcttatgcagagggcagggctgaacctagggctgttttttttagcctgtg

SEQ ID NO: 35592 - DNA, 1283 bp, Bovine  19866880962769
  misc_feature (1)..(1): n is a, c, g, or t
nccatcgtgctcacgctgacttctcctggccctaggcagcagagtaataatacatgaatgctgaatgataaatagcaccgtccacacaaatctatcagacagcgctgcgcagatttaaaaatgctgacaccacatttcgcccctgttttccaagcaaggagcagggatgggttctttgaggatggcccagaaggcagcctcatggtgggagccatcagccatcgtgggctgagccagagggtctggtgttgggacgtggtgagtggtcgcggtgatccaggaaaccccttctcggtgcagtggagatcattgtggtgggctcagagccatgatgcaaggaggaaatcagagatgcaggatggacttgtttccccagcacaggcagctgaatgctccagatgtggcttttgtccaaatgctcccccttctacagtgaatatgtctcctgaaataccaaagcccccaggtcccctcccagcaagcagcccactaagtagaagacactgacatctccccagccgcttccttattttttaagaagaatattttgcatcataaaccctttgatgaagaaagggagtgagagcccttaatgaaatatgttaatctggataagccaggctcatatgaaagggaatattaaaagagacaatattcaccaaagccagctcagtactctgagagctgaaaaggaaaggggagaaaatagggccactgatttcagctattcaggtcagagagatggcagtgatcaagtttggaaaatcagcgagagacctccaaatttgactctgatgcatgagcctgcaggggctgtggggagagagctgttttgtgccaacatcaaaggtgatttgggaacacaaggacaaatccacctgcaaatgactggcaatagcagaaaaaagggggccactctctgggatcccccagtcttcctatgattggcagctagggaggaggcaagcaagggaaaagcaaagggtatttactatgactgcagaatgtggaggaaccacaggtccaacatccaggaccacaaagtgggcctctgatctaaaaccaagagtgggttttaaatgcccagcgtgtgccaagtgggtgagatgggcaaagttgtagatatggttcctgccttcaaggagcttctctgtgtataaatggaaatagaatccaggggtgggaaaaatgtatggagtgagaggagagcctaagatggagccttgaagaacttgaaccataacgtaagaaagacgtacctgcaaagtgaagagataacccaa

SEQ ID NO: 35593 - DNA, 1362 bp, Bovine  19866881002924
  misc_feature (1)..(1): n is a, c, g, or t
ntggagagggttaaaggcagggtgggcctcccaggctggtgtgttgggtgcagggacaagggacagaagtgcagtgattccagaagtcctaaagttgtctgagggacctctcctctcctgccccagggttatttgagagcctctttccttcttttccttcccttcagtttggcacaggggcggggacacacatggctggcagccatcagataagagcatcagttacagactccccccggggctggcttggtcttccacattctgttacgttcagcggaggtggactccctgggctgtggtgcccactggtgaacccccaggagctcacgcccggactgcatcaccttcttccctgagcacttacccagaatcaggaacatgccagccagagcccaggaaccaagctggaaagacctctattcacccaaattttcagggaaggagactggtttcccttcccagccaccagcccaaactctcgaggctcattgagtcaggagggcctcccacttgtgtgacccgaggttcctctggccgggcagcagggtcctgcctgcacatgcgtgttgtcctgtacctccctaaccaggccctttggctctcccctccgcagtgcccagccagccccctgagaacgtccggggccctgtccatcacttccgacgtggccgtcatctcctggtcggagcccccgcgcagcaccctcaacggcgtcctcaaaggctatcgggtcatcttctggtccctctacgttgacgggggtgagtctgctgggggtggtggccggctcgcggggtgagaggccaggggttgctggaggcccacacttagagctgagcatcttcccgtgggatgtcgagcggaagtccagcctctcccctgcacccgttattcccatgccagagccaggggccatagtgagaggtggtgtgcacggtcacctttctgctggggacagacaccagctgccctgttcagctgtatgttgggcagtggcttaaggggtgagatggacacactggcttttctgatggaatgtgttggtatgaggactttgtggccatgtcagtcaggaaacaggtggtatactcaaacgggacaattgagactttaatgaaggctctgcgttcagaggagtgtggcgggaagttggggtcccagggactagcaccagcaggaagctgtcaccgcctaggactgaggggcaagaggaggaagcagggtcccttggccagatggatggcgagacctgtattctgtgcagctgagctacccaggacctggagacgagcggggaagggtgcacagtggagctgcgggtaggaacagcatagggaggagagccaagacagtggcccagcc

SEQ ID NO: 35594 - DNA, 1266 bp, Bovine  19866881031828
  misc_feature (1)..(1): n is a, c, g, or t
ntcccagcatcccccaggacccagtgggcatcccagctcccccagagtttgccctccactcctcagtctggccgggtgtcttacctagccatgcacgccgtcatgagcgcctgcctctgtaatgaggagtgatgtataattgatgaaagcacaatgtgatacagtcacagaaacctcgtctgctagaagacatctgttcagcacgtagaatccactcagctactgtcacaatgcatttactgtatcgtatccgagcggcaggaatatgcgagcgccatgcaagccgcgatcggtaatattatatgtctggggacgtgcagaggtaggaacccacgcttctgtttttgatatttatgtgtctgggctgcgctccttctccttcccctgctctgcctgcattgcttcagcgtcctcctcataaattacctctgctttctgacgggctttcagtggattctggtgctggcgtctaacttctctccttcaggttcctgtgtcactgaagcctcggggagccctgctcactgcacattctggaaagagggaggcgcgcttgccagggaggcggctccgggaatttcttctttccctaggactctgcctcctggtgtagcctgttcctggggtccacctccattctgaacgctcctaatcagagactacgggctcttaggtctttgacctcggttccaagtgggtttctctaggtttggacagaggggaggcaggcctgggtcaagggggcatcccacaaggacctggcaggagaggccacagcttgggggttgggccacaggccccggctcagataccctgggccaggttgggcccaggctcctgatctgagctggtcctctccaccaggggggcaggaggaggacccctgggccagggtgggaactgcgctgattgtgagggccggggcctcagacaccagtcatcaggggcccagcatacccaaccaggttctccacagctctgggctgctggttttgccatctcacattctctcctaagccttagcctatcatccctctgctccctaactcacagtgtacctcctcctggacgccgagtcagctgagaacaccagccagcctggatggagccatggttccatggctcctggagtgaagtcgtccggcaggcacacccagagctcacactatcatcattcagggtgggtgggtgggtgggtgggtgtgtgtgtcctgccatgcatgtccagggtctttcattttcctgaaagccccctgagagctgggc

SEQ ID NO: 35595 - DNA, 2896 bp, Bovine  19866881062011
  misc_feature (1)..(1): n is a, c, g, or t
ntgatgtgcgcggccagggtgccccaccccccaccatcacctgggccctggacgacgagcccatcgtgagggacgggagccaccgcaccaaccagtacaccatgtccgatggcaccaccatcagccacatgaacgtcacggggccccagatccgtgacgggggcgtgtaccggtgtacggcacggaactcggtgggcagtgctgaatatcaggcgcgaataaacgtaagaggtgcctgtctacatttaaatatcagaataggcttttaagttcctttgccatctctgtggttaccattattcttgtggtgattagtacttattattaatcgtcattttgattttagtagaggtctctctcctgtccccctctccctgccccctgcaaatcccatcatccattcttgtgtgtgtgtgtgtgtgtctggtacagttcaccctctttgcattcccattctcctcctccctgcacccctcccacaatcctgccccctaccccgtccctccccatcaatctctctggctccaggtacattgagcactccactggcatctgcgtcccacccaggccttgcaaggacaggcacagggcagggggcagtggtccaggcatgccctttggtagagatgtccaccaaagctttatccccatgtgcccccacagagccacccctgagatgctccaggagctgtgagcagccaggagccagggaaccatcttctctcaatccaccatctcctggctagcctctaagaccccagccatgaagactagggggttctggctgggtgagggtgccccaaggcaggcacctccatgagtggaggaaggagtcctcatagtgaccttccccatgcctcaggtctccaacttgctttggtgagaatagaggctcctctgaagcactctgtagccaagtggggtcagactagtcctcatctgaccctaccagtgagccctgacccaagagcagaagaggctcaggggagtgggagggccctggtccggggccgctggtggctgccatggaaacagggaaggggagaggcgaggtcatgctgaattcatctgtgccaggtctctgacccccacatgagaaacgtggtctccctttgaccaccctcctgccctctctgaattggaagaggacagagctgcccagtcatgggagatgccttggcccagcccctcatctgctgggtgaggggggagctggaagcccagagtttcatatacctgctccagcactaaccctgcttggtagcctctgagcctcctttgcaattcccatgtaaccatctgcccactaacgcagcctacgaccctccccacttccgccagggtaatcagagcccctctttgtagccccttcccaggggcgcagagaacacatttattgttgaaagaagagcatccaaggaagaccttcctattgtcctttaagtagttaatatacgtgagatcgtttttggtctaagaccattgtgagcaaatcgaatgaaagtaacagcatctcgacatttccattttaacccccagatcttaatctcctcctaaatgaggacttaccctcccagatccccatcacttcttggtgaggcatcggtttgctcatctagcccatcccagtaggggaatggattctcgccccagggcatgaatgaaccgtctctgtttgcaactgtttgaagctagtaacagtgaatcctggagagaccccgggtgcccccagttccagcctctgcttcgtaaaaaaaaaaaaaaaggtctccctttccccctgccgaatttccatcccctaagagtttctgaggccaaacgactgagaagagcatcccagggcgacgcctggctgtccctggctaaccgcaccatcacccatcctctcctcctccctcccgactcctgcccaggcccccccagcatccgggcgatgaggaacatcacggccgtggctgggcgggacacccttgtcaactgcagggtcatcggctacccctactactccatcaagtggtataaagacgccctcctgctgcccgacaaccaccggcaggtggtgttcgagaacgggaccctcaagctgacggatgtgcagaagggcatggacgagggagagtacctgtgcagtgtcctcatccagccgcagctctccatcagccagagcgtccacgtggccgtcaaaggtaggctccccccgctgccaccctgaaccggagcacccccctggtcacccaggactgcaggctcctctccgcagccgctcaactggcagcaggcagtcctgagtggaaagccaagaagagaaggctctggcctggagtttggaaaaagtggggcagggagattgcacaggggcagggggcacaagaaggccatgggtacctctatgtccagttccggctgtgggctgcaggtcaaggcagcgctggccccaggggcatgaggggtcagtgacacacaagaggagtcaggtcacctggtcagaggtgatcggctatattgttcccctgtgtcagcatggagccacccagaactcagcagggcccatcagagaccagcaggcactcgaggggcaggactcagaatggaagcagcaggagggagggttggaaggcgcaggcactgggtgccctgactcccttccggggttcagacaggcgaggctgcttttccataattgacaaggacctttcaactgctaagggcttcactggtgactcatatggtaaagaatctgcctgcagtgcaggagacacaagttcaatctctgggtcagagatccccaggagaaggaaatggcaacccactccaatattgtttttggaaatcccatggacagaggagcctggggggcctagaagtccgtgaggtcactaggagtcagacacaactg

SEQ ID NO: 35596 - DNA, 1654 bp, Bovine  19866881072630
  misc_feature (1)..(1): n is a, c, g, or t
nacttgtcgcccatgtcagcctcatctctccactatattgtatcctccttgagggcagggactgttaaataggcagcttttcatcattttctcccccttgccctgaatgcacaaaacatacaagattaaatacattgtgtgtatatgtgtgtgtctgtgtgtgtgtacacacacaagcacgcacaacagggtgggccaggctatggatcttcaaagttatattggctcaaacacagtagaggtttatgtccaacgtgatggcctggtctgtaggtgactctaggcacccaggccctctcccatcttatggttcccccacccctagggtctcacgttggctgcatcccaccacagaaggggaactagaacttggatatccactgctttggagaagtcttggtcccagaacagctcagagagggctgggaagtgagttctatctaatgcccaggaagcagggaggatgctactgagggtttacccataccttccccaccagggctcgggtcgctggaccctgcctcttcccctgatgaagcttggattccattatctcatttgcctgagctcctggtgcccagctgaagatcatttgactcgggagctgggtcctgcccaaggctggcattaatcctcagagcttagcctctcccctcagctgccacatgtggaaatctggccttgcagctggcgtggagccaggctggcggggagcagacctaatcccactttgagcttttcagggagcaaggccccagcctcagcaccagcttccagctgccttggccgggggcatccctgtattttagctgaacctccccacccccaacacatgcagggttgtgggcctcagtggtccctggggtcggtaggcagagtcagcaaagaactccaccatctgccactgggcactagaacagcatttccacagtgtgatagtcagggaaattgtaattggtctcacacacacagtgaacccattctttacacaggacttctcagagcctttaattgctcagtcaccaaaaatataatgagcacctgccaagtgccgggtatgcgactagctactgggaatgggtggtaaataagacagacaagttttgggctctcacggggcttgtattctagtggaaggagatagaagataagcaaatgagagctttaaatagtggcaagtgctacgaagcaggtaaaccagtaaaggctagaaactgattgatgtgttagtatgtgttgtgaatccccaggggcaggcaggaccaaattttctatgaccagttctcaagaccaggattccttggaaaggtcttgaggaaacaagcactagaatgatctttctaaaactcagattaaacatgtcagtctttagcgttaagccccctgagttcccccatcatctccaaaacagctttcaaggtcttctcttggctggcccccaccattcgagctcatttgtcttcttccctctctaaaggttgctggtttgacatgctccctcacattcccaagtttgcccagggtggtctcacttctcagaaagtcctctccactttctttgtctttgcaaacacatccttcagggctctaacagaaggtaagcaatctgctgtaataaacagctccaagatctcaatgacttagtaccttacaa

SEQ ID NO: 35597 - DNA, 1626 bp, Bovine  19866881076826
  misc_feature (1)..(1): n is a, c, g, or t
ntggtgggtgatgaagtagctggtgtgtgtgtgtgttttaccaatgccagttgaagcagctatatgaagacgctgggaggtgaaccctttccaattcaggttaatcatggatattttggggggtattattttgccatgttatattaggactagagccatcatgagaaaccacagatgtttttattgtttaactcaaacaacagcttatatactttggatacttttcttcaaaaacaaagacatataattattttagtagagccttcctatgtgctctgaaattctttaacaactcagtatgatcatggttttcataaaaggaatcaatactgaaccaggtcagtggtacaaacttgacatttggggttatatagctaattcaggattgaccttcttagtacttattcattggttggaggagaaaaaaataaggatttccttggctttttttttttcttttttctccaatctgtaattgattttaatgttatatgaagagttctgggttctagtcttatttttgccactatagtcagctgtgatcttggacaagtcattatttttctggggcttcagtttcttcacctctgcacgttctctaatgtaggcagagacagaaatatgtattttcacacagatactcagaagtaaactgcacaaaggaaaccatttttgctgcaaatgcatgcacgtgtatctagaatacttctgtcttcttgagacaagcttgttattatagtgcagttgctaagtctgtccaactcctttcaactccatgaacgccaggcttccctgtccttcaccatctcccagagtttgctcgaactcatgtcattgactcgatgatgccatccaaccatctcatcctctgtctcccccttctctttttgccctcaatctttcccagcatcagggtcttgaaaaaggtgaatcattgcaattcatagactatgctgctgctgcagctgctaagtcacttctctgtgcgaccccatagacagcctcctaacaggctcccccgtccctgggattctccaggcaaaaacactggagtgggttgccatttctttctgtaatgcatgaaagtgaaaattgaaagtgaagtcgctatgatgcctatacaaaaaggcagtgctgctgctgctgctgctaagtcgcttcagtcgtgtctgactctgtgcgaccccatagacggcagcccgccaggctcccccatccctgggattctccaggcaagaacactggagtgggttgccatttccttctccaatgcatgaaagtgaaaagtgaaagtgaagtcgctcagttgtgcccaactcttagcgaccccatggactgcagcccaccaggcttctccgtccatgagattttccaggcaagagtactggagtggggtgccattgtactgtcattaaattacctgggcgtttcttaaaccgaagttctgtatgcttaacgctgaggatgtctaggtacattttgtcacttaccctctccacatcttggattctagtatcatgatcctaagctctctgaacaaagggccccaatctttgaggctcctcccccacagatggcacctcccccacagatggcacctctgggggcccacagaccttgtacagg

SEQ ID NO: 35598 - DNA, 1631 bp, Bovine  19866881080451
  misc_feature (1)..(1): n is a, c, g, or t
ntgcccctaccggccgcatccgatcctgcccaacagctcgctgctgatccgccacgtcctggaagaggacatcggctactacctctgccaggccagcaacggcgtgggcaccgacattagcaagtccatgttcctcaccgtgaagagtgagtttcgcccccatgagcccctcccagcactccctgatcgcaggccaagacccatctctgcactcaccctgcctccccacctggtttcccttgctccttctcggagagggaggcaggaaggattcctaggcagaggtgggcttaggaactctgaggagggattcaaaatcactctcatctgagacaatggcctcactgtgaatggccccagctcactctgctcttatcatgataaataggtgaagtcactaagtcatgtctgactctttgtgaccccaagaactgtagcccaccaggctcctctgtccatggaatttcccaggcatgaatagtgaagtgggctgccatgtccttctccaggggatcttcccaacctagggatcaaattcgggtctcctgcattgcaggcagactctctactgactgagccagtagggaagcatttactataccaaagtatcatgtgacagcctatttattttgctctgtaggttggcaattccatctgaatagtcatatcgaacaattttttcttctgttatttaatgtatgcctgcttgtgtataacctgttagtggcttagaaaagaagagatcatatacacagtataggagaaaggcctgtgggatctgggttctgattccaggtccaccttttgatcttcctggctttgggcaagtgacttcacatctttaggttcctttactcacctgtgctaggttcgttcccagcccactaggctcacaaaatcattgtgcttagcccaggaaatgatcgtggaaaagggaagacaattcagaaagggcaaaagagcaatacaactcaccttagctcggtgccatacctctggcttctaaatccccagacctagagtcggaatcaatcgccttgaagtctggaatagccttgagttctgttaagtcacccacagacattcctactgggcaaacctatcccttcatgctgttaggggtctatgtagtaggcccctaagagtcatgtcaggacagtgtctgaaacagaccacaggccacagagaagagcagttaaaccctgagttttagcatctgaccaagccagctgtgactctgggcataatcactgtgacctctctgggttttcctggcctctgtatctcatgttcctgctgtacaaaaatgagagtcatgagagcaccttacctgttatgttttatatcaaaagcaagtcagatggcgtgtgtaacgcaaccagtatggtacctggcacccagtaggccatcggagagtcagccaccagttttggttttaatgggagaccctccagggtacatgtaggaaaggctgatgagagcagtgcccagagtgcggtctgcatctccctggaggccccgcctttaagagtcatagtttctttatcgtttgccgaacccgtgttcagctcagcacaagacggggaaaccccggccatcgatcgatgctcagggagctccaggcgccggaa

SEQ ID NO: 35599 - DNA, 1805 bp, Bovine  19866881295975
  misc_feature (1)..(1): n is a, c, g, or t
ntggagggaataaaaagtgaatgagagagtttggtcttaaatgataaggttaaggcacatagaacatacctaagataatggtgacatgcatcacaactgctgtcttcatttcctttctgaaaggtaaacaaaggtccctgaagacctaggggccagaaaggttccctctgctaaagcaggtctagcatcacaggcttgatcaggccatcagccctagtttgacacttccattgttaaatccagatgtctctctggggcccagggcccccatggtctggcccgtaccattctctgaccccatcttgtgccacagttctcctgattcattgagcgatagccacacctatctcttagtttctcagtcaaaccagggtgtttcatcaaccccagggcctttgcatagactgttctgcctggaaagcccttcccctacacacttccccattggctccatctcatctctgtctgtcttgggcactggtatttccccatggcaccaagaatgtcctttaaaaagttgttgaatgagcaagcaagccaacatagacagcttggactggaagaagctacatcaaccctggcctgcctccatctctcatcctcacccagctcaggcagatggagaccctaaagttctcccaggaccagatgccgcagccaaccacgtgcagcagggttttctcagaacctgcccaggggtcctgcccagtcatatgcccacccaggccagaactgccagggccattgaggctacccttcattgaagaggcttgctttgagggctgctgtccctagtggggaaccctctggctctctccttttatggggaatctttgccgatggattggctgtaattgtcggatttgcatttgggacacctgcagccagaggccctgggggcacctaggcctttggaaatcaataggaataaacaaataaatatattcatagactgggacctggagaggaggggtggctggaaaggaggagaggaaacaaatcaaagtccctggcttaccatctgcagcaaggggaccccactccccacccccatccctaccgcccccaccagacccaacgcggagctccgttctcaagtacccgccttctatccccacagtgaaactgagactgtaatttcagtgctaacctgaatgggtttgtttccttttattaactccagcgttggggttttaggcaagttggctattgttcgagccacactcctctcctctctactccccacacttggaagcagtaggaacagccagaaggagatggcattaagctgcagaagtggctggtgtgagcccaggttgccctgcagtcagatggaagccagtagcagagcaatggaggggcggccagggagagccagctctttctgcttagaagccagtgttgttcagggtccagcccaggtgccttcctgggtgcacctgctggggccccacatttagaaggggacttggccagccttgtaaggacccactggactccagcatcatgaggcaggaaacaacagcacactgtgctctacggcttacaagaagcctttacacacccgtgtgtgtgagccagctcctgctgagagcttgcccagactccgagacatccagctgctgggggctgggctggggggctggggggatgcgctttggcatgaactggccccatgggatttgtaggctgtaaagcaccctgcggagaggtgccagcctttcctcctgtggcctgtgagctcccaggaggacagctgtcttatcatcagtgtgctcctgcttccatttccggcctgtcataga

SEQ ID NO: 35600 - DNA, 1106 bp, Bovine  19866881365446
  misc_feature (1)..(1): n is a, c, g, or t
nactttgcatttcatcagcataaacttcctatcgtgtttcttggatttcagacctcagactaacttagatgtcatgactaagagcctggactctgaggtcagtcttcctgttcacattccagcccctgcttcccagatgcaaatccttgagcaacacactgaccatctcagggttattttcctcatctgtaaaatggggatgatgataccaagatagtgttggtgtccttcatgtccttcaagcactcaattcttgtcagcttttattattctggcttgctttgatttttcctctctcttgccctcaaaagctgatcagttgccaacttccaagcacacctcagctagcctggaggggctcctcacatggctatgtatctccagcaccggggccagattccttgaagaacagctagggctcctgacacgagaccccacttgtgccctgcacggaccctcttccacacacttcttcctttctttgaccatttagtcctctctccttggttccaggcttacgtctcccaggtctcctgctcccagacaggacctggctgcctacccagcctggcatccccccaggccacctccttgcagaggttctcctagcctgctcacctggccttcccaggatgcacatacctccacaaagcctcgcccatccatccatctccctttcttttcttccgctttctgagtttaggtctggtgtgtcttcaccatgcctagctaggtcactacttggtttcccaggcagtgcctctgcctcttcccttcggtcgcatatacctgtgtgtgtggctatcacatcattcctgctcctgctccatctgctaaagtccctccaggtccctccagagtggccccagcctggccctgagcatggcaaacccacatggaacatgcactttccagactcagatggaaattagaaatggcagattgatcagtgctaatgaggcttaaaaaaaaaacaaacaaaaaaaatagacctagagattaaaaaaaaaaaagatgaagaagaatcagctctacttcaagtgtaaatctgctccacagagaggaggtctaggggttttcactgatataggtcatactctggaagt

SEQ ID NO: 35601 - DNA, 1222 bp, Bovine  19866880406795
  misc_feature (1)..(1): n is a, c, g, or t
nctgctcaattcaaaagcatcaattcttccgtgctcagccttctttatcgaccaaagttctcttaccttctgtttttttcttggggtggggtggggaggaggggtgaaaaatgagaaagtagtagcacctacttcacagagttattgaggagatgaaatgagacatttactgatccaggtgaccaaatgcctttccattcattatgcatttaatttttacaatttctaggagagtaactaagaacatccaatctaagagataacattccttaggctgatgaatttcctctggttattagccacaggaaacaccagacccaaccaagtcttgtgattccaagccttacccattctctttccactacactgtgctgctacttaatgagatccccaactctctgtgtctttgccttgcctttaacaggatccgcattgagggaactacacatgcaaattattattagcatgaagacgggtaattattattttttacatttgcatcatcacagataatctttttgttacacattctttagcagtgaatgcctgaatgagagggctttcggttcattcagatggtcattaattctaaataagaaattcatttactgtcactcatgttgcttaaacaatgcaaagcaaagagtgagtgcagagcaatttcagactgtaaaggctgggacggaagctggaaatcacctagcccaaccttttaatttacatatgagcgaaatgaaggcctgaatagagaaggtcatacaattaattagtggcagagctgggactagcacacaatttctttacctctatgccaaagtcttgccattaaagcatgaatgctgatcatcggaatgctatttggttaggaattccctgattacttaaaacacattgagggcttaggatagagacacttaatgtgctaaaggttccaaaatgaaaatatatgatgaatctttgacaaattccccttgtgttgtattaattttaatcttcattatttctacaaggcacttgtagaggggaaaaataagtatctgtatctactaaatggtctcatttgagttctgccaatgtaaaggtatgaactaaaaacattttacattaaaacagagcaaattgcttatggtaaccattgcataatgaaggaacacaatgaaaaattaagttcaaattacttatcaggtctcttccattttcttaagttttaaagtagaaaatt

SEQ ID NO: 35602 - DNA, 1659 bp, Bovine  19866880446277
  misc_feature (1)..(1): n is a, c, g, or t
nctttgcgaccccatgggactgtagcctaccaagctcctccatccatggaattttccaggcaagagtactggagtgggttgtgcagaagtggttgttaaaaacccagaactctggaccccaccaagacctgctggatcagagtttgtgaaagcggactctggatgatgtaaatattctaatggttcttttttaattttttaaaaaattaattttgttcacttttggctgtgctggatctttattgttgtgtgtgggctttctctagttgcagagaacagtggctgctctttgttgcatacgtgggcttctcattgcagtagcttctcttgttgcagagcatgggcgctgggtgtgcaggtttcagaagttgtggaatgtgggctcagttgccccttgatatgtaggatttttctggaccaggggtcaaacccatgtcccctgtattggcaggtggattctttaccactgagcccaccagggcagtccctctgatgactcttgatgctgccattctctggggaacagggtttcacttctttagtatgtataagggctccctaatatccccttctttggggttcttgaacagatgttccccaaacagcacagaaaataggtaccatctggctctgtgagggtgtccggggttgggctctgcagagatgtcacctccaactgctaactccccgcagccaggggacagaggtacctgccagggagaggagagagccccttgggcccccattctagcattttcatttatcatgcaaatgaacagagtgaaattaggtcatgtcagggctcgcaaatcaaaattgtgtcagagagctcttccatggtcagagtcgggggctggctgtggattcttcagatgcttctaatttggaatttcccagccagtcaagaagctcctcgtgccaggcttcttcagcatgaggggtgtctatggccaaggtctctggatttgcagcagtgatttgcagccaggtctcagcttcaggctctgctgaattcagataaaggaccactaagtgtcctaagagttcagtgaaaaatgctgtgtgtccttggagttagagtcctgcctgaattagatgtaactgatgctgctccaggctaactgcttatcttcacagaacttatcttccagagagcacaatctgggctccactgcttatggataggggtcatggggcaagtcccttggccgtctaagtctgtcttgctgtgcaggtattctcagtatatatcagtatatgctcttgaagaaggcaactcctcatgtttgtcaatggatgatacattagggatatacatgcataggccaactttgacttataatgctccccttattaatttagttacacgttcattcactacacagttacttgcttctggtaggagcgtttgtatggatttgcatctgtccttaaccttgaaactgcaaccacatttctgactccattcctaagtttctgaggcaagacagtcaagccctttgcacccagtcagaatttgctacctgctgctgaaccactgcctgaataaatgaataattcgctatggaagcagttggtctttattcaaaagcaccagcttccttcgatgggttggctttgccagaataaagaaaagttacccctcccaaggggcagagg

SEQ ID NO: 35603 - DNA, 1524 bp, Bovine  19866880563651
  misc_feature (1)..(1): n is a, c, g, or t
ntcctcctctttccctgattgtcccccacccccactagatgaagttgtcctctctttcctttgtgtcaatgactgttcctttcacatatctttattaaagcatttgcaacacagtattgacataatttgattatattctgccttctctgccagactgatctctttgaagatagagaaattttgtttgttcattttagaattcccagtgctcaacttaattcttagtgcatgacaggcatacagtaaaggtttatgaaatgagtgaaagaatgaacagagtttcatattctggcatgctgctgctaagttgcttcagttgtgtccgactctgtgcgaccccatagacggcagcccatcaggctcccccgtccctgggattctccaggcaagaacactggagtgggtcgccacttccctctccagtgcatgaaagtgaaaagtaaaaatgaagtcgctcagtcgtgctggactcttagcgaccccatggactgcagcctaccaggctcctccgtccatgggattttcaggcaagagtactggagtgggttgccattgccttctccaaatgttctggcatctctagccataaaagggacttttcctcccatctcagcagctagctatcgtcctcaactaattatcatcttggtttatggaaagttgtctcattctcccttataactgtactttctaggaaagttaggaatgagccctgtggttataaagcaggaaaggataggaaccacattcactgttagtcgtgagagtctgaagaattgtagttaagagtggacacagtaagcctaacccagaagcaccttaccaaagttttgcaatcattcaggtagctggttcttaggcatctctcttttaagctgcaaaggagattagatatagagggagactcttgcaagaatcggagatgctgccttagcaaagattcaagaaccagcagagttaaaaagattatcttcttcctaaagacactatttcctaaactaatcagtaggattttgtttttcttcttttatgcgtttggagaaataaagaagtcatgtctaccataagcagctataactttttttttaatgcgataaactaaaaatacatacaatgccacataatacacttacatcttaggttgtaattaatgcaaattatgcgagattcatatacaatgtgattagactcctctagcacataatttatggttgaattcacaaagaagctgattaaatgagaaaattgatttctgtcgctatagttttttttctggttatgttttcagtaagaacatgtctgaggacttaaagaaattagattatggagttggagttgtggttcaaagtattcatgtcattctttgaccttcttcttacagatcagctaacctgcaaagccacatgatattttctgacaatctgctgcgggataagtttcagtaaaacaacacaaggctcttgtagcttcaaaataccaacacacggatcattcagcaactcacagaggagatttttttccccc

SEQ ID NO: 35604 - DNA, 1120 bp, Bovine  19866880565444
  misc_feature (1)..(1): n is a, c, g, or t
ntgtaaatagaatccaggactcctgagatcaagtccagcatattttcttctagagctcatcatctctgtgttcttccaggaacaaggagcttcctactcttggaggcacccagttgtgtaatagaacagtttgtcggttggaaacctgcatggtttccaaccatgggacttcatactgtccttgcaaaggttaaaaaaaaaaagtataatcttcttccaaatatctgatgacatacagtaggaaagcttattcttccatgcccgacttccgagttaccacctgtgcattctgtctgccattttacacacagaattagcatagtgggtgctcaatgaaggtctgttgaatgaatgaatgtgaatgtctaggatacagtttctacttttttcactgttctgatccctttgccctaaacacactctcccctggctttattctttcagcatcaaattctgagcaaaagctacagcaagatgatttattaagcacctaatttattctctgccaatgtcttgaaatgtttcagatacttgtggtaagcctaaccatggactttttctgtgtgtttgtgttctgggggtggagtgagtggagcaaaggcggaggggtaaagtagtgaagtaccactagtgggaaacaacaccgccttgtgctctgctgggccacagaatgcagcttcctctttcctgggtagactttctcagctcactcggctttttggatgccctaagaagtcaggctgccttgatcccaccctaccatttgctttattctaattttggaaactaatttattcaactgagaatgacacctaaaaacagaagaagacagcaggctcagacagggtaattaatgccacactgcattaagtttctgcagctgagataaatattcacacatctcctgcttgccggagtttagcttcaaatacccatcacaacagcggtaacgactgcagtcaactctcaattatccccactaatgaaggggagcactggtgtggaaaaccccaagcagcagataatcccaaagtctgacactctgatgcattatacgttttggaaatagctttaccttccttgttacagaatcttaagactgtcaagagctagaggggaa

SEQ ID NO: 35605 - DNA, 3227 bp, Bovine  19866880578256
  misc_feature (1)..(1): n is a, c, g, or t
ngagccttcgtgttgaacccatagtgaggcccaacccatgggtcatcattcttattctcattattatttggggaggcggggaggataatttccttaggacactgactccatgtaccctagccctacaacagtgaaggcagagagtacttcctggcaagcaagagttaacagagggctaaatcccactgctctgaaggccatcaaggccaaatgagagcactgaccttcattcattcaagctttgtacttctgctaagggaccacagtttgcctgatgcatctgctctttctaatttggcctgtttgggtaacaaagctcccagtgatcatctaaacctcatttgatgcacctgtgaacaattcattatattaatataacagcaggggaggagcagaaacactaataaatagacgttagctgccagcaccccttgttgcagccgtggaggacctgcattcttctcctcccgctctctggccctggctacactgggaaggtcctgtataccgcagggacggtggatctcacactcttcagtccctgcatttggccagagctaagcacatcagtgaactgtcttttctcaagctctgtagaatttccaccttatccaattaaaaaaatgtgttctcaggtagaactaaagagcctcttgatgaaagtgaaagtggagagtgaaaaagttggcttaaaatacaacattcagaaaactaaaatcatggcatccggtcccatcacttcatggcaaatagatggggaaacaatggaaacagtgtcagactttattttcctgggctccaaaatcactgcagatggtgactgcagacataaaattaaaagacgcttgctctttggaagaaaagctatgaccaacctagacaacatattgaaaaacagacattactttgccaacaaaggtccgtctagtcaaagctatggcttttccagtagttatgtatggatgtgagcgttggactataaagaaagctgaatgatgaagaattgatgcttttgaactgtggtgttggagaagactcttgagagtcccttgaaatgcaaggagatccagtcagtcaatcctaaaggaaatcagtcctgaatatttattggaaaggactgatgctgaagctgaaacaccaataatttggccacctaatctgaagaattgacttattggaaaagaccctgttgctgggaaagattaaaggtgagagaggatgagatggttggatggcatcactgagtcaatggacatgagtttgagtaaactccaggagttggtgatagacagggaagcctgctgtgtggcagtccatgggattgcaaagagtcagacacgactgagcaactgaactgaactgaactgaagacatggagcatgactgttgctaactgaggttgctttgtttaggctgtgggaactctcctcatggctgaatctctatttatcacagataaataaatctctatttatcagcagatctgttccacagcagcccacagagtgattggtcaatgtctttactttgttgactctcagcacttctgtgctggcctagagagaattttcccttttctatcacttgagaagatatctgtgtatgtttgccaatgctctgttttactgcttcttctaaaacatggcttatttttctttattcccccctcaaacagctcagtcaacttcaaactaaaatacatagttctggaagccaaaatcaacctacagatgttccaatatggcgtacatcacacccctcccccatcctcccccagaatgtgaccctgacttcctctccagcccagtctctcccactttctgtcttgtgtttcatgctctaggaggaaaagggaactggtggcaattcctcatggatattatgctgttacctgcccccatgtgtttgcccaggctgtgtcctctaccacaaatgccctgaactgttcagtgagccttgttacctcttcttcatcctagacattttgctcaagactggattaattatccctgatctgtgttccctgtgcccacctctgtcattacatctatcccctcttattataattacctgttatgtttctatcttttcccaccacctccccaggaatgtgggctccagaaatgtagggactggtcttagtcatgtttatcctcagtagatgaataaagccaggtgtagctttctgctgaggggagatgcaggtagaggagaaaggaatatataaagatggtgagacctgaacttcagtggtgtagatgggaacactggccacaaggccagtgaaagtgaaagttagccactcagtcgtgtcctactctttgtgaccctatggacggtagcccaccaggctcctctttccatgaaagaattctccaggaaagaatactggagtggattgccatttccttctccaggggatcttcccaacccagggattgaacccaggtctcctgcattgcatgcagactctttaccaactaatccaccagggaatccccgaggccagacctcattgccaatgattagctgtgtcagcttagataagtcagttcacccatttaagcctctgtctttcattctataaagaatgttggatgatctttggagctcaaaggattctggtggggtgagggttgtccccaggcaggtgggtaaaacagatgaaactctagtacctcctttcctcagattcagcttaatttgaagaatgagttctaggtcttaaactattggcctgagaaagtagttagcaactactacaacctcccatgatgtttgatatctactaactcacttcctccttacaataataaccctatgagagggtagtactgtttccatattttaaaagaggaactgaagcacaagagaaatcaaataatgtgcaaatggacacacaactcaagagtgatggagttaagatttgaactcagagtaaggggcctttcaggactaatacttggtggttttatattgagctgaggagataaataaaacacataactatgtacataatatagtatttgcaaagcactaagccagtgatgcaaatctaatggctgaaaagcagggtccagaggatggtgtaatcatctggcttggcttattcaggaagggagcttggaggaggtaaaactctagcagaaaccccaagtgagagcgggattcagataaatggacaagtgagggagaactatgctttagaatcgaatctaaagcataaa

SEQ ID NO: 35606 - DNA, 1295 bp, Bovine  19866880603456
  misc_feature (1)..(1): n is a, c, g, or t
nactagaatcagaggcccagagaaaggtaaaacatatgtccaaagtaacccagccaattaaggtgcaaaccagaaatctaagctgttcaatcaaagctgaaacacagggcttgacagcaagagactagtagacaagggctcagcagtggtgtgccacgtaaggggctgcgcccgccctgtgtccagtgaaggtgtgtgttatctccagagattttaaaatactaagaaagcagaatagagtcagtctttttactatatctatatcactgataggccagtgattctgcacaaagacagagctgtaatacttcttcctgccagagcagagtgcgcccaacatcccccttatgctgctgagtttagcaatcattttggactaattaaaaccacttatgtgggcaagatagatatacatctgttcattgggcgtgtcagcctttttcagtgcatgaaagtgaaatcttcagaaacaccctgtgtggcatgctttggtttatctcagtttcccataggtcatggacagcttggcattttgttcccaagtcagtgggccctccagatgactctcactagagggcagtaggctggccaggacccagaggggccagtggggatcagtgtgcccatgtctggaaggctacttttttccatctaagccataacatacatgtctgggtagcctcatccaaatgccttacaaacaaaatcagaagaagcagaaatatgttccaccgtcatgtgtgtatggcttctgaatacctatttctagacccattttctccccagacttctagatgtatagtgccaactgcgtatccccatttgaatgcatactgcacaattcaaatgccaaatgctccaaaattggttattaacgtctcacctttttgtcctggcatggaaagcagtctgtccactctgcccagttgtccagctggcaggagaccgctgtgggggtgaaactctgaacagctcgactgactctcctaaagagacggaagacctcgattcagtttttaatttatcatgatcatttgaatttctgtaattataaatgtgaaaaggtgttttaatatgatggcatcttaataatatgtaaacagatgctgaatttttccccagctttattgaggcataactgataaaaaaaaaattgtatggtatatgtatgatgacgggtgtgatagtttgatatgcatatacattgtgacatgattatcacaatcaagggaaagatatacctcacctcccataattaccttttttccttttttggtgtgctaagacatttcaga

SEQ ID NO: 35607 - DNA, 2354 bp, Bovine  19866880631252
  misc_feature (1)..(1): n is a, c, g, or t
ncatctccaggaggagaaaagtggattttctttttctgaagagggggagaaagtgcctagtgaatagaatatcaaatgcttattgaattttacaggtttttgccctttaggtgctatttctccacctaaaatagatacacaaaagccctgataatacccacaacctccattaactagcaggttgctactaagccttcctgaatcagttcaagaattacatcttctttgagatgctccctagctcccagggaagatgtacaaattctttactgatcttattatattcatccattctattggagaaaataattattgcagtaatttagtgtatttgattcagtatgacaaatgcattattaaacactcaaacttttatttaccaataaatacacacaaaaaatgaacattcatccaactcctgagcctctggattaagcagtgaggagacggagcaatgtttgggctttgcatagtattttcacattttgcatgtttattttgacatgatggcaccatcacagttcagtggattctctgccctttagagcagcacaatctgtcaaggtcatgtataaaaacaggctcttccatcaacaaccgacatgcagactccatgtccacatgggttgcatctgtcccacatctcctgtcccttgccctctaacaactgcaggttaaaggcctccctgtcattagcattggggatccccacctgtctctccatctgggagactctcagcggtggtgacagatcttactgaatcacctcgtcttctttagaaatgttgtaaggccccggggcggctgctaattactagacctgtttctactgtagatgccactctccttccccaggaacagcttatctggagagcagtggggggagctatggagatgggcatctgcatcctggcagcgctcacggaccggctcccaggaggtaggatcagcagctgaggactggcggagggcaaatgtgggtcagcagcagcagctgcagacaagagctgctggctgactcttccatgacagcttttctactcatatatttggaatccaggcacttcctctacattactcactgatgaatgatgcctgcttaggctaaagcatcttgaagccattgaaagtcctgcctctttcccctgcttctttctctagatattgtctgtctcttacaaacaactgtccctcccctcaacatgcaaatacttggcgtgacctctgtgtggcacatcagcttacaagttttctttggtgcatggatgttagaaaagtctttaacccacactacctcttctgcttgcccacctcccttagagatgctgaaaaagccaaacacatgctttcttggcttcccttctggctggaagtggtgatatgaatgcattctggcacataaagaataaacagggatggaggtctcttgctttttgagagttcttcctggggaatttctggggttttttgtctgttttgttttaaatctatgataaaagaaaggagacaaataatgaaagctctactgtagcatcctggctgtcatggcttctttgtgttttcagtgatgtcatatgaagggatgtggtacttggtttctatggtagctattctgggaccataaagcattaatctaagtatgacacacagtagaaagaacttcagcacctgatcacatccttgaactactacactgatcttgggaccacctacctctgaatctctgctatatgagataacaaaatgactttcttcctgatcacttgcaaccagggtttcattttgctctcactaacagtttcacattccactccaagtttctcatgctaacacgtcttaaactttacaaagtcagagagaagtgaatgaaggcacagatctcccccataaaaacatgcatactcacaagttttgcctacaatttcaggagcatcacagaccccctacaagcccacccatggataatgcattacttttgtgctcatagaaaaaacctgtctatagattatgtacatacacacacaggattatataatcaatattgatatatacagagccccaagcactccaagacattttaaatttctttgtcttacaagatacatcatcatcttcatcatttgctgaatgcctactatgttgatggtacctaagcaactttctaagtactctctatataatctcatttgatctctaagccctgtgaggtaggtattactattagctccaccttagtggagaggaactaagacttagagagactaagtaaactgctccaagtcacaggatgagcaaacaggtaaagttaaaatctaaacccagggagtgtgactacacattccttcttttaacat

SEQ ID NO: 35608 - DNA, 1515 bp, Bovine  19866880632725
  misc_feature (1)..(1): n is a, c, g, or t
ngaagacagagttacattaaacaatttttaaaacatttaattttaattttgttatgaagtatttaaggagtttttccattaaaattgcaaaaaaaaatcttgattttttttttttttcattttaggcaattgcagctaggaaagcaagcatttgccaggctcattatttacttatcagacacagtcttttaatcatactttatatactcttataaagcatgcagagtatatttatgttgtctttggaagaatgaggttttgaggggagacgttactgtcatttcatgaaagcaaactgcacaagagaagactaattattcatgtaacttactcattgatacattttttaaatgtttatacagattgcagtgataaacttaagtcttctttggtgaccagtgtctgatcttaagttaacagaattctgtgagagaaaatataaaacagttatcattgcatatataggagcttgggctacatagcaaatgctgtaaacattggatagtgatttttattgaaatggattatactgttttaattggaattgtagagatatactgtattacctgaggcttaggtttgagtttggtaatgtgccatcagggcaattttaacactgtagaaaggtgagagacaaaagggacagcattctaggcataggttttctggataaaggtcgtctcagccccatgagccaccaggttatttgaatgaaagtagtagttatgcaggataatgtgatatagcatgaataccatgaaagagattgctatagaactagttaggtactttactatttcaaatattctttaaaataggtctgttgggcataaacattctattttttatacattgtcttgtcttttaattgctttatgtaagaagatttagcctatacactaatacactatatagtattgcttttcttaaagtttatggtcatctactttgatgtttctatcaaaaatcaaccacagaaagttttatactttttaattagtaagttcagtttagtttgtgtcaaatacacataagtactgttttctcttgggaaatttgaatctcaatgggttagaccaattgttctctctggagaccaaccattgagtgttggggagtggccatggatttcattaaagagcttggaaagcaatacatttggagtctgcactgtgtctacaggcgcatagagaagaagtagggtgcgtgcaattgagaagtgacacttgcgcttcagttttgtgctgtcatcttcccctaggctgtatgcaggtcctgaagtggatatctggagctgcggtgttattttgtatgctcttctttgtggcaccctcccatttgatgatgagcatgtgcctacgctgtttaagaagatccgagggggtgttttttacatcccagaatatctcaatcgttctgttgctactctcctgatgcatatgctgcagggttgatcccctgaaacgagcaactatcaaagacataaggtgaatattcttttttgtgactattaag

SEQ ID NO: 35609 - DNA, 1917 bp, Bovine  19866880645816
  misc_feature (1)..(1): n is a, c, g, or t
ngctgccttcatctgtcatccagaccattccatcaccttcctgagcagtcctcaggttttcagagtcatccatctccaagctcttcctgacagtgctcactaatgggaagatctgatcagttcctacctttgcatcagacccttctgcgaacagtccccactggcctcaggataaagtccacgaggtttatcggggcttcagggaagccctgcctggcctgtccccttcttatctttccagtcacatccctcaccactcttccagaatgatactccactccctggcttaactgaattcgtttcagtctcctgatcgtaccatggtatatttcacatttggaattttgcaaatgtttttttttttcttccaagaatagtacttaaaaataattctcttcaaagcaactccacttctgctttagcttcaagttagctattacatccctggaaatattcggggggcccattgcaacccacccaatgcgatccccagttgtgatcatgaccagtctttgtgctcacaaagcacctcattttgcccatcttaatacatggttttaatcatcttttggttcctctttatccctccacgctgggagttctgtgagtgcagggactatatctggcttcagtttaaaaagaataataataattttaaaaatttatttatttttgaatgtcctgggtctttgttgcaacaggctttgctctagtcatgaccagcagggagctactctagttgcagtgcttgagctttcattgcggaggcttctcttgttatagagcatggactctagggcactcgggcttccgtagctgtgtttcccaggctctagagcacatgctcagtagctgtggtgactgggcttagttgctccatggcacatgggatcttctcttaccagggatcaaacccatttctcctgcattggcaggcagattctttaccactgagccatcaggcaagctcctaacttcacttttaccactaagcccagtgttggaagatgtaggtgtgcagcctgttgaatgaataagtgagtgaatgactaaaaaagcctctcatgcctcgatttgtgaaggctcttatagcacacttcatttattcaaatcatcacatctaccacatttttcttatacttttttgtttatttctctgcctctgccactaactgtgagttcccagcacagcatttggaacatggtaggtattcattagatgtttgttgaattaattatcataaagtgtgggggagaatgatttgcagaaagaaagaaataagcagaaagaaaatttaaaaccataaacatctcccttaagagcttgctctagagattcttattatgtggcattgaaaattcctcccattcagtgaaccacctctcccttttgcaacgtgtgtccaatcatgtctggtgctataattcagcatgatgtgggccatattggtagtaagagctataagatttgccatattagttcatcccactgcttcattaagctcagtgtgctgcctctggcagtggctgggcttgaattttgatgtttggaagaacaaagcccttcatattagccctctgatttctatgagtcaggtaaagttacagtcctgcccagtgtctgagagtcttcatctttgcagatagtcagtaagtggcccagagcatggggttttattatttgcgtggattttctgagcagacaaggccccaggtgtgtcaggatgtgagcaatcccatcctatagtgacagtttctgggatggtcagagtacaacatgttgcaggattgcatgtttctgcccagtccatcaagagagcgcccgtaggtcaaagggagaggtgagggtggagtggagatgtctcctttaagcttaacacaagcatccccttttttcatagaagcagctaggctcag

SEQ ID NO: 35610 - DNA, 1284 bp, Bovine  19866880690267
  misc_feature (1)..(1): n is a, c, g, or t
nattgaacgtggactggcaactcgtttcatactcaattctgctcactctttgctctgttgcctccctgtttaggactagtgccacctgcttgatgtatctatattcatatatatatatatatatattatatacacatatttcagatgcttatgacaactttaagtcagtaggatattatttatgactatttatgtaatgtttgttttcctttagttcagttcagttgctcagtcatgtctgactctttgcgaccccatggactgcagcacaccaggcctccctatgcatcaccaactcccagagtttactcaaactcatgtccgttgagtcggtgataccatccaaccatctcatcctctgtcatccacttctcctgccttcaatctttcccagcatcagagtcttttcagatgagtcagttcttcacatcaggtggccaaagtactggagtttcggcttcaacatcagtccttccaatgaacacccaggactgatctcctttaggatggactagttggatctccttgcagtccaagggactctcaagagtctcctccaacaccacaggtcaaaagcatcaattcttcggcactcagctttctttacaggatatcaggccaagtctaattctgtgccccatactcccaagaaggcaagagcctcagaaagatatgtcttattcaagggtggcgaggaatatataattaaaagagcaggagtcataaactaaccctaaagtaacaggctctttccagtatgtgtggctaaattctgtaaactggaggcaaggagaaactggtgttcacatgctagttcccaaagagaggaaacaggctaagcctcttcagtttatcctcttctgatctgggtgtgtgagggcccggacttatctctgatttgtgcagcagtggaaaggtgtgccgaaagataggatgatgctaatatgacagggtgaaaataattttcatatccaaatgtgtcctgctctttgcaggaccaaggtcactatgtacaaatatgctcatgctctccttctcccggccccaaaacagcaaaatggcagtactcagtatgctgcgatccgtggattttctcatttaaatagtgctattgtctctcttgtttatgagtttgtttctcatctcaggaaacttcaacccacacatcagctacaaatgtgctcccttccatttttttcccattactcttaattagatagtaaaatacaatccacctacatgaacaagaggggtaaaagaaagtaacagctaaatgcatttttt

SEQ ID NO: 35611 - DNA, 464 bp, Bovine  19866880701093
  misc_feature (1)..(1): n is a, c, g, or t
nctgacgacagaactccctgggtagactcttcatggaaccgggagctgcagtcagacttcctgtcacagagggaaaatgaagacctccaggacatgggcttggagggtaccggcagagctgtttcttctctgtgctgccctgggatctttcagtgtgcccagctccaggtaggtgatagttccaaatgacttcctaatcaataatatgctggggaatataaagccatatcatgctgaccctctctccttgtcacatgcctattgaataaggaacatctcctgaagcaatttacatgcatctgattacactatatcaacaactcttcaaattattgaggaacccagccaccgacttcaacaaaagttctcgtaggaaactgacgcatttaaaggtattttatcacgctaagaagaataggatccttgctctgtattctgaacaaagcctcagcatacttgcttaa

SEQ ID NO: 35612 - DNA, 2137 bp, Bovine  19866880718872
  misc_feature (1)..(1): n is a, c, g, or t
nccactgcatcccaaagagcatggatctaggttcctcagctccttttgatgctgagcacaggaagtaagtgtgtgttctggggcagagctgagttgttgtgacatgagtgggtacccagagaagatgctgaacaagagacaagaacaagggaaattcatcactgaatgagagacagtttaaaaagaaagaaaaaaaagagaggttgtggtggttggaagaggaaacacatcaggaaatgttcaagctgatggccgtggagtggtgggcagtgtaaaccctctgtgcctctgtacgctgtagtctgctcactcatgcttttgtgaaaatctcatttgggaagggaagtacttaaagatgagaataagaatacagttgatctttaggttactaagcaccaaaatatttttattttttagactgagtcaagtgatcatttaagctttgttgttctctttcattccatctcattagaacatccgttaatatttctttgctctcaggcacttcctgttggattgcataacatcatgtgaatttgttgaaatcaaactggtgggggaaaacaaaacagttgattgaaggtgaattggttcatcctgtgtattttcaaccgatttgttttcagccacgtgatctgctgtaagtttgccgctgggctaggtatggacccaagaccataaatgtccatgacaccaaagcacaggtccccagcacccaccaatcatgccgcctagctctctagaattgagtcagtagaacaatgtagaataagccgatcctttactgctcagggcttgctgcagcaagcatgtccagtctgtctgccttctgcatcctcatgtcccctgcaattgaactgacgggtccaggcccttgtttggcttaatattattgctttgccgtctgctgttatttcaacaggctaatccaataatgttttatctctttcattataccgagactgtataattttcttgtgttataatctatcttcttttaagattccccagagacggggaaagagaggttctgtcttgggttgatggcaggctcccatgaagctgatacagggacgtggaaggcaacactgccaaattaaattctgaatctcaatcacagccaccgctttctaatgggaaatttgagttgattatggagatgacagcgcaggttcacgtttattgcatttagcagaaattgtttatcctattaaatacagtcttgaaggagagacaattgaattgtagagcaccggtgaatacccgggtgacgcccaggcacagctaaactgtgtaataattatattcttatttgtgggctgaacttccccttgtggctctttttgcaaacaaatgcatttaggaggaggctgaaacagaatgtaagaattaaacaaaataaatgcagactgtgcttttggaaaaccttggcaactgtagctcacaccggcatccccatgaaggagctgcagcatccgtggggcccggggccaggcagggtgtagcctggcagtggtcctggacgcttgatcacagcccaggatacctggaggtgggtgggttttgcatctcagggtgtgaatctctgaaatgctgggggctcggccatgtgcttgatgtcaagacagggagttctgtgtctacacttcctctgtgaccttgggataataatataacttctgtgggaatagaaagtattataattattttcacaatagtagtaataataatagctgccaattatagagcactactctgtttatgaaatcttttaacctgcaccatctcgtttaatctttatttgaatttgatggggtagatattaatacagtcagcaggtgacatgtagggaaagcttcaaagggaaacatgatacttgccaggaacaggctgactatgaaaatcaacatagatgctgaggctgggagaagagcatctcctggcagagaatccagaggaaaatggtatttttgttttaaaggagaggactctggtctgctcccaagcacatatacaaaaaatcccactggaaagagtggggctggagcagaaagccctcaggacacttggccaggtctccctggggacctttgtaattagcatttgttggatatattttgttttacaggtcgaagat

SEQ ID NO: 35613 - DNA, 2442 bp, Bovine  19866880738268
  misc_feature (1)..(1): n is a, c, g, or t
ntagatctatcaggtcactgaaaaaatgtctaaagacatttctaacacctgttagaaagtgattgcaaaaatccaagtagataaagatgaccagctagacaagggataattggtggctcagatagttggtggctcagtattcttgcctggagaatccctgtggacagaggagtctggcagtctacagtccatgggatccaaaagtgctggacatgactgagtgactaagcaacagtagcaagtagatgataaccagctagacaaggaataattatggtaacagctgccattcactatgcttagagttaggataattgttgtgtgtttttcttcttctttaagccttgaaaaaccctcagaaatgaataggaaccagtccatgatttcttaaccataattccaaaatccaataaacactaaaaaccagtgttttttttctttttttaaactcttttggtgtcagaaacctacctgaaccaacacaagccattttacagtctttatttttgctatattagatgaacattaatatgtcttaccacagaaatagtaccatgtttgatcacagcctactgcctcagaccacatgtatagaatttgtaacataaaacctttctaaaattgcaaattttctggattccaaagtacacctggaccaagggttttgctgtagagggattgtagaccaaattagtattgttttgtaaaggtggaaaccatttctgaaagaacccacttaattttccaaggaaagagaaagaaaggggcctgagtgcctgtaaaggggaaggcacagatggaagggcctttgcagaggtagagctaacctacaagattccgtgttgagcacagggagatcattatttgtgttggtgccaaagtacaattgggattctggaatgaaaggtcgaatggctctgtaattagtgatggttgagcagacaggctctcatgaagaaaaggacgtaggcagataaagacaggaaagcagcaagggggttggatattaaatccaccaaaaggctctctgcactaacatatcatctcccttttattgcccatcaaatgcaacttaaattgcttacatctttgagtgaaactttgagtgaacttcgcagcactaagtgagaagggcttcagggacaaataatgactttctccttccacttcgcctgctctacctactcgcttgaaaattcagtgtgcccacatgcctcccgcctctgcctatgctgttcctttgaatgtctccagagccccacttctctccaatgaacacccatttgtacccttcaatcttacctccttgggaaggactccttgaacagaccagtccaaactattcaaactaatttttcacttccctgtattttcatgaatcccatacatagactttgttaggttactgtttagtaagtgtcttcactatccaaggatcgaatgttttgaattggtctgtttaactagcctagctatcagcagaagatacagtgatggaatgacatggtctttgccctgggaaaagatcgaatttagtgggagagagagaccagtaagcaattatgataagctggagtgtgataagcactgagacggacgtcagcagagggaggcatttggcttggaactgggagaggacaggaagtttggggaaccagtgccacgaatgagacttgagtgcataggggttacctactgtgtctctttcctgcttgcagtcctcagagaatttccagtacctactgaataaaatcctaaatccttaactccaagtttttgcatgcacccactctaatagagaattccagtttttatacactgcaagataggagctaccaagagtagaaacagagtttaactcgggaattctagcacaagtaatgtgaaatgggagggaggtaagagagataatatactccacagtgattacagtgcccatgcatgggatctaatttgggtatacgggggaaatgaagacagcaggaaagagtagacagggaagaaatgttggggcctgaggattaatgtgctggggtcaaagaattgctagagttgaggtatcagagtaggcaagtggctgaaataggaggtgatgatgcaagaataggatacttgaaattgatgtgttagagatggcccagttattggtaaagatgaatgaagactcgggtgtatccttggaaaccagtggctgaggttgggtggagaacaaagtcatcagcaatgaatctagggtgttgaaaggattatctatatggattctaaatttgcttattgtcatggctgtcgtagggaagagaggggagtaagccagctgctaaaatcttcagtaaagaagaggaatggccagagcattgtagatgacttccataagaagcagtgggtttagtttggtatcctgttaggtgggagttggtatctctaacgaagaagaatgatctg

SEQ ID NO: 35614 - DNA, 1930 bp, Bovine  19866880738960
  misc_feature (1)..(1): n is a, c, g, or t
nacgctttctcttttttttttttttttctgctgctcctgctgctaaattgcatcagtcgtgtctgactctatgggaccccatagactgcagcccaccagactcccccgtccctgggattctccaggcaagaacactggagtgggttgccatttccttctccaatgcctgaaagggaaaagtgaaaatgaaagtgaagttactcagtcgtgtccaactcttcacaaccccatggactgcagcccaccaggctcctctgtcaatgggattttccaggcaagagtactggagtggggtgccattgccttctccatgtagctttactattattcatataatagcaagaaggatgcaagaaataccaaagtgtcccccatcagcagtcctgatggcctgctttcaagagcattacagactcattttcaactgtagcatccgtttgtatgcaaacaattaccgtgcagtaggccttctcagtgtggaaggtgctagctgagatctcgtttacattattaatttgcttagtaaacccttttgagtcaagttcatgtagaggtgagctgggaagctgccacaggagccagtcctgcctcaggaggcagaggccctgagtgcagcatgtggcaagcagcccagcacccagcctgctcacatggagatagaaaggcctcaggtctgtgtctttggcagtctttgctcatctcaaaaaatatcttttttttaatgacattttttttttaatgtggacctttttttttttttttcaagtctttattgaatttgttacaatattgcttctgttttatgttttgttttttttttgcctccaaggcatgtggtatgttagctccatgaccagggattgaacccacaccccctgctttggaaggtgaagtcttaaccactggtctgccagggaagccccctaaaacatccttggtgttttgaatttttaagtgtttatttttccttgcttcattgttctaaataacgtctctgtctgtagtttcctagggctcacataacaacgtgtcacaaactgagtggcaaaaaactgtaggaatgtattgtcacacagttctggaagccagaagtccaaaatcaaggtggagacagggctccgatctctccaaaccctgtaggggagaatccttcctgtcctcttcctcactcctggtatttgccacaagccttcatgctccttagcttgtaaaaacatctcttcaatcgtgcccctgtcttcaaacaatcctctttcccctctgtgtttctgtccttctagaaggatggaagtcgtagtggaatcagggcccaccctactccagtatgacctcagttgaacttaattcattacatcttaatgaccctgtgttccaataaggtcacattctgaggtaatgtagtgggttaagactttaactttttagggcatgcacaattcaacacataatctaacttaacattcagttttacttctatgtttattgtcagaatataagcttcatgagagcaaggattctgtcatttttccccccagtcttttgatcaatcagagtttggaacataaaataataactcagtaatgacgtgttggattaaaggataacaatctgccacctggggcaggaatataaagataaggctttgggggttggacagtcttgggttcatatttcagctaaactactctattctgtgcttttatttcttgtttttaactttttattttagattggcatataattgattaagtgttatgctagtttcagatgtacaacaaagtgattcagttatacatataaaagtattgtcatctgtttattttcaaactcttttcccagttaggttgttacataacattgagcagaattccctgtggtatacagttgctgctgctaagtcgcttcagtcgtgtccgactctgtgcgaccc

SEQ ID NO: 35615 - DNA, 1094 bp, Bovine  19866880740924
  misc_feature (1)..(1): n is a, c, g, or t
nctctctctctctctctctccggaaactttatatgctcttaactgctcacttggattatcgcccagccatgtgttgttaaaattttatagcctctgagcatcattaaggggtcatggaagctggtcaggggaggcagagggatggagcaaacagaccagcagctaaatgtgtcaatcagtgggcatcttgatttatttgtaaggtagccatggaaggggagagaggttgaatttttcttgtaaaggggatgaaccaagaagtttattatacgttcgtcttaaaggtcacgtgtatgagcggagagagttcttgaggacaatatcatattatttcaagataatctgccatacatactgtgcatgttggcactatgaaagccaagtgatagtttctttttttttttcttctgtctgggctcttcagcctttggcgggggatggggaaacaaccaaaataaataggagcttagatgtattatcttgaaggcaagggctgtgaaatccctttcggggagcttgtgtgccaaagcatgctgtgttaagtcagccggaggtcattactgtttttattaggtgattttattataaatatgatttgggcctcaatcataaacagatcctttatgtgtgtttctgaacattctggtggctccaaagcactaaattccaaattggaatattgattgtctgatggttgaattacagccttcttcaaatcttgaaggaggcctcagggcccatgtgtctttctggagataagttctcgtaactgagagatgtaaggccttaaacagtgggtcccacaaggtggaaaaccaaaggcagactggagtactgttctccccctggtaaattaggaggtattaaacacaccattttatggcatgtataagaaaattgtcataatttgtaaatgtccctgaatttcctctcgggtaaggcaaacattaatgcagcctgcacatgtttattatttccatgcaaatccaactgaataggttttttttttgattctttagatttttttttttaacttaaccacaggcatctttctcaattttccaattctataaatgtcccttagttttaaagtt

SEQ ID NO: 35616 - DNA, 1080 bp, Bovine  19866880742364
  misc_feature (1)..(1): n is a, c, g, or t
nggccgacctgggccgtgatgttttttgtccttaactttgtttttctaccttaatttcttgtttcagttttcagagtgtatgtttacaattatgacattttcagtacttcccggggtcttactaaggtgtgcaatactgaatatatctgttttctcaggacttcttaaaagatttgctctggaagcctgtgcatcccacagtcccccactgaaatgccacctcttcgatatgccagtttgtgtcttctccatcagaaattgagattcttccctggccctcacttttcacattggtggcaccttcatttgatgaaacaccacctttgatgaaactgcacttcttccattagactatgatcttcttaaagggagtaattccatttactcactttctcagggagaaaacttatgcagagcagaaatatatacagatatggaaacaacatagctggagtgaatcctgtgaatcaaatctccttattggctatgtgaactctgggcaggtttcttgatttcagaaagcttcatctgtacataggaaggtcatagcacccattagggctgttgtatgagatagatgaaaagtaatgtatattaaaatgttcatcgttgtacctggagcacagtaggtgtttaatacatggcagttctagccccaggcatggtatcaattacatgaaagatgctcacaaaatgttggctgaattaaactgaaagggatttaatacttatttgttttccattgatttgttatatcctactattgctgattatcaacatttgtcacattttctccctggcactttactacagtggtttaagaagcattaggattgtgcttgcaatcctatgttgagctctttggaaaggaggtgctttgttgaaatcagcaagaccatgtaggcattcaagcttttgttatccgatcaaatagacttatctatttttccttgttagcagaaaggagacaaaaagaagttgcttagaagataattggctcttatacataaaattaactgaaagctaaagttaatctccaaagagataaactataaaattaaacaatttgtggcctgaaat

SEQ ID NO: 35617 - DNA, 1590 bp, Bovine  19866880753959
  misc_feature (1)..(1): n is a, c, g, or t
natcccctggagaagagaagggcaacccactccagtattcctgcttgggaaattcctggacagaggagcctggtgggctcacaaagagccggacatgactgaatggctaacactttttctttctttcatggaagatgttgccatcttgtaaattgaatagcagattcgggccaactctatctccatccctcaaggttggggtaaggatgacacagggtagtaaacgaggcccagaggcaggcttattagaaatcaggattcgaatgcactgaggctggatctgtattctccagttccagcatgttcccaagacttgtcttactaaacctgcctgtggcctgaagtgaaatcaatctctgttgtagggtgaagggagtccaggagagtctgaggcagcgattggccttccaggtctgttgggaggagtaaatgaagaattcctgccatgcactcacaaaataccgtctggcacatggcaattactcaacggagttcagttttctaaaacaatgatgaggaaacaacagttctcgtcctctgtgaattgagttgcaaatgtccagttttactcccatttgtttatttatttatttctggctgtgctggggcttcattgctgcacttgggctttctctagttgtagcagcgggggcttctcttgccattgcagtggcttctcttggtgtggagtaccagttctaggcacacagggttcaggaattacagctcttgggctctagagtgtgtgggctcagttattgtggtgcatggatttggttgccctacagtatgtggaacgctcccggaccagggatcgaacctgtgtcccttgcattggcaggcggattctcaaccactggaccgccagagatgtctttactcacattttttcagccaaaagtttttaaaaaaatgacattatgtaccttaaaatgttgaagttttatgaaatcaaggtgcgttctaaaaaactgcattaagaaaaacatatacacttccagccaaaaaatccttttaaaattggagctaagtttgtcaaaatacagccttctaaaactcactcaagagttttcatacagatactggcagaaactatgctctggaataaaatatttttgcgaaagtggcaaatgcttgctttctttaatgaattgccaattttctaaggttaaatacattgtctatagcattttaattttttaagaagatttttctctttatcttgggaaattgcagagatgatgaaaatctaaatataatttaatgcaaatgtattcaaataattataggatgaaaaatgggcaacaagtcagagccccctgcatgtgttaaagacggatgatggcaaggcaggtgtttttgccttgagaagatgggtttgctgtgttcaacagcagtggtggcagagaaaccagggaatatgtcagacagaaactgtttgctgacaagcagcaatctttccctaccatccctttctccctcttgccctccctctcctgtttattcctccatccttctttcccaaaacatatttcttttcctctcttctcccccacatctctcttttcccctctacctctttctttctct

SEQ ID NO: 35618 - DNA, 930 bp, Bovine  19866880766527
  misc_feature (1)..(1): n is a, c, g, or t
ncttgacttgcattgtcttatctagaacatgaacatttgtagttgcatttgcattttacttaggttaaaaatcaagtttccaacatgcagtaacaatccattccttctgacctagaaagcagggctcatggcttctcttgtggctttgattcccagaaaagtggagtcaacccacactctctctctctgctctggacctctctccggtcctcagtcaccaccttgagaatcttaccaaggcaatggcatcaaccctcatgtcttggcagagcatgctcaggtccacacctgtcatcctgactactctctcaactcccaagctttcatggccagctctccaatggaccttttctacacagatgctaaaaggtcacttcaaatctggtgtctaaatacacctgaaattgcagaatcttagaaagggaaggggagaaggcaatggcaccccactctagtactcttgcctggaaaatcccatggatggagaagcctggtagcctgcagtccatgggatcacgaagagtcagacacaactgagcaacttcattttcacttttcactttcatgcattggagagggaaatggcaacccactccagtgttcttgcctggaaaatcccaggacgggggagcctggtgggctgctgtctatggagtcgcacaaagtcagacacgactgaagtgacttagcagcagcagcagcagagagggaagggaccacaaaaagcagatggtaagagttaaaagattatggtttagaggtcagaaagcacggggttcaaatcctagctctgagcccattacttctgttaaagtggaataactgtcacctttattaaggctgtagaaggattaaacatgataatggatacaaacttgcttaccgtagtacctggcacatgtcacagacactcagtcacagcagtcacat

SEQ ID NO: 35619 - DNA, 2149 bp, Bovine  19866880774208
  misc_feature (1)..(1): n is a, c, g, or t
ntccagggccagtgacaaagcttgattgctcagagcttttgtgtaataaagttttattaaagtataaaagagatagacaaagcttctgacatagacatcagaagggggcagaaagagtgccgccctgctagcctttagcagtatgttatatacctatcagcaagctgttaattagagaaaggagatgtctcaaaactcagagtggcaccagatcccccacccgcaacatgcattttgagataatattggcacaaggtgagtcatcccaggccataaaatgattgacatgaatcttgaagaaaggcagatttccaagcaaatgtatggtttcattaacatagattaagagaacaactgtatgagtaaaacatactggtttgtcaagtgggttctgagtcttaggtggaaccaacttaaagacagagtctagggtaaatacatagttcattaacatagcttaagaaaaacatttccataagaaaaatgcattggttagctcaatgtttgagaaaagttaagttcaggtggaatcaggtatgtgttatggcaacatagaattttaaaagacaccttttcaaatttgtatagagaagggggaaaaaaacttgcagctttttccttctgccacttaagagagagagagagaaaaaaatgtctaacacgtgcagcctatttcctcacttgcacacccgtggctttcctgcctgttaccttctctagagcaatctaaaaataggcaagtggggggttctctgtggaggtagttaaaatttaagctgagagatgaaggatagtgaggagggagaaaccatgtgaagagcagggagagtggagaagtcagtacacactaggaaccccaggggaaatggcttgtcaggttcaaggacctgcaggacggggacagcatgagatcagaggattgtgtcccgagaagatgtcagaaaggtggtcaggggccagatcacagagatcctttggcaccttcatgaggaatttggattttagtctatgtgtagtgaaaaacaaacaaaaaattacatggaatgtcttctatagggagggtattatctgatttctcattttaaaatgtgtctgtgcagagcaaagattggaggaaactgagtggaccatctcagaccatgggaggccaagcaatgatctgggtgagagataatggtgtctaaaattaggacaaggcagtctagataggcagagggaaagatattggagatacatcttgaaagcaaaaccgacagacatttccaaaggactggatatgggtgtgaggggatgaaaggaattaaagaccactgctaggtacctggcttgagcaagcatgtgttagggtggttctaattactgacatggataaaactgagagaggaacaggttaaaagaagaaaattaagggtttaaacgtggagccattaagttcaccatgcctgagaggcacttgtggagatataaaatgggacaatcgaataaataagacaagatttccaagcttgaagatctcaatctagaggcattaccacagatggtatgagaggcccaggaaatggatcctactttctcaaaaatgagaaaagccaaaaggcaagactgtaccctgaaggattctagttttcagggacatcaaagagaactggccacagaggtaagaagggagcaaggaagtctggtgctgaagaagtccaagagaagaaatatttcaagaaggaaattctggttaacagagggcaattaagaccaagccagaaagctttccactgaatttagcaacatggaggtcactggagactcagcactttggaagtaaaatttccaatacttgtttcatgaggtaaatttccatggaactgaatgggagtggctcaaggttgtataattagtgacaatcagccttgaatataagcatagccaatttattaggatgacccactggaagtaatcggggttgggctttctgatcttctcacctgggatgggtagctaattaattattctgtgatctacattgctaagatggccacattcaattccaggttttaggccttttgcccaatatgtcaccctctaaaaaggcaggtgggaagcatatcactagtctctggcactccacagagtgggcattcaatctgtttttgat

SEQ ID NO: 35620 - DNA, 1283 bp, Bovine  19866880809857
  misc_feature (1)..(1): n is a, c, g, or t
natgtagcatggagaccaccatgtgaagacagaggcaaagactggaatggtgtagctacaagccaagaatgcttagtgttgctgacaagtgcctgaggctaggagaaagaagagattcccttgtggagccttcacaagaaagcagcctggccagtacacccagaatgggatttctaatttctagaagtctgagtcaataaatttccattgctataagccacccagtttttgatactttgttgtggcagccttcggaaatgaatacaaccctccagaaattagccccgttgtccatatgcgtctcagtctaaaactgttctcatctgagagagggtcccgatggtaggaagagagcataagaacaggtaaacgcaggggtcagtcatagagctcagaatgtgggttcctagagcagtgggcaagagggcacagagcagagaggctgggaaccccaagaaccctctgagctggagtaggctagaagctgagtgaggatgcacgggccttaccctctgactgcatttgctcacaggcaaggccctggtgacccacggggcactgacacttgcagctggtaccctcaaggatgggctccccattgttgaagcagggcccacagcggcaggcgttgaattccatcaggtacttgtccagggcccgccgcaggttctggcgcttggtctccagggaccccaggttcgtgtgctgcagtatctcatggattggcttcatctgtgggcacagaaagaacagaggactgcaccctcggctctgtacagcttcccagagcccaagaactggtcatcaagcctcgggaaggcctgctgcatgccagacacagagccagattatcctgctgcattagatccaagcagccactctgtaaagcgggtattaggtttcccagaccatggataaaaaagcagagtctaagagtgtttgagtgaccagctcaggaccacacacaatggaccatgctgaacatggagctacataactttgaaacctgtggtccccagatcccagaggaagacaagaacccaaaagctatctgtgccaactcatccaccccctccagcattcttaggaggcaggaagagtataaagtacttacatgtctatgtgtatgttttactgtcacccttcaatgcagggattaataaaattcttgacaggcagttgtgttgccactgctgagcacaacccctaagggtgtgagtgtggggtttgcctgtgtgtatgactggggtggttttatatttgcagcagcccattctaggcag

SEQ ID NO: 35621 - DNA, 957 bp, Bovine  19866880830872
  misc_feature (1)..(1): n is a, c, g, or t
naaccctgacttagaaattctacaagacttcctaactaccgggtgcggggagacttaataaaagaattttaataagagcagtgcaattttaaggcaaaaataactgtaattactcagagccttcataacatctaaaatctgattaaaatgtaccatcgtttatgagctgacatgagatggttatcatgtataacagccctacaattactgctgacgcatgtgcacagaaaagactctggactgtttctttttcacacttgcatggtactctaatccctccataacagagcgattttacggcaaaacagatacacaagggaatgagaaatgaatgtttgttgagctactattgtaggtcaggaactgggaggcacgttagtaaaatggctaatgtagaaattaacatcatcacaggaagaatgaaaaccctggaaatgtgacggtcacagagctggaaaatggaagaggtgagtgaggttggacctggatgctgtttgactgccatggaaatgtactttcactcacaaaagggcttaactgggctgagcaatgtctacatcatggcttcaccatggtcagctcccatgtggcagttcttacccatttcagaggaggagggaaaagctggaagaggaatctacacacgaggttagatttgagattcaacttaagttcataggtactagtctgaaagcattctatgcattttacttgaagaatgctatctcatgggtattttgatgcagaaacaattgggattttaaaactttcatcctttcaacaattactgattgcatcttcattcatcagacagtgaaaagtcaattctgagagactttcttagccacatgtagaatggaacccccatacttcttatctctggtttgcttgtctcctcatattttaattcttatcccacatatacagtttcaaagttatatatttatttacaaatat

SEQ ID NO: 35622 - DNA, 4004 bp, Bovine  19866880831833
  misc_feature (1)..(1): n is a, c, g, or t
naattctggccaaagggcctgtgtttggggtggggatgccaagagcaaatgctagggattggcatgtggacaggtgagggggtaagtatggagataccatcacaggtaccaagtctgtaacgcccgtaactagatcctgatggggttggtgggaccgcaaagtcccaagtcagcctgattttctcaagtacccttctggggagcttcttcctttgggtttcagtctagcatgctgccaggtaagatcattttatcaaaatttttatggcgaggtttgccaccagacaagaggattcttgcaaaaggaaccaaacataattccaatcctagaaacttcttaagagcagtgacggtatcttactcatttttaggtctgtctctttaaaaagacaaattggaaattccataagtttccagactttaaacagtcaaaaacctcagggtcccctgcgtggactgaacttactgtgatgcttcctccctggggaaaaaatacactttccagttgttggcaactctgttaataggaatcaaatcctctttattaaagccatgtctaaacaaaaaaatgtttcttggaccctatgccaagttacaaagaaaagaagtgaaatgacctttatgaaatgcggagagcaagaccctttctgtgttagcttgctttaatttaagaaagctgtcttgggcgagtcacagaatgcagtctccgttctcttgcttttctctctggcacttagtctttctttctccacctgcttttctttctggcagttagtctctctctccacctgggggcttttttctggctttaataacccatgatttggaatctgcatacttttaaggggtaagcggctgatagcaagggccaggtgcctccgatcactatgcctgtcacttacagcactgttttcctgatgtcaacgctcaatatgaaggaccactccttgggaccagtcatcagtggcagcaggcagatcaagtaaccagagtttcattatggtcagaggttatatagcagaaagggcacagatgggggtcattagggttcaggttcacgattcagctcccattcttctacctttgcagtttggccagatcacttcaccttattgagcctgcacctcttcatcagtagacaagaaagcgttatgtcttctcttttccatgaaattgttttgaagatgaaatgagctaacatggccaaagcacctgtgttatgaattgagttgtgtacccaccatcccctccagttttcatgtgttgaagtcctaactcctggcacctcagaatgtgaccttcctatagtaaggttgttgctgacgtaattaattagcatgataccattagggcgggtcctagtcctatatggctgctgtcctcacaaaaaggggaaattagtacacagagacagacacacagggagagtgctgtgtgaagatgatggcagggattggagtgattcatctgttagccaagcagtgccaaagactggcaataaaagctaggcaggagcccggaacagagtctctctcacagtcctcacagggaacaagccctgtcgacaccttgatcttggacttctagcttccagaactgtaagactatatatttctgttgaaagctgctcagtttgtggtacttcattccagcatccctaggacactaatgcacatgtcagtccatcttagttcctgacctttcttccatctgtccctcctcctcctcttgttcaggcgcgcagtcgtgtccaactctttgtcaccccatggcctacagtcatcaggcttctctgtccatgggatttcccaggcaagaataccggagtgggttgccattttcttctccaggggatcttcctgaaccagggatcaaacccacacttcctgcttggctggtggattctttatcactgagccacctgggcaacctctttctcctcctgtggcctcctttaaatgtatccatgtaagtgtgccgcaggacccttttcagggacatccatcttgggtgtgctgaacatgacatttctgctcctcctaagagcacagagaagaggggtcatcttttctcagattgtaatgtgtattttttaatcacctgggtcgtgcgtgcagtcatcttcagcacagacatcctgctgcaggagatttgacaataagaacagactcatgataccagcctgaaaaggaacagatagaaacacgttactgtctttgtcatagagagctgggaaaagagagcaattcttctaggcctcctgttcctccactggcaggaaaagatatttacaggtgtgtggaggtggctggagggacctaggagagcagcttccctggaaccatcccgagtgatttgcattgtacaaagagagcaaagaacgcttcactttgccattcatatttattgagcaattttttaatgtaaaagggagttccttgtgtgtgcatagtcaaggccacgccccagtgtgtcactggacatttccttgatattgtctttatttggtacagcttcactttcaagttggggctacatggaaaaacctccaccagactggatgatagcgtacttgtcaccactctcagcagctttctcataaagaaactaagactctgggaaccagcaaccccgatcccttgactcagaggagttttccagccacaacgcaaaacagtttctcttttctcccaagccgtattgaaccctttgccttgatctgagaacctaggattttagctccttcaagtgttcaggtagctctgagggagccagggctcctgcagagcgagccgcctgcaggctgcaaaattccagcagagaaagggtttttgaagtatcaaaagctccccacctgtgggtgatttccatgcagagactgagagcaagagtagccaacccatgacctctccaaaactcacatctattccagccctttgaggaacagaaccttcccttttgttttcccagacgttgcaggaatataaagaagatgaagtgtgtatagattagggagagaaaagagacaatggggccatctcagagggcactggagctggactcagagatgtgcgttccaattctgcacttgccaagttaccaggtagggaagcttttcaaatcccctgtagctgctagcatcatagtatctttatttgtaaaatcagtttataagtacctggcaggtctattgccaggattttgtgttgcagtgtgtatgaatgcaccttacacttttgtatggatctgtcaacctgttttctctcccccatctatcatctgtcacatttattgaatgattactttatgtcaggcactttgctaagtatatcatattcatcagttacatacttaaaggaggcagggtgttgttaatagttaaaaatcacactgctgctgctactgctaagtcacttcagtcgtgtttgactctgtgcgatcccatagacggcagcccaccaggctcccccgtccctgggattctccaggcaagaacactggagtgggttgccatttccttctccaatgcaggaaagtgaatagggaaagtgaagtcgctcagttgtgtccgactcttcgcaacccccatggactgcagcctaccaggctcctccatccgtgggattttccaggcaagagtgctggagtggtacttaagttcaaatgaattccagctgcctgtgtgaccttggccaagccctttttacctctgtaagccttggtttgggcttcccaggtggtgctagtggtaaagaacctgcctgacaatgcagacttaagagacacaggtgtgatccctgggttagaaagatgccctggaagagggcatggcaacccactccaatattcttgccttggagaatgccatagacagaggatcctggcagggtacaatccatagggttgcaaagagtcagatatgactgaagcaatttagcatacacacatgcaagctttggtttcctcagtctgtgtaatagagagaataacagtgtgtacactga

SEQ ID NO: 35623 - DNA, 1300 bp, Bovine  19866880872723
  misc_feature (1)..(1): n is a, c, g, or t
ncgttgacattttgtgccagataatgtacagtataggatggcttgcagtatccttggcctgtacccaggacatgtcagtagcatctcctcccaccattctgacaaccaaaaatgtcttcagatgttgtcccctgaggggtaaagagcctctggttgagaatcactgccttgaagtggtgtccactcaaagcacttcgaccattctaaacacagagcaaagtgacatctgagagtttaaaaggagaggcaaactcaaaccccagggatacaaacccttgttcatatgttaacttctcctcgagcaagtgaggcctgagggcagggctggctgtgtgttttctctatccccatggcctgggacttcgagtcaagtaataggcccctaggaaatatgtgctggatgaagaagaaaccaattacctgtctaaatatgtatttagcttccataagcatattcttttatatatttctgtatgtgcatatgtatctatccttccataaaaacttggctgagaattttttcttttctcttccagcatctaatgaccagcacatagcagatactcagtagctataggttgaatggctacctggcatgtaaaaaatacattgaaaagatgaattaacaaaacatccatggtcatgtgccaccatagatgcatttttgtggcatttacagtagtctgaggttgaatgtgggatactccacaaatgaacacttaagaggccagatactttgccacttttgaacattacactcaatgccttgggggcccaggtccagggaggcctgatgaatctttttgaatctgcactggcaagatggagaatgttatggttcagtgggggatgaattatttcattttacactcccagatcatcacatctgtgcatatagccacttcccattcccagaactgccctggctgccctgccagagttgtggccaatctcaccatgatgactgtatttccaaggactacatttaaagttataaacaagtcagagcatcacaaccattccaaagattggtgctgaaacagcacaaaagtttactattattggaaggtatttgagatcactttttaagctttagatttaaatttgtcctgtgggcttgaccagtacagtggtgtgattttaaatggactgtaaaaaatatttacaaggtccagtggatttctaggtcggggctcaaagcttgaggaggaaagaagaatcaaaaggcacttcagttaaaatcagaaaagatggttgaaataacctggttcagccttcgtgagttacagatgaggaaatt

SEQ ID NO: 35624 - DNA, 2071 bp, Bovine  19866880889732
  misc_feature (1)..(1): n is a, c, g, or t
ngtgaggggaagggggttagaggtggaaatgatggggctgagtctgcatgaaggtctggctccctgagtggaaatctgctgaatcatgaaaactccttatgtccaagggattcagagtctcaggtattttatggaaaaagtctccagccaaagactccatgatgcctggtcaagcaggggcagttcttggttctggggagaaagctgtccactcaatttgaaagtggtcaagaagcttcagaaagacagaacaagggctggccagagcctttggagtgtgttaagggtccagtcagtgatcagcacgctatagaaaaggccatgtgttgtatgtaggcttacagagaaccggggggcccgctgcacctggacctcatctgctagggggactcctggaagtctgagatacaaaggaaaatactcagttgtgtgtcactgctgggctcagaaccatgtttgagacatgtttcagtgcaactgaagttgcactcagaaggcgccttctacctaacccaggcagccctgaggagccagtgcaggctttgagtggggggacctgtgactttgcctcagcttgtgtaaaaagaagtggggtgtttagtctctgctgacttcattcaaccatgggtgggaggagcaccggttttgaagtcatactgaccctcaggaacccagctgtggtcctaacagagctgttgtgaggctaaatgaccttctctggaacactgttatcagtcctggaccccacaccatgagagacatagagacagccctgtatgtttcaagataagattaataatggggtttgaaacccaatttggtgaacaagtagcagaaggacctgaaaacctttggcttggagaaatgaaaccatgactatggaggtgggcatccctaggaccatgaaatggaagagggattatactcttctgtatctgccaactcttggaactcagacgggggtggccctacaagaaagtcatttctaactccagctaagggtggtctactgatggtcagaactgctcaagggtggaactctggcacctcagagagtaagctctccatcactggagctgtacaagcagagccttgaagaccacctgtcagaaggatgatgggatgaaggtgggggaggggaggggattcagacattgaatggccagaggggcaagcctttgataccctttccaaacctgagtttctggattcctccaatcaggagtctttctggccccttcttaccctcccctggctccactcccctttttcctagtgaactttctttctgacttatttccatttctctacccactcttccagtaacttgaaaccatcctatcccacctaaagacggcttccaaaactcaatgcatgttagttttagtaagaagacatatctgagtactagcccctttaaaaacaccgagtgtagaaacagtagaaggcatgcagtatagggccgttcagaaaaagcagtttttctctcagaggcctttgcatttaatcaggcctgcttgtcaccaagacaccgggtctgctcttcgtgtttcaatttggtccagcccccattacacagctccctccaattcaatttgtgcctaaattgccttacttgcccctaacaggcttagatacgtgaggaaacatgctccatttgctgcctttggtttttgtgaatttattaaccagcctggccacaccacctccatgcttagtagctccaaaaaaagaaaaaatccagactctcaacctgacatacacggcactcgggtcccagcctctgctgtatctttggcctgcctcatcctggtccagctccactggactcctcagcttccccaagcagtcataccctccccagcctccctgcagccctcccccaacatcctgccttgtgttttggggagtctttcttgattctcccaacagcgtcagcacgtcgccctgcatttgcgcctccacacctgtcattcctccaggagtagaccacacagtgttggaatccttcttcctcaggagcttctgggagcttcctggggttgttgtgttaccagaagcaagcccaggg

SEQ ID NO: 35625 - DNA, 1153 bp, Bovine  19866880918947
  misc_feature (1)..(1): n is a, c, g, or t
nctctgaaatgaaattattggactggtctggattggagtttctcagaagaagtgggtctgctctgaaaattacttgctgccctttgcaagggtggcagttaaataactcaacaagaggtcccttggagaaaatcaattgcacacaaaattgcaaaaatgtggatgcaatttgtggggaaagtggatttgatatgagtcagtgttggctgccagcatggagtcactctccaggtggattaaagcttgttgcagcccttggttccaaatgatggctggcctccagcatgctctgccaacctcttctccccagggcttcagataggttgacctcagctcaaacctgctccaggctatgggaccaattctcccccaaggtaggggcctgacagggcttcagccatatctgatcctgggcatcaagccccctaacttatgatggagagctcaccctagtgcagacttttccttgtgcttcacttggagtcttggttctaagaatgggaatcttgttgtgttcctcgttttcagagtttctgccctggtaacctgcctacactggtatctaggaaaaggctctgtttgcccttacttccttccaatgccataggctgaaggaaacagcttttgaaaggtgtaaatgagatcatatgactctcttccccagacttcacattgtatttatagaaaaccttggcctgtgaggccttgtatgacctggctcctccctatgctccaactcatcttatacaaacactctgttcagacctcacacagttctctgtatttctccaacaggtacttgcatccatggtgctctctgcctggaatgctgttccccaaactctctgcctagctggcttcctacatccttcagggttcagctgaagagcactaagtaagtgaagactttcccatcatcctttctaaagtaccacttgttctttactctctgcgacctcatgggctgttgctcaccaggctcctctctccacgggattctccaggcaagaatactggagagggtagccatttctcttctccaggggatcttcccgacccagtgattgaacaggagtctcttacattggcaggcagattatttcccactgaaccaaaaagtagcacccctcccccattatttctgtcaccacgt

SEQ ID NO: 35626 - DNA, 1075 bp, Bovine  19866880938596
  misc_feature (1)..(1): n is a, c, g, or t
nttgggaagtaaaattaaaccagattctttcaccagggacttagaatcttgagggaagtgacatgctgtgacagaatattgaaataatttgaacccaagcattttttctgcagagtccacttgctcctgcttttgtgatccactggcctgtccgtgttccttctgtcctcgcttggatgttcaatccttccttaactctgcaattttcagagtaatcccctgctctgcctttttttttttttttttaaagttagacaaagccatcgctctccactgcttacaaccaacaattgtaactcgtactgggatcaaattttgttcaactttgatgcctatcacagtgtccagcatatggtgagctctggagacaacaatattaaatgtttgttaagtgagtacatttcccacccgtgccactgtccactgcatggcctccctgagttacggccatctctttgctttccatcagatcacggccaatgaaggcaaactcagtctttcactaggcggctcaggcggctatttggaaaatgttcccaactgaatgcaatcatacatcccaaattgttagaaagttcttcccaaatgagttattattcacattgccctcccccagctattccttattcttcgctgggaccatgagaattcttccatcagataatttcaaagtcagggcgaaccacatctacagggcttcagggtttgctaaaaggtctctaaggcataataatatttcacatttgaaaggcaaataatacttagagcgttttcaaagctctttaccaaccaccaggtaatttattcttacaaaaactctgagacacagattgctgtgggattaccagttctccatttcccatgtcaggagacgccatcccagaaagatcatctaattcttttttccaggtcacacagctgatacagggtagagttgagactcagtgcctaatcattatggctgaattcacccaccttttccattttacctggagtcccttgccagaggattataatcatcatttcagtgatgaagatatgggtttaaaagaagtgttctatttcagctactttt

SEQ ID NO: 35627 - DNA, 2996 bp, Bovine  19866880955785
  misc_feature (1)..(1): n is a, c, g, or t
ncgccacaggtatacacgtgttccccatcctgaaccctcctccctcctccctccccataccatccctctgggtcgtcccagtgcaccagccccaagcatctagtattgtgcatcgaacctggactgacgactcattccaaatatgatatttctgctttgcaaatagggtcgtctgtaccatttttctagattccacatatatgcattaataaacaatatttgtttttcttatcatatcataatttttcttatcatacatttattttcctgtttttgatcctcatatagatggaataatagtaatgtccttttttgaatctggttcgttttattcaattctttaaaaaccatttatccatgttgctgtacctatcgatagtttcttttgtttcttgcttagtagtgttctactgtatggatagtctatagtttgtttactcattctactgtggaaaaagatatgtgttgtcttcagtttgagctattatgaaaaaaaatgctgctataaactttctagtgtatatgtttgtgtgtgtgtgtatatacatgttttatttctctggggtatatgagtagatgcctacaagttcccagagtaaatgtagacttattgtttgttgtttaatcactaagtcctgtccaactcttttgagactctgtggattctagcctgccaggctcctctatccatgggatttcccagacaagaatactggagtgggttgctatttccttctccaagggatcttcccaacccaaggcttgaccccacgtctcctgaattggcaagtagatatttttactgttaagccacctgggaagcacagatgtacccttaatttgattttttaaaaaatgccaggcagtttttcaaaattgtgataccattccttatgattaatgatgtacatctttctgttcagttcagtcgctcaatcatgtctgactctttgtgaccccacggactgcagcatgtcaggcttccctgtctatcatccattcctggagcttactcaaactcatgtccatcgaatcagtgatgcaatccaaccatctcatcttatattgtccccttctcctcatgtgtctttacatatgcctattggctattcagtttatctcagtctgtaaagtgtctgttcaagtattctgttcattttaactaggttgtctttttactgctaaataagaatagtcatattttctggatttaagtcctttgtcagatatatgttttgtgaatattttctccaggtttatagtttaccattcattttcttaaatgttgtcttttgatcagcacatgttttaaactttgataaggttcaattgatttttttttaatttatgttcagtgattttctatcctctctaggaaatctgtgcatcccttcacatcatgatgatactctgtaatgttctcctttagaacttttaccattttagcaattatattttggtctatgtatggtatgaggagggtttcgaggttaattttttccccatatgtttaaacagttgttctaataccatgttttaaagacttttctttccttaatgagtaacagtcgcacctttgtatataaaaaaaaaaaagtcaattgatggcctatatgttggtctatttctgattctctattctgttccactgatcaacttatctaaccttaatgccagtatcatactgttttgactatcatagctttatagtaagtcttgaagtcagatagaataagctctctaattttgctcttctttatcagattattatagttattgtaagtccctttgcatttccatatacattttagtattagttaatcaatttcttgaaaaaatatgctgagatttctattgcaattgtgctaagtttacagttcaacttggggagaagttgacatcaacactgagcttcccaaatcgtgagcgtggcgtgccgctccatgtatttgggtcgcctgtaattgttttcatcaacattttgtaagttttggtggagaaaacttgtgcaacttttattcaatctactcctaagtattttgtgaggtgctgtcataaatggcatctactttttttcattttccagctgtctgattgactgtataactttggataaggtatttatcctctctgagtttatttctgacctataaaatgtgagttcatgttcttcttagaagaaggtcaggtgtaaatatgcacaaatagtttttaggggttcttttattattgatattaaaaaggataacttagaaagttcataattaagttcttggtatattagaaattattctttggctcaaaagtgaaaaataaacaaaaaaaaacaactcaaactggcctaagtaatagagggaatattttggctcacataactgaaaaatctggagggggatgtgttagttgggctgaggcatgactaaaccaaagcccttcaacaatgccctcataaagctctattttcccatcttttactcctgtattcttctgatgcagtttcattctccaaaggcttctcttatgaaatgggtttctgcagctacagactttccagtgtccagtccaacggtggagagaaaacattcttcctagttgctctgtcacaagtaaagaggtcacccatttgaccatccctgaattgtggccaagaaatgtgtggcacctgtccatccctcgagctacaggtagagtcagctttcctataactaaatagaaaaaaataatattgggtaggggaatggtctcccaggagaagaaagaggaatggccccaaagaggcaaacaacaaatatttgtcatatctttaacacagtagccacaaaatacatggcagctgtatcatatggtgggcatattctctgcctctgatactctctaggcatcagagactcaatcatttttctcatagcattcagtctacttctgtttcaagcactaatatcaccttaagctctactttatgagtgaaaaaattgggggttgtatggaacttaaga

SEQ ID NO: 35628 - DNA, 892 bp, Bovine  19866880989223
  misc_feature (1)..(1): n is a, c, g, or t
natggcaggtgcttagactgagtgaacacaggaatcatgccatgtgatgatcttgttatggtatacattattatatgttatctgttattttatagtgtgttatatcatactactttccttctctgattttttttttttttcatttgtaaaatgggaacgagaccgttgccaatagctttcaagctctaacattttaagaatcatttccccaatcttcttccctctttaagtcccaccagcccaaggaatagaaaggagagatgaggatctgagttttgggctcccccggaaggtcaaagggaagctgcccaatggtcctggctttctctggaactaagagtcatatttatccagggcagtccattctgcaccagtttcctaacagtggggccaaattccctgcacttccagtaatggtgttctccccttggcagggggcccagccaataccaacatgaccagcctggtgacctcagccacggcccctggtcacaggacaaggtttgtttgccacaggtctttctgtacacatttccaggaacccactcaaagcatggcgagtgccctcactgacctctgattcttgagaagtaagtttgctccagtggggtttggtcccatctcagaatggctctgtgaccttagcaaatccttcctctctcagctcctcaggttcctctcctgtaaaatgagagacctgggaaagagtttttattttatgtttatgtgtttaaaaaatagtgttataagcatattgaagatgaccatatatacatacagtttaaaaaaatgtttgtttttttttttgctatcatcacatctaacaaataaaaatggggctttactttatactggtcttcctctttgcaatggtatcttacattcattattt

SEQ ID NO: 35629 - DNA, 1729 bp, Bovine  19866880994042
  misc_feature (1)..(1): n is a, c, g, or t
nagacccctgtcgtagggagaggtctgctccccatgagaatcgctgcagaagtgtggaaggaaaatctgagccacacgccccagggggctgatgacctggttcagactctggactttggatggacctggagggaagacagaggcaccgagggagttggtggaaagaagtggattccaggcgtgcctcccagagctgcccctagggtgtccagatataacaactcccatcacatccacatgtcagtaaaagcattatgaggtattagtcatggctagattacttgaggaaaaagtaaaaaaacagagttttccaaataggtcagaaggattgtaaaattacagccaagaggacccaggagtcaaaacaaagacagggaggaagagagacacagaaatcagagactgggcaggtaggggacggggttgtggtttctagggcctggaataattggtattcacctctgtcaaactgcaccttaatctctgaagaactagaaataataacaaccgaggaccttgtttaaatctccacaattaaaccaggtacagatttcttaggcatgcaagctattcagtacattttttaaaaataattttgagatgaataatgagagtactggccaatcctgctaatgatagaatctgatgattgctgaggatatcaagacagttgtctattcctgaacagcttaacttctctggatcttcatttcttcaactgcaaaatgaaatgaatcatttccatctcataaacttagtgtgaggattaagtaaaataagacaaatgaaatgcctgacacacgttcaattactatctttctatctaaccatctgtatgtaattgatttatgactatgtctggacgagtgagagaaggtatgtagacatggtgtcatcaatccagtgtgtggttgttgttacaattctagaggatgtttctggagatgtccatttaaggcatctggttccctgaagacacaaatatgctagaaatattgtatgacacttatatgtggactctaaaaaagaaatgattcaaatgaacttatttacaaaacacaaacagactcacagacttagagaataaatttatggttgccaagagggaggaatagggagaagggagaattagagagttggggataaatatgtacacactactatgtgtaaaatggataaccaacaaggacctactgtatagcaaggggaactctgctcaatgttacgtggcagcctgtatgggaggggagtttggggaagaatggatacatgtatatatatggctgaatccctttgctgtctacctgaaactatcacaacattgttaactggctatactccaatatttttttttaaaaaaaggtaaaaaataaaaacaagatggtaatgatacccaatgtctggatgagaggtggaaagcccattcaattacccacatttctcagaccccagatgtttggcaatacattggagaacttccccatgtaaccggtagcatttcctgtattttgctggctgtttatggctgagttgaaatgccagtattagccttatttcagtcttataaaacaaattgatctgacctcagaaattccaggagctacttgaaaagatcatgaattctggagctatatcttggtttggtttttgcctcattctgaaaataagatccctctgctcagctgatatcggttattataaatatcctcctttcctcaaccatgtgtat

SEQ ID NO: 35630 - DNA, 1372 bp, Bovine  19866881042130
  misc_feature (1)..(1): n is a, c, g, or t
nctgagtaatatagatagaacttgaatcccatcaggccttctgattcaactccatattcttttcactatgatgagcttctggaagaatgttatagtctatttaagggggccatgtgggacccaaaccttgattgtctatagtgagacttcttgaagaaagtttggtatgtgttaacagtactacttaaaatagcagatcacagaggcagtattggtgtaagggttaagaacattggctttgtggtttgcactctggccctctatgaaaaggtgtatggctttgagcaaattactgacatttgttgcctcctctcttgtttattgaggtataagtgagttgatgcaggtaaagaactctgaaggtttctggatattattattatcaatagctaataataataaactattgtttttatcgttcttattgccatgctggtttatcttgggacagcggggtatccaattgaatgtgtcgggaagtatagggctactacaaccttctttcatttgaagaacaatttagttataattgatacagggtgagaagtcatctgttggtccagaaattatctgagtgtactgtgcagttgcttgttgccatcttccacgtgttacttctcccctccctccatctcttcattgtttctttgttgacttgaggctggaaggataatgggatgaaagagaaaagataataggagttattggggtgggccaaaagtttgtttgggtttttctaagatcttacagaaaacccaaactttctggccaatccaattatctatctatctaaaatgggcattcccagcacaagaacatcatattagaggcatggcagcaagaactaccagaatgtgtctcccctggctgtacccacaaaatggtgccatattactgtccgtggtgggcttagatggtgggaggtagacagatgtgagcttgcagtcggaggcagggagggactagatccccaagtgccttgcattctgtcctggagagttcagactccgttgaaagtcacgggaagctattggagctttgtcatctggggaattaattgatcgcatttgcttttggaatcagtcttgagcagagggtgtgaagggcagatggaaattgacgagaaaaaagtcagagatgtgggtgaggggcgtcggagagaaataattaggacgagagccaagatagtgacaacaggaatggggaagagaggatgcgtgtgtttggggtgctcaaaatgaggttccaactatgcttcctatttaaaacaagatgaagggttgaggcatgaatcgacagttacccttgtggcgtaatagaatatctttgaaagtttgtctaaaagaatgacattaaaaggaggcacacacag

SEQ ID NO: 35631 - DNA, 1601 bp, Bovine  19866881085596
  misc_feature (1)..(1): n is a, c, g, or t
nccactcagagtttcaaattaagtgtgaggcagcaagcacagaggtcttggttggctacacccaggcatttccccaaggagagcttatagaccactctagggcggtgggatgggcttcactcttcactatccaagctgctgctggtatgctaaccttgttccccgggaaatcatccatgcaggagctcaggcggatggtcgttggagctgctggagctcctggtctgcttgcagatcgggcacccaggagaggaggagagagtgtaacaatcccgcaccccagaacggaggtgcctcgtgtccaggccacagggtgcagacccaggcatgctgagtgcctccgggcacaggctggagccgggacaggggatgtcactgcttgtgctgaccaatggatacagacctcactcagctgacagaagatacccatcagcacggactttttctttgttctggaccagactgcaccatcaacaaccaacagttctatcacccacataactcagtcaaaactgggtgttgagaggtaatttgagggttagccactcatggaactttggatcatccaaaaagaaaaggaactttctccatccatgtcttagaggaacttttaggatggtggagggacaaggcaggcagatacttttgaaaccatcaattaccaataaaacaaagtaccatgagaatgatctcagttctttgataacatttgttcatttggagaaccattattagttagcaagataactgaaacaaacagaaaaattaaagactgattcaagttccttcaattttccttcactgggactcaacatattcttgtattccttcaattaatctctcgtgtttgcttgagttcttaccacaaatatcacctttctcccatttattttctcatagcactctagtcttttctttcattgcctttttcacaattagtaattatatactggatcccacatttcctgtgactatttttgacctctctccccatggatggtaatctggaaggcagggatcagctttgtctcattcagcactgcgtccccagaggtcagggctgtgccttgaatcagagggaattaacaagcatctgtgggtgaagggagggactgaacgaagagtcacttcagaaatgtggtctctcctccactcccagagggaagtgtgaaatccatgcatctgccagacacctcaggcttcccttcggtttcagctggtaaagaatctgcctgcaatgcaggaggcctgggtttgatccctggatcgggaagatcccccagagaagggaacagctccccactccagtattctggcctggagaattccatggattgcatagtccgtggggtcacagagtcagatgggactgagtgattttccctgtgctgtgactttgcccacctgtggaagagccagtcatatcagcctgcctcactgttcccacggtattccaatcagtcctcaaagagtgaacatgggtgttgcattgagttttctgttgacccaaagattgtgagctccttgagggtaaaacctgccctcccagttggtacaaaaactgtgtattactcacacacacacacacacacacacacaca

SEQ ID NO: 35632 - DNA, 2537 bp, Bovine  19866881088254
  misc_feature (1)..(1): n is a, c, g, or t
ncagcacagggcagggattgcggctgtctttccacggccaaagtccagggtctagaagagtacctggttttctctgtgtttttcctctgcatgcttttaagttgagatgattaggtacaaccagtttatagcctacttgttacatttaacacaccagaagcaattctccacattgtgtccaatagttcacataataagtgctccatagacattaatttccttcttcctatcttgacttccttcctgaaaaacacttatacaggtacccatgctgtgctgtggtttttgtttagctgagacagagcaggccatttgaaagactttgaaagatgtaagcaagttattaacctctccagacctcaatgtctttatctacaaaatgggaacaataaaatctgccttgcctcattttcagcattgttcaaggacctaatcagatattggagcaaacatctcattatacattggggtgaatgtctttaaaaaaaaaaaccatggcactgtataaggggaataaaatttacaggagaagagatgacatcaagtcatttgtaaagcaatttgaaatccatgagtaaaaagctattggcagtggtctctactgagccagacatgtcctaatgtttgtatttaatatgccaaacagttgccaatgcctaattctaggttggtaccctgcaatagctttttttttgatgttttttttttacaactttcagctgtaaaactggggtcaattatttttagccatttcttcagcctgtctcattagcaaagtactttgaggtaatgacttgggcatatttgatgattgttcattttgaaagatgtcattttcagacttttctggaagtttcaaatctgcctgtgggagatctgttttatgccaaaatgtcatttcagattcaagcctacatactgccttatgcgaggcccttataaatgtttcacagcacctgcattttttatcatggcccttgcatgtgaacttggatttcttgtgcttcacctccactctccgtatgaaagggagaaagtaatatttttaaatggccttttttcccattcgtcagaggagataaaatcccctaattatttccccttgtgcatagatatttatattaatattttaaggaatgggttctttatagtgttattcatgaagccatgtgttaaatttaaaacaaatgtgtcctaaaattaatatttaatccaagtttaatacctgaaaccagattcatgttgacttaatttctttggtcataaaagaaatttatgaaatgattccattttttttcatccattcaacaaatattttaacagacttattgaatatgtcccacattatctcttttaatccttatgataacatggcaatggaggtattattattgtcattgtcattttcctataatgtggatgagaaagctgagatacaaatagcagggctataagttatatggctctctgctgcattttagggtctgaggtgtgggctgaagatactacctgatcaaaacccctagggtaagcaccttggaagagaaccagagatgccaagaacagtagcaaaaatgagagagaaagagacagagaggcaaggctttgtagaaacttgaagagggattagcatcagagagaatctggattatagctccctaactttgcttcactttgggatcatctaagaatcccatctttgggatcttcactttcggatcatctaagaatgactgatgcctggcttctccccacagacattgtgatttcattggtataggatgcaatgtggaaatcagaaatttttaaaggtttcccagatgattctaatgtataccagaaatttggagacgctaatacaggtgatgtgtgatgtgctatggaactgaaataacccacactccattttgtccatccaggttttttgatgtcccagtgggttgggctggtttataggtcttgggaggaacataatgtttacatatagaaaacacaagcttcatgccttatcagaggaagaaatgcagcaagtgttaatggggagagagcaggctttagtcagactgtttctctgagccttggcttcctggtccccagcatggcgcccgtctagtaggtttgttgtaagaattaattccaatgaaattccttttatctaatggtatcagggtctttgggcttaccaggtggtgctagtggtaaagaacccacctgccaatgcaggagacaaaagaaacacaggttcaatccctgagtcggaaagatcccctgcaggagggcatggcaacccactccagtattcttgcctggaaaatcccatggatagagaagcctgtcaggccgtagggccacagagtcagacacaactgaagtgacttagctttgcatgcatcaggattcttagccacttattggggaaaaaaaggataataagttaaaacatgtatagcagatagtattttccaaagatggccaactattctcatcccatgggtctacttggaatgtgctactgaggcaggatcccatgctgtgtc

SEQ ID NO: 35633 - DNA, 723 bp, Bovine  19866881128718
  misc_feature (1)..(1): n is a, c, g, or t
nccctcctgggtgattatattatccaaatctggacattattgcagaatgaacagtcaaccgtgaggatggagagaatgttccatcttctccatctcaaaatagtttatcaagtgggagtgaattcacaatggagaggtctccaggagaaaaggagataaagactgaggcattctttatgtttccactttgaggcaaagatgggctacctggtctcctcaatattttcaatcaagttggcttctctgattttttgttagtattcctcaaatcccttgacattgctcaaagggttcgtgtaaagccttataatcttttctggaagttgcatttgatccagtgttgttttaagaaaatgacaatttgttctctgcttgcttcataccatatataaaatctcatccaccagaagccctactataatcgtattctctctttgctattgtacatgcatcctttttcactttggctgccgggaggctgaaagatagatagatatagaaataattttttttcaatcgtaacagtcgtatgacccatggtttgcatgtgtgtgtatatatatatgtatgtgtgtgtgtaaaaaatatataatttaaaatatattttgaatttactatttctattatctatttaggcttacatattcctggccccatttatttaccacattctgtttaatttattttactgtaaatgttttaagtcattcacaaaaatttttt

SEQ ID NO: 35634 - DNA, 1286 bp, Bovine  19866881179359
  misc_feature (1)..(1): n is a, c, g, or t
nctgattacctcattatattgcccctctgtaatgaaaattgggtgcaaaaatgagagatctggtggttataactactttttactaagttccttctgtaagtgatcatcttgcccattaacaggctttcaaatctcagagaagaaagtaattgtgactcttaatagcatgtgtacacattacttatctgctcagtctccactgtgggccaaaatggatggatagttgctaaaaacacaatgtaacggtttcttagtgaaaacaggaagaggatacctgcagcgctgtcaaatgcatacttaaggtgaagccaaatcacagagagtattgttttgtcaaacctgggaaaattagtagataagagcacagttctaaccacctccccccacccccaactgctgtgcaagtcctgcctcaagtaaccattttaaagaacccacatgtggtttccagtagtctttgacctttcattaaacattcaactttacgaggcaattgatttttgctggtctctggggtggtcatggagatggatttcactgtagttaatattattctctttttaggacttttgccaagtgagaatgtattgttaatgaccttgtctgaagtgatgtgctagtggagattatgtgatgcctctgcctaaggactgaatcttggacaaggagatgaaggaggccttgcctggagatggaggggactggtagagggaatgctggccctgttctttctgggtagtgtacggaaatgaatgcagcacagagactagaggcaagcagagctcagctcggacccccacgtggctcttgaccatatccctcatctgtctaggaggttgctgccttctagcattgctgtcaggattagataagatggcaagggtgaaacatctcatgcaggacctgacaagtcctggatgctcaacaaatcttaattctctttcttttctccctttatgccttgaaaagaaacacaaattacaaagaattttacactgctatacattttttcagatggaagaaaaacagaaattataatatacccatcgtattacacatggggaaactggaggcataaacagattaaagaacatgacctttctttgcctgttttactcaatgtcccatgagtgccagggactaaacaaaaagtgttaccttattttctagacagatttcaggtttcatgttgtttgactgctctgcaggtgtagcaccacctacctctcccatcccccactcacctctatgtactatcttcactctagcctggcagacactagtct

SEQ ID NO: 35635 - DNA, 1267 bp, Bovine  19866881187645
  misc_feature (1)..(1): n is a, c, g, or t
nacacctccctccataaaaaggggaactgacaaaagttgctacagtaagtaccttccaaaggatcctgtggtattttccaattgttaactttatggtgattaacatttaaaatgggcttccaaagtgaaaatggtgatattatttcactagagaattcaccaagaaaattaagaatcctagaatgggacctccctggtggtacggtagataagaatccgcctgccaatgcaggggacacaggttcgattcttggttcagaaggatcccacatgccacacagcaactaagcccatgccccacaactactgagcccacactctagggcctctgagccacaagtcctgagctcgcatgctgcactactgaagcctgcgtgccatagagcccaggatccaacaagagaagccacctcaataagcaagtgcagcacagggatgagtagcccctgcttgctgcaactagagaaagctcgtgcatagcaagacccagcacagccagaaataaatactttttttaaatgtggtgctatatggtgcataaaagcagaccatttagaccaacagaaaacaagagagagacaaaagtagactctcacatatatggtcaattaagaaaaaaagaatcccagaataacgttggcagagtctctcaattcatccaactctttcagttgagacatctgtgtgtgtgtgcgtgtgtgtgtgtgtctgtgtgcgtgtatataaatatatgtatgtatatataactttattaagtttagtttctttattaaatgtgaggcatcctgaaaggaattgaaaaataaaaagaccaggttccttccttgagacgttctaactctctccctaaatgattagcaaaaaaaaatagtaagagttgtcacttcttaaatacctgctatgtcccaagcccactattaggttctatatatatatctcatctctaattctaaaaatcctcattttctgagtgagtaaagaggttctgcaggttaaccagcttgtccaaagttttctcatataatgtggagccaggtttgaaacaaaagatcagttaggggccaatcagacaaacagagtccttgccaagttttcaaagagagaatttcatgtggggaacccttacaatggtgttagaaaagctgaaaagccagggaaaaaggaactgatccagggattagcgagagcaggaagctgtgagcagtcctgggattagaccaacaaaaaaaggagatgctgtgaccaggatgcaagacaagggactggg

SEQ ID NO: 35636 - DNA, 1054 bp, Bovine  19866881244605
  misc_feature (1)..(1): n is a, c, g, or t
naatcctttattggggcacctgctgcagcaggggcgaatgagaacaaacaataggttcccttgctggctggctcccatagaggggcaagctttttccttatgtggagtgaggctagcggtgtgtccaggggtcaggctgggtagatggcttatgtgttttgcccacctcttaggtggtgttgcatgcagagggcatgcacaggttgctgctttttgctccaagctcttcaaaagtagcagttgggtttttgttctccttgtatctttggggttcagaatgtgccccaactgcacatgcatgcagttccatacagtttctttgtgtttttttgttccaggagaggtatgttcagttgcacgcattgcagcacggaagaaaagggtccctgtttccaggcctgtctcaaaaggagcttgtggtgatttctggggttaattgattaaaaagtcttaaagggcaattcctggcatggaggcaagtctggagggggaggtccagggctcaggaagagagagacctgcttgaaacaaccttggtcaagagacttgtgtcaagtcaagcattccaggcagatacaggatgaagttgaaatctataataagaactgacagccataaactaattttaaactcaactagccttgggaattagaaagcagtccatccagggagccggaattgggtctgagatttttttttaaaaagaaaggtgttgccagaattggctttgttacatacttgggtgtgttatggtctgagctaggcttttttttttttttttttaatttgaagataatttcagaattacagaaaaaagtgtaagaacatacaaaaaataccctacaccctttacttagattcacctgctaatagttttatctcatttgctttagtatttgtgtattctctctgtgtatatccatagatatacatacacatatgctgtatacatgtccgagatttgtttttcctgaatcatttggatggtgcatgtagcttagccctttatacctaaatatttggtatgtattctctaagaatgggcttcccaggt

SEQ ID NO: 35637 - DNA, 938 bp, Bovine  19866881287164
  misc_feature (1)..(1): n is a, c, g, or t
nttagagttaatttatagtattttatggtatgcatatgattaatactcattaatatgaaattctactttcttggggtgctatgtataatttttaagtggctcattaaaataaacaagaacagaaagagatcaaaggctgcaaccagaacttgtgttcaattctcaaaggtcaatttttaatgtaaatgtaaatgcatgtgtaagttggtaggatgtggggtgggtagaagcaaaattaatgctgaaattttagagtccatgaggaagcaacatggaatagtgagaaaaatgtgctcttttggagtgaaacaagtccctcaaccattctgaagcttggtttccttttccacaaagtaaggctgttcttactaaggctttatctaataaggctattaaataaaaggagggatgggggattccctggtagtccagtggttaggactttgtacttccactgcggagggccctgcagattcagtccctggtcaggaactaggatcccacacgctgtgcaatatggccaaaagaaaaggatgttggcaagtgcttggtacatggaagcatctggtagaactattaatagtcctctgagccactacctccacatattaagttgatttggaaaatatgactttgtgggagtgaagacaagttgacgtagacaaagagttgattttttaaactaaattttctctagcatatttaggaaagaagccatagatacaaattccactaactctaagacttataaattgtgagctatctgctctggaaatgtgcgctcctggcacattgcagatatatttgtctttggtttccaacacacacataactaggtaaattgctccttttaaattatttcaagtatgatgtaaacatttacaactttaagccaaaataaatcccagtgccataaacttaaagacacagctttgaga

SEQ ID NO: 35638 - DNA, 1016 bp, Bovine  19866881332380
  misc_feature (1)..(1): n is a, c, g, or t
ntcttttttattcccttttccatcctccaagctttaaaagattttacctttgtcaagtgcagaaattgccttgatttcttaaagtgacaaaatatgcttgggtgtttgacaaggcattccgccagcctcgcagatagaaccagcaggcacttgagtccctgaggcatctctgcagaggcagctcagagagggactcaaaggctggtagacacctctcctgctttggctcagaatctaattttcttagtcacagcccactgtggcagggtcaggaaatgaaaataccctgatctgaacaatgtcaggcaaccctgtgttccagtgccagttcttggagtactggctgagtgaccccaggcaagtgtcctcacttctctgggctccaacccatttgtaaaacaagcatgataatacccacatcataggactgtgatgcagatgccataagttggccataaagcacccatgtgatgcttggcatgtaactgatactcagagactagtagctataattatcatcaccggtccaggtttcgtggctaaatccctgtacagtctgagcattttctcatgcaactccccttccttgatcaaatgagggagatcagatagaggtgaaaggaagagaggggatttgaattcctaagtactgacggattgcaaaaccccaaaagcgagaggatcttggcttcaaatgttggaacagttggcatcatacagaagagtgggcttccccagtgactcagcagtaaagaatccacttgaagtgcaggagctgcaggagacacaggttcaatcccttggttggaaagatcccctggaggagggcatggcaacccacttcagtattcttgcctgaagaatgttatggacagaggagcctgggggacaacagtcagtggggtcacaaagagtcagacacaagtgaagcaacttagcacgcatgcacagaagaagagtaagacttagtttttgggccctgaaagaaaactcgaccaaagagtagaagttacagg

SEQ ID NO: 35639 - DNA, 1381 bp, Bovine  19866881354091
  misc_feature (1)..(1): n is a, c, g, or t
ngcgtgttaggtaaatgacttcacacagcatttgtgtcttagtcactcagttgtgtctgactctgtgttatcccatggactgtaacccgccaggctcctctggccactggatttcataggcaagaatactggagtgggttgccatgccctcctccaggggatcttccccacccagggatcaaacccgggtctcctgcattgcaggcagactcagtacccggctgcaaagaaacattcaatatatcgagtatccctgaccttgagaattccaggtcagaagagttttcttccctcatccctcctgacccagagacagactccctagggtcacaacgagacagatgcatcccacccctgagcgtcatttattttcacctcaaagactgagccctttatgcctgcactccggcagcccctccagacaagaaggaagcacaagtcacagccagtgagctttgctcacaaattcctccttcacgactgactgagccccgataccggaaagaaacattctgttgaaacatgtaaatccccactcatctccaaattgggtgctggagtgcctcgggggaagtgactttacaagcccactgactccagccaaggtagatgccaattgctcttgcgagataattcagcctgacccttcgctccccaccaccccccgccccagaagcaagattgaggggctccctcccttcttactagaggaatggccccctgagctgctggggaacagccccgtctcccgggaggcagaaggagagaggccgtaagccgcctgcttctagccgtcctccccagacagcacagggggagttcagtgactcctggctttcattgtcacttgaacaaaggatctctgatactggtcaggagggctatcttgagacaaggtgtctggactacaaggtcaagcttgcctgtgctttctttcataccctcctggattccagaggcagggggatgctatggtggacccagccaccattgcaactccgtgcaagaaaatgctttctagcctgctgtgcctctggggagaactgttatcttttcttgtactgctgcctttttaaaaaatttatttccagagctcagtttcaccaatattcaactcacagccaagtgggctgcatgaagtgcccagccagccctatgtaactcaagatgctatatccacctcatcatcagtagcaagaccacccatgttagttggaaagattatttccctcctaagtctttgggagcctaagtccaatctaatatttgggagcaaatattagaaaatcggtcagcagttccactaatactcataatcataaaaattactatccacttctgagagctcagtctcccaggacttaataaccactctatcatg

SEQ ID NO: 35640 - DNA, 2307 bp, Bovine  19866881364754
  misc_feature (1)..(1): n is a, c, g, or t
naaatcaggaatttgggtttaacagatatatacaactatgtctaaaatatatgaacagcaaggactgtatatcacaggaatctatattcagtatcttgaaataaacctataatggaacagaatctgaaaaagaacatacaaatatatgtatacatatatgtgtgtatatatatgtgtatatacacataactgaattaatttgctatacacctgaggctaacacattataaataagctgtatttataaaataatataaaaacacagaatctactgtgtaccactcgagggaaggacatttagtatattttgaagagatatgggaacactggatgttttattttgcaagaaaaaaatgctgttttgatgattatttttaatgagctccacaaggtaaaatgtttacagcaataagaacataaaatattacagctcacttttaagtgttgtctatgtgccaagtaatgtgctaaatgcttaataggtattatttggtttaataatcaacatttcagataaaatagatgcaatttttatttctatttcacagatgagaaaaataagaggttgcaagattaaagaaatggaggaacctggatcaaaatccatgctggtctgacctcacaccacagcctctttatcttccactcaaaaacactaacagtgattgcctctgggtagaaatattatatatgacttttttgtcttttgggcttccctggtagctcagctggtaaagaatccacctgcaatgcaggagaccccagtttgattcctgggtcaggaagatcccagagaagggataggctacccactccagtttttctcttttacacttttttgctttttccaaatccaataaacacagattgcttctttaaaaaaatttttttttgaaagaaacattcattaaagttgaccacagccacgatatggttaaaggagactgctgtatgcaatggatccttactgaaaacaggataattatgaacacaaggagctttcatattctgctgaagcttctgttcaaatctaatttctcaaagtatattgctagacgctaatgaaaacccaaagagatacatgcattcaggagatgtatagccaatgaattttctgttgtttttatagtgaacaacttttttatatcctaacagttttatgccagttatgaaaaagataaataaatatttatgacattcactcaattccacagtaactactaagttgctcatgttctcactctggtttgaaatgtgcatattttagtggctgggagtctcaaccctcaatgagaaagccacagaacactgtcattttcagaccctaaaactactcatttgactcactacagggatttgccttggtagcagcacataacaagcttaattaaggcagctgtagacacagacagatacaaagcccagtgctgcccaacgaacagctaagaaaacaccagaattgccatggacactggttttacaaagcctcaccatgtatcagaagcatctgatcaagaacaacaaacaaggagactgagggaacacacagaaataaataagaaccaatttccactgtttaactgtcttgcagaaactttcctttaccaaaaaaaaccccaatttactccttggtctactgactgaacttccacctgaggggagatttatgtagctataacaggctaattataaagaataggccaaaattcaccaatgggtaattcatgagctaaaagcccataggccagttatcttctgcctacacacatttttttttgttgttgttatttgtttaaactgatatagtgccaaatttttggacagaagtacttctcattaaaagaaaaaaagtttctagatttttttggaaaaactgaagaccaggctacattagtccagcactctcttattgcaaccatcagttggagctgaataatggcttacctagcatcccctctcgccactccagactattctaccagctaatgtcaactgcatgactcttgcaggcacctgagcatgaagtgcttgtaacagggacacctgaaagactattaaaatacaccacacctgacaatccttgtttcacctaaatgaacataaccgtatttctccaagcactgctctttgaatccaggcaacaggagaagtgagggatgcagagaagcatcctctctgcaagtgaggtctatcttgtcaccatctaccgaaccatctactggtcatccttggacttccctggtggctcagatagtaaagcgtctgtctacaatgcgggagacctgggtttgatccctgggttgggaa

SEQ ID NO: 35641 - DNA, 4652 bp, Bovine  19866881600133
  misc_feature (1)..(1): n is a, c, g, or t
nttctctgttatgtatgtcttatacagttgtttaaaatgtgttgtaattgggtatgtctgacagcatgctttccaatacagatgtgcccttgggagcaggaaccatgaattttcatcagtgtatcctcagcgttagcacacatcttgcagatagtaggtactccattaaaaaaaaaaaaaaaaaaaaacagttgagtaacagaataaatgtagaagttatctattatgacaatatcaagctaatacatcaattttataaaggaaactcaaactgtgaaaggaaaagtgcccagactaaatcgtacaagtagttagtgtccaagtcaggattgaaactcaggtgctgtcagctccaatccagaaatactcttttcatcatgccagcctttatgtgccatcactttctacatacaactcaatagaaccagaggagttggatgcagataaatgaatgtaaaatgccatatcttaaattaaaaatgatttcagaagactgaaaagagggtggaaaaggaagggggggataaagaggctgatgtaagactttccctgtgatatagtcacttttcatttgctttttgtttttttccaatctcttgccatgtaaccaaaagaattggaatggggagattgattgggcaatcagctgtttcccaagggctgtaacagaatcccagtcttttaggtaatttaacctggaagggggttttgctatagggaacagcctacgtggttggggatggacaagatgatttaataggcctcttcctgccctaattactaatcttccttgtgagaacccccttcttgtgctgcattaaagactccattaatttgtttgtatataaattcaagccacttcggttctgtcacacttctaagaggctcccattcaggagtctgtggcttgcatcacccattaggatttactgataagaaagacgcattatatattttattaccttgtctgtggagcacatgtgacaactataaagtacattcacgtatagtatgagtaactgtcagggtaattgataaagtagtctgtaataaaggtaactagaatggcattcctaaatgttgaggtctctaagtgctgaagaggagggggtggggggcactaaataaatccagtctttcagaaattgctggcatttaaaaaaaaaaaaaaaaagccaaccagaatccttaggcctgcatttcactttcaagtgtaattattttatgttgcaattcatatctgctgacacattggaatcaactcaaataaaggaatgctataaatcttgcattgtttggattaagcacatgttgatactgggagaagtctaggaggaggctgctcctgtgtgtaaatagtttaagaaaatcaaatggctggaaaagatgtagatgtagttaagataaacggtctaccagcagacttccagcctgtttaagcatccaaagatgtgagaggctcagtactttatcctggaagtgaatggtagcaggccattataatcatatgaataataatactagctgacactatcaattattgggcttcctctacatgtctgctacctacatatattagcattttatcctcaagacagccctacatgggaagtattaccagttatgttatctggagcatgctatttaatttatctgtaacccagattattcatttggaagtggaaaatgattacaacaaccctcacaaatgtcacagggttgttgaaaggattcagtgaggtcaatgaacatatggtgcctagaacagtgcctggcacatagtaagtgctcagaaagtaggagctggccgtatcattttcactttaaagatgagaaagtcatagcaaggttctgaaacttgcctacttggaagatatgaacttgggtctttttcattccaaagtctaaattcacgccacccttgctgcctgtatgctacatgttttctgtgttaacatcatgctttggtctttgttctgacttttgagcctgagatgcagtagcttcgtcttcccttcatccctgttggtctcccagcctgtcgaagctgaggaaggtgatggagcaagattccttggtagaatcttttgttttcaactgataacccgctggcatgctacagtccatgaggtgcctgccatgctgcagtccatgggattgcaaagagtcagacaggactgagggactgagctgatctgatacctgctagtaccttaccacagcttgtgtcttgtccatatgtgaattaatgtggcccctcaggtggtgcattggtaaagaatccacctgccaatgtgggagatttaagaaatgtgagttcaagatcccctggagtaggaaatggcaaccaactccagtcttcttgcttggaaagttccatggacagagaagtctagcaggctacagtcatagggtcccaaagagtcagatgtgattgagcacacatttagacttttactcttttttggtttttttgaaggataatgctttaagaattttgttgttttctgtcaaaccttaacatgaatcagccataggtatacatatatcccctcccttttgaacctccctcccatctccctctccatcccactcctctaggttgatacagagcccctgtttgagtttcctgagccatacagcaaattcctgttggatatctattttattttcactcttttttgcagcatgatctgtctacacttcctcaccaccccaccatgaaaatccgttggcggttgtgatggcagctctatactcttaactagaaagtctgtttgaatgatgacagaccattgttgactttggccaaatgtttttcttctccagctgtttgtaattttactggttttatgaactagaaaaagtactagagaaggggtcaggtacaggattgggccacctcatatacctttatctaaatgtccaatatcaaaagacataataaatgccagctcttcctctgacaggctgtgtatcctcgaagatcactgggctacagtttccccagatgtgccaggctatatcctcaactctttctgcagatgtaccaaccagcagaactgcgggttgcagagtacaggctgaggacatgtgaggactgactcttcacacccctttccctacattgtgttgaaaatctcacccttttcataatacttttataaccagggctggaaaggaagtagactacaacattctaggaagattttcaatgtgagagtgtagataaaatagcttaggaacagaacgaatgcttggtatcaatacagaatcagaagggaacatacagggtcaatcctagttatacttgtgagctgcattgtcttggcaggtgatacaaatgctctggaaactcagtgtcttcagttgtaggtaatgatacatattgcactgccctgagggtttgaactatactatgtgtgtcagaaatgccttgaaaaccgcaaaatcccatgcaaagtgttaattgctgcaaaagtggaaagagggtggcatttaaggactgagatagaagctcaaagagcagctttccaactgaccagttgtgtgatcttgggcatttaacctccatgagcctcattttctttttctgtaaaatggtcaaaataatctacataccctacacctctttcccagagtggttgtcaggctccagtacaatataagtgaaagtgtttgtttcagacttgaactctacaaacgttaacaggtttacagttctacaaacgttaacaggtttattatagggatggccaggccgcggagtggctctgtcgttacaaatccaaaggacatctctgtaaacgcagttaattttcccattgagagccccttactttttactacaagacaatttccagctttctcagccaaatgactcttctcatctatttcataaccttcactagagaaagtatagagaggaaacagaaatcaaagccaggaatcgctgggcttttccacataggtgtgaattagaagagctgtgactgtcttggcctctcattttgctgtctgctggacggtgtttgtacaggggtgggatgaagtcactgagatctctattcaggataaatgctagttctgctttgtagccaaagatatatgccaggacataaaaagaattctttccatggtgctcctattaattcatagcagttatagagagctgtaaaaagccacctaattactacttcttcctgtgtatatttcaaagatggcaagtatcttagtagttcaaggtaagtctagtattaaagccattgggctataatcttctttctttctcctgtcttgtaaccatcagctgagtcagtgaaagaaaaaagcaactccaagaaccatttttatccttgtgctccctttatccttgtatgagcagatgagtccctgagttgtcctctttgctcctgcgggcatctgtttggccacttgtaaaatgaggacaattgttggaatagcttctaaagaagtgtagctcatgcaggcagtagggctgagggaccctgtgaaggcctccgcctgccttttgagctaatctgtgtacaaaggcaaagcactctgagatgagaaccatgtccctaaacaatccctgagcacagtctgctcagctgggaaagagtatttacacatgttgttgacatgtatgt

SEQ ID NO: 35642 - DNA, 702 bp, Bovine  19866881602245
  misc_feature (1)..(1): n is a, c, g, or t
nctagtagtgactggaagtagaagacactttcttttgtcatttctagtatcagagactttttttttcataggagctacattattttggccaagcttatctaagcctcagttcctcatctggaaaacagggtgaacagctgggtgctgagtgaagatgagatgaaagatggtacaaagcaaaccctgacacactgtccctctcagtgcctgtccatcactgtgtttctgctcatctcctccttcccgacttatgaaaacatagcacttctttttaaaaaaaccattgccaaagcctttaacaaagcactctgttatattcttattactagactgccatttctaaaggcacgtttaagaaaggtaagtgggaatgagaagtgattacagaccaatgatttcaggctgacacatgaatttagctgacacatttaaggtacttatgttctcattttttaaaagccatattttaatcaaagtccaacatgtatttgctgaacctaccctaggtgcacactattaggttagacatggtaagaggtttcaaggactataattagaaatacatggcgaattaaaatgagatatgatcctttataatctagttatgacaaaatgacatgtagcaccaaaaagtgctttgttgtatcaacaaaaggttttcaggattcagcaagagatccagtttttctgaagcagcactta

SEQ ID NO: 35643 - DNA, 830 bp, Bovine  19866881764008
  misc_feature (1)..(1): n is a, c, g, or t
ngcgtgtatctagcaactggtcttagtttggattctgtagaagtcaagtttgagacaaggattcttggagaagcaatctactgagggaaggctcccaggagaaggggagagaagagcacaggctggagaagggggagacagctaagcaaggatgtgggctcgactgaggactggctgcatgctggagcatgaatggaggccaggggactgacctcttgtatgctggctgtcaggcattggctgtggccagtaggggtggtgatgacaaacaacctcccagcctggtggctctccccagcagacagctattctagggggaagggagcagctgtgagtcaatagcagccaacactcagcagctgggaggtatgtgcaccagcccagtaaagggcatctgggcagggcaccaagaacacccactactgtacacagtgagagaataatggtcccctggcttgttagcatcctacatatagcccagccagctcatttgacaggcgagaatctgatgccaggaagaagagctgaagttttgacttctataccacttcctttccatactcccagagtcttccatggtctgatcctgcaccaactctactcttctaccttgctcagagcctagctgacattccagtcctacctatgcctgggtcctaaggcttcaggtccttctcttgctggcattcttttactcctgcttctccttctgtggcagcctgcaaagtaccttacctttctctactgagcaattctaaataacatgtagcctcatttcataacactggaacaggaggtctctcataggtgacctatagagtgttttgtcc

SEQ ID NO: 35644 - DNA, 1257 bp, Bovine  19866881863092
  misc_feature (1)..(1): n is a, c, g, or t
ncatttaaaagcaataatgattcaaaattgaatcatccaacaagaattttaataaaatagctctagttgaaattttcaatgtttaggagacagggactcctttaaaactatcccacaggcaaaataagaggctctttaagcactacaaaatacttgatgttaagattaacaacaacaacaaaaaaaaacacatgaagccagtttgggatattcaagaaaaaggaaagtataaaatgcagcatacatagataaatatctcatccattcattactccagagcaaaaggttgactttctggaatgaaatgactcagtatctttatagtctcttgtgtttcccaagataattttatatactttatctaattttatcctcccccaaacactatgagatgtgtattcttatacttcacaaatggacaagcagaagttaaattgttcaatatcattcaagagaattatcatttattaagttggatatattttatatccaggatcttatttcatgttcattaagctaatggtagaactgacctgacaatgcaggagacaaaagagattcaggttcgatccctgggttgggaagaccccctggagaaggaaatggcagcccacaccagtattcttgcctggagaattccatggacagtagagtttggtgggctacagtccatgcggtcgcaaagacttggacatgcctgaagcaacttagcacagaactgtggtaagcaactcttacagaagaggtattatcattttaatttgaccagtcgagaaacaagtgaaaagagattaggcgatttagtccagatgacccagctcctaagtcttggatttgcacacaggcctatctgacaccaagtgaatgctctttttactgacctggagtccttcactgaattagtaatagcatggagtccttcactgaattagtaataaagttccatcctataacagcctgttgcaaaaaagacagcagctcatttcccggctaagtaaccctttaaactgcaaattttgcagaagcttttggccaactcaccagttcaccttctcctgtatggttaccccaggctgataagtcatcaaaaataagaggaaaaaagcagcagcaaacatctcatccaggagctaccaacctgtattacctagaaagtaataaaactactcagggagttggaataaaagacatctacagtcttgggatctatctaatgtttgaaactaaaaaaaaaaaaaaaagacaactcacttgatt

SEQ ID NO: 35645 - DNA, 827 bp, Bovine  19866881945213
  misc_feature (1)..(1): n is a, c, g, or t
ncccgcactgatgctatttcttacatctgttgatctgcgcatagagaggctccggctcctacggacagagggacaaaatgagacccgctcttttcctgatagggttttctaagacagcttgggaaggagggtttggaattagaacagaaagatgacagtttatgatgaatgatcttaggttattttgggattattcagtcatggtgcatgtcattttggcatccttttttatccttaagaagaacaactcacccagttgtgcccttggttttcaagctgagcctgttagggaaatcacagggtctagcagacagagctggaccagctgtgtgatatggacaagacacttttactttctgagccttagtttccccaaccatgaaatgggaataattccatttaccctacagggttcttgtgagaattagagagaatatatataaagcctctagcatagtgtttggcaggaatgttcaagaaaataagcagtagaaaaggctcttcagaacatggtaacaatgctcatacatcaagtcaatgtttttccaaggctgttttatgaacgtccacttgagactgctgaaattctgtctcaagctgctctttggtttctgcaagcagtgatgactgggcgtgctttagagcgagagaacagcaaccacgccattagctcttagttaaaagcttctagggcttgtttccatccactcctgctgcagtttcaggttgggtcaggcacttgcctgcaaccctggggcttgtcttaagatatacacaaaggttttcacccaatatatgacacagcaaaaattcaatccaaatgcaga

SEQ ID NO: 35646 - DNA, 1358 bp, Bovine  19866880172548
  misc_feature (1)..(1): n is a, c, g, or t
naatgaagatcatggcatctggtctcatcacttcatgggaaatagatggggaaacagtggaaacagtgttagactttatttttgggggctccaaaatcactgcagatggtgactgcagccatgaaattaaaagacacttactccttggaaggaaagttatgaccaacctagatagcatattcaaaagcagagacattactttgccaacaaaggtccgtctagtcaaggctatggtttttccagtggtcatgtatggatgcgagagttggactgtgaagaaagctgagggccaaagaattgatgcttttgaagtgtggtgttggagaagactcttgagagtcctttggactgcaaggagatccaaccagtccattctgaaggagatcagccctggatgttctttggaaggaatgatgctaaagctgaaactccagtactttggccacctcatgggaagagttgactcactggaaaagactgatgctgggagggattgggggcaggaggagaaggggacgacagaggatgagatggcttgatggcatcaccgactcgatgagtttgagtgaactctgggagatggtgaaggacagggaagcctggtgtgctgcaattcatggggtcgcaatgagtcagacacaactgagtgactgaacaacagcaactaggtgtatcaaacagaggagttagtataggggattggttacacagatgatgaaataactgaaaaatgatagaggggacatgagtttagaaatagttaggaagctagtcctagccttaggactggagagagaaagtttccacataagttatttggtataagttagcagagcccaatatctggggccatatgctggaagctggaatcataataggctgccaggcaggaactgaggtcagggagagaggagctttcctatagaaaggaagctatagagcagacacaaccatatcagaggtaccctgtgactcagagagtccagggaaagaatagcagcttctgctgtcctctagtccttcggccttgcaccagtgcctcccattggccaaactgcttgaaagccagagggcaacagagcctgaggaatgttgctgcctaaggaatggagctgagagcaaaaggcacaggaccaacaagagcccagccatacacgctactcagtgtcatctcttggggtctcctggagtgttcccttctctggttaagcactatccttgtggtgtggtggttggttgcttagtcctgttcgactctgtggccccatagactgtagcccaccaggctcctctgtccatgggattctccaggcaagaatactggagtggggttgccattcccttctccagggcatctt

SEQ ID NO: 35647 - DNA, 1211 bp, Bovine  19866880417263
  misc_feature (1)..(1): n is a, c, g, or t
naactgactcttggaaaagactctgacactgggcaagattgaaggcaggaggagaaggggaggacagaggatgaaatggttggatgacatcattgacttgagggatatgagtttgagtaagctcggggagttggtgatggacagggaggcctggtgtgctgcagtcagtggcgtcacaaagaatcggacatgactgagcgactgaactgaactgaagtttattctagttatttagtatttagtcattgtttctgactctgggttgtcttttccagggccaatttccaattgccttactgctttgttgcctcctatcatagagcctgaaaaaactagatacttctattttcagacttccttccgtaggcttgaaggagatctctctcattcgatatcctattcattgcctttagacatgtctatgtgaggatttatctaaatgtgtagcagatatctcatgatgctgaaggaaaagaaaaaccagaactatctcagaaactcctacccctgaaatggttaaaccagtcaatcaattctaagactactgctgctgctgctgctaagtcacttcagtcgtgtccaactctgtgcgaccccagagacggcagcccaccaggctcccccgtccctgggattctccaggcaagaacactggagtgggttgccatttccttctccaatgcatcaaagtgaaaagtgaaagtgaagtcgctcagttgtgtctgactcttagtgaccccatggactgcacagcccaccaggctcctccgtccatgggagactgctaatgcccagacatcttggtatgtgatcaattacattgttatactatttaaacccctgttagttataatactagttggcagtgttaattcttaggcaataactgaacccttagtaaacatgcctatatttaggccttgtctctttaaagacattgcgaaagacactaagacaaaaatgtcctcacaatgtctctctaattcatccatagcgcatagtaggtgctcagtaaactcaagggtgctgaatgatgtctcactgctcctaggctggaccatgggcttgcaaatttctcttccgaaactctctaatcttagcctttgtgaaaaagtgtgtcattttaacatcagcaacacttcaatctatatttgtacctgaaagttacactggaaaggggagaaaggaagaaatatagttcttgattttta

SEQ ID NO: 35648 - DNA, 1698 bp, Bovine  19866880785386
  misc_feature (1)..(1): n is a, c, g, or t
nagagcagtagcgttcattccctccccagccgacttcatgtcttcccttaaatgtcattcctgccttgagcatgccctgtgctgtggctctccttctaaactctgtgtcccttgctctgctcagtttttcccacagtacttgcattatgacctagtctgtcattttctaatgggtttcaattatgctatgtttctctgtactaaattgcagggtccaaggggacaggaatttctgggtcttcctggtttactgtggtgcccccagaacctagaacagagtttcatcatcagtgctgttgacactttggactggataggtctttgctgtgggggctgtcctgggcgttgcaggatgtttaacagcatcgcaggcttacctgctcaaggccatagcatccctcctcaagttgtgacatccaaaaatatgtccagacaccaccaaatgtccatgggacacagactcacccctgttgcagatgaaaaggcctagaacaatgcctggcacaatagtgttttgttgtttgactatgtgttgttttctccctttgtatttaattctggatgggctatttgattctggtttttgcatttaaggctgccttccttttaaaacaggtatccaccgtgctgtctccaaagaggagtttatatattcttcatttggattaggcttagatgtgcaagtgtttgatgaggaaagacagtttcattcctaacccagacctcctagactttaggaatgtgaagccaatggatttaggtgatggaaccccactttggtcacgacgactggagaagctgtgtcatagagagacacacacaagagtaaagggtctcctgaagaaatgtttgcagtttggttcctccccaaaggtttttgaaaccttggtgtattctcctggaaatgagccgcgaatggtgggtggcagaggaaaggtgccaagtatgagagcgtgaacccagatagcacacacgagcacagtcaggtcagggtcagatgtggaaccactgaatgggtccctctccaggaagggactctctgtagggctttaggtcccgaaaaagattttttttaatatgttagcatctttcaggttcatagttcttttgtttcatttacttggtgctaaattctgtggctttgtagctgctaatgcccttttcctggacagacttcagaattgatttaatctaattccagtttctcctcttctcaaagttttgataatggttctttaacttcccacaaattagaaatgggaatgaaagtgagtattaggtttatattggcaggatgagatagagcaatggttcccagatgctgattcagagagaggtgtgtgaaattgttgcagatttgtattcagatgagaaagaaaagatggttgtgtccaactcatgctcacatgcatgaatttccatgtaaagccactgccatttcttggatttattctgagattttttcctgggcttcccagatggcactagtagtaaagaaccggcctgccaaggcaggagacataagagattcaatcccagggtcaggaagatcccctggaagagggcatggcaacccactctggtattcttccctggagaagcccgtggacagaggacgccgggggtctacagttcctagggtcacaaagagtcagatacaactgaagcaaccttgcatgcacccatatcttcctatta

SEQ ID NO: 35649 - DNA, 1217 bp, Bovine  19866881012079
  misc_feature (1)..(1): n is a, c, g, or t
naatgccatgaaactcacgttggaggatttggggcctgttctttttcaagagtcggcaaaaaaaaaaaaaaaaaaaaaagacttgcaagggttgagcatcctcaggagctagcttgcacgtgtaaagaaaatttcggggatgtgggaagcgctggtttcacacgctgaagctggaaacaggtgcaggatggaaccggtgcacagaggaaggctaaatgaaaaaagttgtaaaacttgtctgtggagcagacacatgctctttgaaataaaccagtgaaataaaatctgtgaataaatatatggggttggcaaaatttccctatagtacagttttccacagttgtctgatgtattgtcatcgacatctgttgtgtgactttgcaagggctgcatgttcagggccccctccttgtggctttttgtcttaagtctttgactgggacctcccttcttgtaatcttggttggaaaaagttgaaatcagaaggggaagatggctgcaactgccttgtctatcagttgtattttctggattgtcttttggagttgaagatatgtttagaatcctcctaaaaaagaaactgttaattgctcagttgtgtccaactctttgtgaccccatagactgtagcctgccaggctcctctgtcccttggattctccagacaagaatactggcgtggattgccattcccttctccaggggctcttcccaacccagggatctaacgtgggtctcttggattacagccagattctttactgtctgagccaccagggatgcccctagaatctgcctacttgtcatcaactcctctgctcccactttggttcagactgccacctggcctccctggctaattatctcttacctgttctcctgcctttatccttgctgactctcagtggatttttcaacacaggagccacaatatctatgttaaaactggttttcaacctgaatggtggcttgccccactcaggggtcattcagcaatgtctggagacatttttggtacaatggatgagagttactactggcctctagtaagtagagagtggaaatgctgctgagcattctccagtgctcaggacagtctcaaatgaagaattatctgtccccagattgttactgctgaggttgagaaacctcatggtaaatgtatcacatcatgttctctcttcagaaccctacccggtatcagtaaaactcgagac

SEQ ID NO: 35650 - DNA, 761 bp, Bovine  19866881073110
  misc_feature (1)..(1): n is a, c, g, or t
ncttgttaaggtcgtccatggtggtcataataataatgataccaataccagtagctttcattaattgaaggcttactatgtgccaagcattatctgtaggctttatttccgatgatactttgtgcaggtatttctgagctcaatttttcttttctgacaaaaccaagctattaataaccacctgccccttccaatgtgagggccaaatgagataagtgaatgtcctttgaaaattgtaaagtgctcaacgaatgcagtgtcattaatttctgctgaaatatccatctgggagcaagcagagggatagatattttcattcttctctgtaaacctttgctggggtgccctggaagtggtggaaacctgtatttggaagacaaaaagcatttctttggtgaaattgaaagggacaggttgcttattgcctcccaacctcccagattttgaattttcttcccctttattcttttctctgtgtgctcatcatttgcaattttatagaagcctattatggcttcgtctgagagagtggcaagggagaagaatatttaccacccaggcttgagccagagtgaaaatttgtaaacaataaaaatgctgtatttcaaataaagcatcattttttcccctcaatgtcagaatttaccggctttttctgatgctaaaccactgaattaatctcttaggaaaacacacaatttggaggttaaaatttttcagctgttggaacatttcaaatgccattgatattcttctcatgc

SEQ ID NO: 35651 - DNA, 1797 bp, Bovine  19866881221576
  misc_feature (1)..(1): n is a, c, g, or t
nttttttcttcttcttcttctttttttggttacctcttagatttcctgttcattccctggctttcattctaggtgtttccacttaatttcccccttcatctgtaactccctctctgtttctctcagtttttttttttttggctgactcccttatacatgcctcaggtctttatgtatgtatgtgtgtatgtacctatgtatctgtccatttgggtttccctaatggctcaatggtaaagaatgtgcctgcaattcaggagactcaggagatgcaggttcgattcctgggttgggacgatcccctggaagagggtgtggcaacccattccagtattcttgcctggagaatcccatggacagaggatcctggtgggttacagtctatggggttgcaaagagtcagacacgacttagcgattgagcatgcacacacatctatctgctatctatctgtctatcgtctttaatttcttgcctccctccctctgtccttccgtctctctctttctccttatctctctgctttctataattccccaatattaatgctcacattctgactgttactacttacttattcatcttccagcttagattttaagctccactaaggagagaccatgtttgttttccttttccagcacctgtgtagtatgtatgtagtgtcgggtgtaacgtagccactaaataaatatttgttgagtgaatacatcaatgaagtacagtttgagcttttggctttcttattctcactagatatttaagttctttaatggaaaatactgcattttaataaagtatttgtgaatattttatgactattttcataaaatattaagagcatttagagtcaaagttatattttaaagtcagagaagtaatattagaatctgtgggcattaaaataggttaattttcttttaaaaattgattttaaaattttctaacaactagcacatggtttgggaaaaaaaatcaaagaagagtgagtgtttcaaatgaaaatcagcattcatcagctttgtgtttctaatcctgtgatattaatagattaaaatttcagtaagattcaccttcaagaagaaatagatatatacatatgtacatcagaagactgcagtgttctcagaaacgtgactaccgttgttcagttgaaggtatgatgggaataaacagttcataccgaagggactttttaagccttgatttgtttttttaaaaaaatggcatatgaagggcacagtgcctcttccaatgttagcttgtgtttcctttaaccttcttcttcaaagacccatcctaaaaaaaattcagcctgttttttttttttttccctcctctctttcaaagacagtatctcaaaaatggtactaatttaagccctgctaaatgtccagatgcagcacctgggaaaaatgaagttcagaagttcaggatttggaacttgcttaagctaggagaatcttcttgctgtggttgcatgtctgattctagaagctggtaacctctttctcgtgggcatcgttccattgtaacagatggccccaagtgtggacgtgtcagagtgaagcccacgtgtgaacttgtccaagaagttgaaacactgctcagaatatcttctcctgccaatgatagctttgttgttgcaattagaactttctggattggaagagtgaacttaatgaaacataagagaagcctttagagctctgttgtccaatatggtagcccaggccacacatgactcttgagcacttgacatgtgactatttcaagctgaggcgttctccaagtata

SEQ ID NO: 35652 - DNA, 738 bp, Bovine  19866881468215
  misc_feature (1)..(1): n is a, c, g, or t
naactatctgtctgaacttgaaagacacaggctaacgctaattcacaaacatgaaatcccagggatcactgaacaccttgctaatttctagagagcccaacaaatagataaactgaaaactaaagtgttccatccccagtctcagtgggccctcctgtgcgctggacaagctacccaatccaatgctcttcatgatatgcctttttatgatctgtttaccaatgtgaatcccctgttatgctttaattaatttcctggagaatcaggggtgatctctataatcaccaaatgcgggacagccattttttaatagcattaatttcatacagaatcatttcagagaaagaagaaaaaaaaaaaagcaaaattgtgagaaaagaactgttgaaaaagattctagcatttactgaaatggtaactcttactttccagttccccgtatttccacagttaaatctaagatggggatagctcttctcttaaaaccacaaaggctgaagcaggtgtgtgtttattacatgccatctgtatacacctccccacttgccaatggtgcactgttggagaaccatttgggaccattcaaaaccattaagtctattaactgtgactatggccaagtctagtaaacaaatgtcatcccaacaggaaatgagttaagctggccttcaaagtcacataagcaaatattcccgcaagtcagagggcctcacacaaagcttctcatgaattcttctg

SEQ ID NO: 35653 - DNA, 1044 bp, Bovine  19866881759126
  misc_feature (1)..(1): n is a, c, g, or t
nactatcatcaattagtcataacctaactattctctctgctgtgtctggctgattttacctcccatgggattttatcaaacactttttgcttctatcccaatccaaccttcttcttctttcccagagcatgaactctgcagttgaacagcctgagttaaaatctaagatctgtttcttactggcagtgtacttaggcaagtcacttaacctctccatgcctaagtatctgaatctgtaaagataacaattgctactgctaagtctcttcagtcgtgtccgactctgtgcgaccccatagacggcagcccaccaggctcccccatccctgggattctccaggcaagaacactggagtgggttgccatttccttctccaatgcatggaagtgaaaagtgaaagtgaagttgctcagtcgtgtcggactctttgcgaccccatggactgcagcctaccaggctcctgcatccatgggattttccaggcaagagtactgcagtggggtgccattgccttctcccgaaacataacaatagtacccacataatagggtccatagggctgcaaagagtctgacacaactgaagtgacatgcacacagtagggccattgcaaggatagtatgttaacatatatatgcgaagctttgggaacatcctgctatgtagccagtcgctgactattatcttttagtctgcaccaaaaccccaagaggtaagcattataatatcattttatagactggggtaaggatatactgctactctgggaattgtgtagacattgatttcatttatattaggtaccaaattcccatagaggttttttaaaagggacttaggcaatatccaagtttatttttaaagctggagcaaattattctctaagtataattaagcacttttgagagtccagtagggatgattattcactaataaatggtaatcttagtaattcaagataattaaaaaaaattttccctctgactgatcctcagggagagacagctttttcaaacagctggaggatagtctataaagctcag

SEQ ID NO: 35654 - DNA, 4199 bp, Bovine  19866880183231
  misc_feature (1)..(1): n is a, c, g, or t
ntttttccagtggtcatgtatggatgtgagagttgaactataaagaaagctgagtgctgaagaattgatgcttttgaactgtggtgttggagaagactcttgagagtcccttggactgcaaggagatccaaccagtccatcctaaagaagatcagtcctgggtgttcattggaaagactgatgttgaagctgaaactccaatactttggccacctgatgtgaagagctgactcactggaaaagaccctgatgctgggaaagattgagagcaggaggtgaaggggacaacagaggatgagatggttgaatggtatcaccaactcaatggacatgggtttgggtgaactccaagggttcatgatggacagggaggcctggcatgctatggttcatggggttgcaaagagttagacatgactgagcgactgaactgaactgaactgaactgaacacgttggacgttggtaaaatgcaaatgctgattcagtaggtctggggctgagcccaagaatctgtatttttaacccatttccacataatgcccatgccactggtccagggaccacatgttcagtaatgagagttcacttggctaatcacttctcttggaactcaggaaacctatgttacaactctcactcttctagcaatccactgtctgatcccagggaaattgtttgatcagtcagggtctcagtttcccatctgtgaagaagagataccaaggttaaagagttcttattgattttaaaccttgaaaacagttatgatagtaaatatgaaacttgttctgtgaccaggtttgaacaaatgtatttcagggcatgaaagacatcagaagaggaaaagaatgatccttaaaggctgagaatcaaaagtaaacacacaaatacacagggcctgtgtgtgtgcatgggtgccaagtcgcttcaggtgtgtccaaccctttgcgaccccatggaccatatcccaccagggtcctctgtccacgggattctcaggcaagaatcctggagtgagttgccatgccctcctccaggggatcttcccgacccagggatcaaacctaggtctcttatgcctcctgcattggcagaaggtttctttaccactagcatcacctcttattggaaggaaaaacaataaacaagagaataagaagaaagtagagtcagacatgactgaataactaagcacagcacagcacataagtaaaggaaaagaaaaagagaagtgccagagaaagagtcagtcgaaggaacatcagacttcagcacagaggaatagaagataatgtgaacgtgccatattctttagtatctagaaatgatgactgcagcaattcacaagggcagatccctagagaaccatggagaagatgacaatgtagtgtatacaagaaaaagaaaaggtaaggaaacctttggatgaagtacaacaaattatttaaagtagataataaaagaaattgaatcacctctttctctaaaatgctggctggatttttaatgcagtgttttccttggccttttggcattgttttaagtccaagagagatataaagcacagcttctggtcactgctccatcatatattgccaccaacaggagatgaatcaagtggccaaaaatttccaaatactctaaaggctgtctgtattggatccttccaagaaaaacagtctgccttcatatccccaaatcctccattatgacagggaattcctagcagaactctcaggggcaaaaaagatggagcaaaaagcatttattttaatttacttttttataaatcactaactaattgaaccattttcagcaaagccagaaaatcctgccgatcaggattgacagtcacttacgctgatagcgttcttgaacttttccaaggttgaagctactgatgattcactgctgggaacacccatggtaactatttcagacctgtgaactatcacaccttctcaatgtcagcagatgcctgcatccagcaaatacctttccaaaaggctgtaagattacattttatttttggaagtgaccattcaagtcaccaaatggtaacactctctctgagcctgccaagggccctggctgactttcttcaatgtacaggcacagtttgcttaagactaacattgcctgtgaatcagtagttcctggacccaaggccgtgtctgaattccagttggctttttttgacatatttatatctacagacagaaacaaaggatcccatttaaaaggtttccaacccaaggagagccagttagactccttgcagcacaatcaatagtacaatcagctgctagggggaagagatagttagggactttgggaaggtcatgtacacactgctatattcaaaatggataaccaacaaggacctacttactgtatagcacatgaaagtctgctctatactatgtggcagcctggctgggaagggagtttgggggagaatggatacatgtgtatgcatggctgaatccctttgctgttcaccggaaactatcacattgttaatcggctataccacaatacaaaataaaaagtgtaaagtttgaagaaaaaacaaaaaggaaaaagtagtacaactgggtagaggagatgtagttttatccacagataaagacagtagatctgaccctctaaatttaccaagattcactccggattctactgcagtacacacagacttttatctctctgacaaccgaacccaagaggtttgccaaaatagaattccagtgtagggagaaagaagctaaagaattatgcattaataacacccttacccacaggcggaacatattttcatctgcacacatcacgaaccagagatcttaggttattaaaggtgaaagaggctaatcgtctttgggatggctctcttgggatgcctatttgcataatgaacctaatacatggcaacccaactcagcagttctttgggatcagctacttgtagtcggatgtgatatttttaattcactaactaaattactttgtgaaagagttgttcgtagctaatctcaaaactatgtctacaaataatttatgactatatttatcaatgaagaagaggcctaattggtaaagatgtatggtttaattaatctgtcttttggaaaattccaaattatgcaaagatcaccattgacaaagatataaaaactgctgtgtgtgtgcttgctcaggcacttcagtcatatccgactctttgtaaccctgtgaactatagcttgccaggctcttctgtccattgacttctccaggtaagactactggagtgggttgccatgtccttctccaggggatcttctcaccccagggaccaaacctgagtctcctgaactgcaggcagattctttttatcactgagtcacaggggaagacctaaaacactgctaaagtcatccaataatctaaactcagggtccagggtttgcctttctctggatgaccagaatcaggacacctagatcagggagcagcttctgcctagacctatcctatatcaagtgaaagagagcaaaaacttttggccagaatcttattttgtatttagtgcttgcagagccactttatttaaaatatcttaatgatggaacccaaactgcaggaaaaagtttagcataaaagatgggttaaccctatgtccattggtgaaaggttgcttttccagacagactaagaacaaagtatgcctaacctgatgttcttgcagatctgctttaatgaatatgtatcaattaagaacccttttaaattagcatatttaatgcttgtatataaacaaatggtgttaaagtttttttaaggatccaatccaggccctggcaatgaaagtgctgagtcctgacagagaattccctaaacagtagatgttttaagtggacttaatagttgccctgtgatcattgttgttgttgttgttgtctttacattgtttatttgtgtaagtaattaaaggtgaatctttgcccaggaaaaaaaaaaaaaaaaaagatgggttaaattgataatttatcattatcaatttaaggattaaattgataattttgctttaaaagagagaaatggggttaatcactacatagaaacaatttaatattaatattttgaagttaattcattgggtaactttggtatttttattgtgaaatgatattacttaaaaaaaaaaaaacttgttta

SEQ ID NO: 35655 - DNA, 1869 bp, Bovine  19866880377985
  misc_feature (1)..(1): n is a, c, g, or t
natgacttgcaaatattccatttgaggatttcagacttgatgtcatcagagcgtctttctttgtggtagtttctgtttaatcagtgttccatcagtgtttctaagaccctgtttcttttcactttttaaaaacctttttagtttatattggagtatccttgattaacagtgttatgttagtttcacgtgtaaagcaaagtgattcaattgtatgtttacctgtctctttttgcaaattcttttcccattttaggttgttacataatactgagcagagttccctgtgctgtacagtaggtccttgtaggttatccattttaaatatagcagtgtgtacatgtccatcccaaacccctaactgtccctccccctcttcgtgccccccccaatcaacaataagtctgcaactctgattctgttttgtaagtaagttcatttgtgttgtttttttaggttccacatgtaagcaatatcataggatatttctctttccctgtaggaccctgtttctccataaggcatgtaccttgaatacaatttatagtcatcaaatgggactgcccagtgttaggtcaaacaaaacttaacaagtatctttactgtggcactttccagagcctttaatacgaaaatttgttttgaatgccatagaaagaaatagatttttactccccaaattatctgacccatttttgcacagctgcaacctgggaaatactgctttctctaaaatggcaggagtgacctcctgagaaataggttgagctggcatttcccttgtggttcacaaccttcctgctaagatgccaggctgttcctggagaggaggcctgagtcaggagtcatacgaagcacacagcatagagttttgtgtgtatggggggcgggctagaatgggaacagtaaaacaaggaaggtgaaggattgaggagaacctgctctcttcttgagggaacacccaggcatacagatctcctctagaactctttctatctaggcctcaactgcctagatggaatcctagtgcaaatgttgtaaaagctgttcccatgtggctgggtatttatagcttgtcattgacgtaagcagatttctgtggctgaaaatagtgacatccaggtatttgggccaatttgtgaattttcctcagggacatgtgttcagggaagtaattttctggcaagaagaatgcctctgcaaatggttgttttcctgagaagttatgcctttttatttacccttaagaaggacacaaggcctttcaggattgctccagcccaggcatctcagatacagtgggtgaattctcttccctgacttcgtgggtttccagggggttggtcatattgccaggcgcctgacattgctgactgaaagggtctgaaccctggaggtttggggggtctatgaaggcttccacattctccaccaaaatcagttttttctccctggactgggggaagaaaccacaccaaaagacccctgtattcctctcagactgcctgggcaaacctcaagaacagtgggaatgttggagccagaaaagtcatacaacatacccgttgtgaaaaacaactggaaacagagcttaatgagttttttcctaaggatggccctcaccaaatagattctcttttagtgatttagtaattaaagaagcaaaacctcccagcctccaagagctgaagccagcagctatatcaggtcaaaggaccttgggaagagaacaggcttgtttattaatcttacagtatctctttcctaataaaaccccaacagttggccttgtgcatgttaccatttacattcaaaccaggtctgttggttagttatttatttaagatgtttggcctgtttggaaattaaaca

SEQ ID NO: 35656 - DNA, 1354 bp, Bovine  19866880422459
  misc_feature (1)..(1): n is a, c, g, or t
ncatagggtcccaaagagtcgaaccactacggagcacgttaagtgactcaaacaggactaagcgactcaaacaggactaagtgacttagcacgcagacaagtatctagcccagttctttgttcggtgagtctgagttctttgggtgggtgaggggctccttctataaaccttcctgtcctcctcagagaatcagcaggctgcctagttcaggaacaagggaggaggaatggctttgcaaagtgtctgctcacattctctattcaatttctgaaatgcctcagtcatctttcccagtgttggatccagtttctcccactcccaggtgattctttttctcccctgctctgcagcagtgagcaggtgagctgacagggccagagtggacagtttaccctctttctgtgtccacgtgccctcctccttgacgtgagggtgtggaggagagagttcgtgtttgttctctgccagcatgggaccctgggccaaagaccatgaagagaaggggaggtagctgatatcaatcagcacctacctggtctgaggcatgttcgaagtagtttatatgttgcattgttcaatcttccacaaaaccgcacaggctagtcatttctctccccattttacagatggggaaactgaggctcaggtcaattacattccctgctcaaagtgaggacttgggacacttgtttttgtgactgtaaacctttgtcatttcccccttcctcccacttgcagaagggttaccaattgcctctccttcacccacatgctggacagtttggggcaacctgaggtgcagacctgtcttaggcattttcccctatagaccctacaatgcttaacacatagtaggtgctcataaatccacaataaactgaattacaaacggagtgatggaaggtcgttttgattagataatttcttttccagtggggccagggtggaggagacatggctctaacataatttaccttggctctcatcctggcattgtttctcacttttcatctctttggcccttatatgagtagatgtttgatggcccccataagttagaatccaatcaaagcactgcagaactcaacccttagatgccccctctcagcagcctgtaattttcagaattgctttcttgattggctattgtagctaggtaagaaggggctggtgctcaggtagagatgcttctggaatttcaatgtgagtctgctttggatgctgtgtacttattcatgagaactcttctacacagaatcacacttccctcacaaatgaaaatatttatatgatggtattcatgcaatttgaaaaaaagatcgcagcctgcaatgcctgccctgcctctgtgcc

SEQ ID NO: 35657 - DNA, 813 bp, Bovine  19866880491694
  misc_feature (1)..(1): n is a, c, g, or t
ntggcaatctgctggggatttctgggaaaatctttgctttcttaatataggtgtttttcttcctttcttctagacccattttccctccctcttgtctggaatgtctataaaatgtctggaactggagtatccatcttgtgacaataatataaagaataagagaattgcaaaaacttttctctgatacgcttagtgaccaaaccaatgccaggaaccgtctatctctggacttctttcatgaggaaaaataatttccacttatccacatcactgttaagtgggctgcttatgtgcagccaacttgatccctgggtgatatagtgtgctgctgcattttgggctaaagagttatttggagctggaaggaaatatgagccagggcagggagggaagactagcacagcagagagccctgtcattcctgtgtatgtgtcagactgggcctcttctcatattctcccatggcttagctctttattggtgttctggataacttgtcagaaggattctctgggcttccgtgcccttttggggaattgcatttaatgaacttctgctttgttcatttcctctctaattttccatttcttgagagaaaaaggaagctctgactgagataatgatatcctagtgctggttaggagaaaactgtgtacttctaagtaagttggggaggaggaaggatacatttttgtgaattgaaaatgtcattttgtgcacaagaagtcattccaagtaaagacagatacattcacaaaacctagaaaagtggctgggcgggatgatatcttttcctgatgtagttaaaaaaaa

SEQ ID NO: 35658 - DNA, 806 bp, Bovine  19866880514198
  misc_feature (1)..(1): n is a, c, g, or t
ntaacatacagggtttcggtctgagatttctcttgaaactggttttccagaagaccgattgttcccaaggtacctagaatggaagagtcctaattcaccttgtgtgctcagttgcttagttgtgtctgactctatgcaactccctggattgtagtccagcaggatcctctgtccatggaatttcccagccaagaatactggagtgggttgccatttcttactccaggggatcttcctgacccatggattgaacctgtgtctcttgcatctcctgcattggcaagcagattctttaccactgtgctaagtgggaattccagtaattcaccttactccagaaatttctgaacttctggcaaggatgctaaaagctgaaggctcccctgaatgaggtctatgggaataacatgtgctttcgagtgaggcagagggagatttattttagaactttgttccaaggttctaggaccaacacccacctgctcacaccatttgtctttccttagcaagtctaaatcctatgcagtctttgtatgatggtttggagccataccttttccatagattctttctaccaagtctgatcttcattgatttaagtatctaacagtattaattatctaaataacaatctaatattggaatgagtaagctactcatgtaaagtattggcctagatgtactttgtcgggctgcgaagatgaaccagatttaaatccttcgtcgaagagtttacagtctaccaggagagaagtcaagtatagctgggaagggggagggatacaaataagcaagacgttactcta

SEQ ID NO: 35659 - DNA, 1144 bp, Bovine  19866880528321
  misc_feature (1)..(1): n is a, c, g, or t
nttgggtgggcacctgtggggtttaaagggacaggtcaggagacttctggctcctgctcaggtttccctggtagctcagctggtaaagaatcctcccgcagttcaggagatccgagttctatccctgggttgggaggatcccctggagaagggaatggcaacccactccagtattcttgcctggagaatcccacggacagaggagcctgctgggctataatccacggggtcgcaaagagacatgacggagtgaataatgctgctactactgcaggctcaagaagggtctgggtaataaacccccatgtcagtctcctgactctcccctcatccccctcggactcccttcccctgactggtccttctcaaggctcgccgcatcatcggggacttcggcatccccatctccattctggtgatggtcctggtggattactccatcacagacacctacacacaggtgagtgagccccgacaccgtctggcagctggttctcatccccaaggccttgagagggtggctataacaggtccccactgccccagcagccagtcagggctggaacccagcttccctagtgcagctgctacatgctggtgccgcacaggggtgggtggggggtttcagaagcagctgcagaggacagcagggggtctggggctgtgtgtgaccctagtcaagactcttgggagagccggtgtgggactgggggcagaaagacagatgcccccagagcaggtctcctgacagctcctctggggctcagggagaaggtggatcatttcctcattcactgccacacccttggagggacaatgactttggaggattacagaactaattttccccaaagctgttcacaccccaattccctggagccctggtgctggggacacagagccgggcaggaacagctgctatgtggagtcactggcgtccctgaacccgatcttccttctggccgtgcagaagctgacggtgcccacggggctctcggtgacctcccccagcaagcgcacgtggttcatcccgcccctgggcagtgcgcgtccgttcccgccctggatgatggtggcggccgcagtgcccgcgctcctggtcctcatcctgatcttcatggagacacagatcaccgcgtgaggg

SEQ ID NO: 35660 - DNA, 3243 bp, Bovine  19866880556667
  misc_feature (1)..(1): n is a, c, g, or t
ntgcatttatatatgtttattaagtgggggcttgacagctttatgaggaagcagtggggtttgcaatggaggaaggccctgtacccctgccaaagctgatctcggcctgtgccatgcttgctctttaatagaataatatttgcgcagtgaaaatgtcattttaaatgactggtttgataatcctttaagcttttaaataatctgcaaagtctggaaactctaccccagtgtttaaaattgacgggaacattaatgaacgcacacgttaaaggatggtccccagctttgtttcctgagtcagacgttgcttactggggtgcgctccttttgtctgtctgccctttctgtaacacaagtgtgtttgctgagcagctgcagtggggccttctctgcggggatgtttttgggaagtggggcgccgcagcctgtggtgggatgtggagggaccagggttgctgcgagcctgaagtccgtcatgcagagtagaaaaggcactccctccaggagggagtttgtggaaagggccccctctgagcagagcaattagcaaaaactcacttctctccagctggtggtgcctcctaagcccagggtcttagctcagtgatcagagaagaggagggattttcgggccccctgcaactcttgcagggtgcatcctacatagccctacccagcatccctggtgaggtctaccttgtttgctcaaccttcttttggaccaggatacaagcctctccccagagaagtaccctgtgatatatgagatgctgggaggagctttccttggagggacagagccccactcctttctcccttgagtgactctggaataggataggaaggctgacatagagaggaccttctcatgagttgagcagtattatgtaagccatatctaactacagctctacagggcccaattgggcccactccctgtgttttaaaaataaagttttattagaacacagtcatgtccattcatttcttgtctatgatggctttcctgctacaatggcagaggtgaatagtcatgatggagactgtatggttcacaaggcttaaaaacatttgctatctgacctttttatggaaccctccctcagaatactcagcaaaatgaagtgaaattcctggcttaaatcctggttctgtcaattcctgtgtgtccttgaataagttacttaatatctctgttcctcagtttcctcatcagtattaataaaatggggataatatttctgccctgcccacttcatgcagctattttggacacaagggagagtgcagtgcgtatgtgaattattatccatctgagatatgccatgggttagccatgggatattggggaaagccccttggcctctttcaaactgtttcctcgtctgtcaagcaagagtggtgctctagatcagccatcctcaaagtttaatgtgcataggtcacctggggagttcggtagaatgcagattctgattcagtaggtctggggagggggctgagattttatatttctaaggagctctcaggtgaagttgctgcactggggcccacacagtatcagggggccgggtgattttgctgacactccttggtggcatgaacagtgagctgttctgcaaacaccattgtaagcgtatcagtgacagtcccttttctgggcacccctctccagtgtatgtcttggcaggagggtcctatacttgtttctgtttgtagcctagccctgcatctgatatagggcaccggtgagataagatgggtttttcccttttcctgagtgcatgcatgtgagcgtgtgtgctcagttgctcggatgtgtctgactctttgtgacccccatgaactgtagcctgccaggctcctctgtctgtgggattttccaggcaagagtactggagtgggttagacttctggccaaaaccttcttctggcagccaggtggtttgacagagcagctggtggcaggccagatatccatcagttcagttctcagttcagtcactatgtcatgttcgactctttgcaaccccatggactgcagcacgccaggcttccctgtccatcatcaactcccggagcttgctcaaactcatatccatcgagtcagtgatgccatccaaccatctcatcctctgttgtccccttctcctcctgccctcaatctttcccaacatcagagtcttttccaatgagtcagttctttgcaccaggtagttccttttcggatatccctggctggcctcaagttggcctgagtgcagctgaacctgggaatgatagggcagcaggagggtacccgacctccctgcgttctgccccagacagcaaactagtcagttacaccttggtgtgtggatattgcagaagtctaatccttttgcaccaaagtgaaatgccttctgggctccaactgtctgccagtgctgttaaggaattctcttgggtttctgttttcaatcacattttccaccagcctggggaaactgttggtcccaattgccatctgaagccacttactgcagctggagccagagccagggttcccccatagagtggggcaggtgggtgaggacagagctgggagtacgcagctggagggggagcggggagagagacacaccagggggattgttcatcaacagttgcccacaggtcagggtcctaggttagtcctggatacactgaggccggtacagtattacgacgtaaaacatattttttagattcaggtaaacctgggttcaaattccaccttcccctcttttttctaggagtgcttgggccggattcttaacttctctgaacttcagactggagaagaggaaatgaaatgatgcaagttttcctgttctgaatcctctggggctctctgcatctcgtcagctctgaacattttctggaccttgcttcctacttagctcagactctggtgataacagaaagtcagaaatccagtcgacaaaaattgggccgtgaagactgtacacgtacgtttttacaaaaggatataaggagacttaaaactttcattcggtcagttcacaacattttggtccttctactcagaagatgtgggaatgccgctgattccttaacttcctgtgtctcaatttattcatcagtgaaaggagggtaaccactggacttgtttgatgggattgttgggaggattgaaaaatataggtgaagtgttcatgcagacttggcacacagtaaacactgtcatctcttaactcttca

SEQ ID NO: 35661 - DNA, 2230 bp, Bovine  19866880585703
  misc_feature (1)..(1): n is a, c, g, or t
ngaaccttgagatgctagtataaatgtagcacttgctcaggaaccaacagtagaagaacttgagtaaaggaagagctggtgggagggacatgaaacactcttcaaatatcccttttatagatacacccaagagccaaaatcctatgcttaacatcaatgaatcattcatgtttaagagtgctatcatctttcatttattctctttcaaggaagagatttcaaagtgtatgaaagtcttcaaaaggagaaatgatatatgaaagatataaaccaaagccttccaaaatgcattttgcttgaaatgcctcaaaagtacacctgaactgtttgcaaagcagccatgattcctaacacatatttttttcttcaatttttaagagaaattcctaagaaggaaggtaattagagtagtataaaagtattctaggctaccttaatgtaaaatatatagaagacatcgtttgtatgctactgggaatcactgtgaatttttgacttaggtttcaacaaaaatatcctttctgttagaggcttcaacattaagactatcctctttctttgaatgtgaagttgtacatataaatatatatatattatatatatatgcatagaagccagggaattttaaatttactctcaaatagcatcattttgcacctcctaaacagtaaagactgagttaataataacatcaccacaaatgtcaaagaacattcttttgctcactgttgaggaatttcaaaattgaaagtaaggtaaatgcatcaacatggcaaagtggaaataagatgcatttttatcttgccttccagaagttgtatcactttctgtaattgtaaagttatcatcacagataactgctagagaattttagcagactcaggcaataactcttcagaggtgggagtaaaggatggggagggagtggaaggtccccctccaaaaggtcacaaaagtgagaatgtgtgtgaggacaactgtcagcctagctgatggccagagtctaaaaccatttctgaatgattatgaccttcctcttcatggacaagtgaggaatattccatgaggggatgagggtgagggtcacatcagccattatttcttgtcccccttcttcaaggcatggtgttactggtttttttttttttttttttcctcatctacttcttaattaattatgagttactgacatcaggtaaacttgtgtgtgactgaagaaatattttggcaagtttggggggatgtcttttctgcatatttctgaatgttgaagcttcgtacttgtgacctttgtccgaaggcattagtcatattcagattctcctctgtatcagaaatagaagcagtaggtttagtgaattttggagggagggtggttttaattttgccattcactttaatttttaggcatatagagttagaaaaatcatagaagatgagtttcaggaacttgacttgctgaggcttgctgtgatattgagcaaaacattgattctaggttcaaattacgatgggcagaggctgccaatctgtggaccatccctagcttgtctcatatcttcttaaataatgtacgttctaaaggtctcctctcagttggcagacacactcaggagcataaaataaattcaatctcaaatcacggatacattcatgaatgttcaggactctgacacacctcccattacaatcccttctcgagagtctttcatatgaaaaggatgtttatttggaactgaaaaatgaaaaaaaaaagatagaaaaatattcaaaagtgttttttttatttcctcaagattcattttcattctttattctttcctacctggaaattcctttaacacccatttttaacgattactcagcacttatcttttaaaaccctaaactggaacgtgtcccttatatatgaactgatatgatagaagttacatctgacaacactttctctctgcaagaaaatattcatcactgtttcctatgccagtgattcatttcaattctggtatcaaatagattttactttacacctctccttgtcaaatgcatgcgctacgcttcctctaaatttaaaatccagtcaggggaatgaaagcgataacacctcttttattacagtttgggaaaacaataaaaatcattttggatattgaaataagcccatgaggcacttggaaaatggcagacaatatattcaaagaagcagataaagacagttaaagcggcaatg

SEQ ID NO: 35662 - DNA, 2226 bp, Bovine  19866880607360
  misc_feature (1)..(1): n is a, c, g, or t
ntcaaaaatgcttttctctacaatgattttgtacaatttcagtttttctgatcagatgtaattacctaaactatgtatatagttttctccttctcttagcataatttggaaacactgtcatatgaattcatggtttgcacagtccaggaaaatgaaatcttgaaatagcctcttggaggttcagttttgcaaactacaaatactctctcctgtgcacgtgtgtgtatgcacacacatgcacatctatatctgagagagaaaatttcagcaggaaggcggaagagtagaaacggaataaaaacaacagttgagctgaagcaagctcccagaaacagcttgtctcatcagggagatgttttcttgtcatttcctcagttcaatattgaattgctccactgttctggtgggattgaattttaattgaatagacactttggttggaaatagttctcccccagtcatgcagatttgccttctctcagcatcattactcctcctttctccaagtgagtcatgagaattgtggggtgcgagtccgcacttggttgagcggaagaatcagtcagaaagtgatgtgatgggctcttcatcctgaaaggagaagcatttccaggtaggaaagaggactgctgagttaaaatgagggggtgtgcgtggtttgtgtttgcttcctggcattacctcaaagagaatatcactctgaagagctctaagaggggacaggcccactgggcgattgctcagggtggtaagacgtcaccagacacagtagaaatagcggcccagttaacaggtcattataaggggccagagaagcagacagcgtccccagtggaacttggagaataaaacatcttacagtgtttgctatactccactaaatagatacatgactttaaagaatatcagcctgaagtgactccagactgttaggctgtctggtgttgctcacatgactgggtgccactctggccagagccactcatgtgttcatgtgcttctctgaccactgcctgtcacaggccacagcagcccaagtgtttccagagcaggagacgtggcagggaagcccatcttggttatgcaccaaacaaactcttggccctagcccccacctctgagatattaataatttaagattattttcccattaaatataacgattaatatgctgttttctccaagtctgtttcattttttctgcctagaatcactgaccatcttttccttctttctacggtcacattctgtgttcgtgatgctggtctcgtccctagcttctctctcacccatttctcttaactccatccttctatccttcagccccaccctcacaacctctccctcttccagacaccctactgcactgcttcacctatgtcccgcccgtgtggaggataagctcggccatggagtggaacttggctggcagactgtaatcagagttacattttaaaagaactatttccacattttgataagaagctgctagagtaaaagggtgagttgtaattgtaaatttttatctctctggctgttgagctctatggaatcttacataaactatgaacaaatatttccattgtaacagcttagacatagtctcaaattggtcacagtaagaaaagcaagatgcatatgagtgattatagaactcccactgaactcaggtaagtttgacctgctttgggccactggaaagcgcctgccatccactgagtgaggtctctgttccagacctctgtctttctcagcttcaagttagatttcaaagcaagcatcacattctaggtcagatggatttaaagatgcaaatgatcagaaccctccccaaaatgttacatgatcataaacttaagggttagctctggtctgtacacttaaatattcctggaaaactcttataggtgtgtatcagacccatgaatggaaagaaatgaacaattactgagttattatgacttaggagttttataagtattatgttgtattgttgtttggtcgctcagctgtgtccaactctttgtgactccatggactgcagcatgctaggctttcctgtccttcaccatctcttggagtttgctcaaactcatgtccattgagtcagtgatgccattcaaccatctcattctctgttgcccccttctcctcttgccctcagtctttcccagcatcaaggtctttatcaaaaccctgtgtacaggagaagtgttagtatcgaga

SEQ ID NO: 35663 - DNA, 1199 bp, Bovine  19866880634335
  misc_feature (1)..(1): n is a, c, g, or t
ntatttatggagaaccaagaacagcttttagctgacactgctgtctaaaacaaagttctcaactcctggttgggtgaaacttgtttggagagaaaaaatttgctacccacacctgtcgaaattgatctgttccttagaaatgtgtttaattgtcaatgagagtgggtgcacaactgtcaagctaactcgctgaagtgacaagtggatgagattggcgttctgtgccttcctggctgattttaattgttcttttggttggagtgaatacaactttctttctaaggttgataatgagagccttctattgctccttatatttccatgaaagatatatctacatttttaaagtccattacatatacatctgtggtttctctcttatttttctaaatgtaattatccagctaggctaaattatggaaaaaaaattataaaaatcttttcctgccaacagtctgaatctggccagcacattcttggtggtttgaatgttgggtatagtttctttctctctattatttcttctttccccactcctgcctccagaacccttttaaactccaagaggctttttagtgaactgacatttcttaaggtggttccttgagcagagcactattgccaagtggtctgtttgttcatacattgtaaggataggtatattttaactttcgtattaattttgaggtattgttatacagaaagcaaaaatacacatggtagcttttatatatatgagttatacacagagtgaattcatgtgtaaaatcataactgggatttggaatgtggtattaactagctgatgtaatacataatcaaactatttttagcatgaataaaaataattgcaacaattcttaagaaggttggcataagctaaaggggatttaggtagaaccatatcaattaaagaataacagactctaaattatttttagttattcatttttgcttggtcactgagcctgtatagtactgttcttactcatcgaccatgggtaggaagctagccttcttggagagtaaactgacagtgattagtaaacttaacagtatcatcaccttacgcctcagaagattcactcatgactggacacccctgaaactcttgcaaacatccacaagagataagggcaaggatgcttcctgttcgttagctgtggtagcaagattggaagtaatctgcatctccatca

SEQ ID NO: 35664 - DNA, 1149 bp, Bovine  19866880668690
  misc_feature (1)..(1): n is a, c, g, or t
naaaagatctgaaattctttgaaggcacattttttgttttgttttatatggaaaagaatgtagatactgaattaagaaattagtaagtactaatcagtgtgcattcaagatttttttaaacaaacataagactaaaaactcaagcagttggatttaatataaataatagaaatatgaataatggaggaaatatattccccaaactatatatatatatatatagttttcttaacaaaagaaccctttacaagtataatctttaatacgagcattcaataaacaaccgtcaattagctaatctgtagaagtgcgcaagtcatttccctcatttgactgctctttattaagcacctgcggtatgtcacacactgtgctgggcattaggaagacagtagctaataaagtcagacatcttcccagtctttccagaggtttgtaatatcatgtagaagccagacatcagtcagctattcataccagtaaatataaaattacaacagcgatgagtgctacaaactagaggtagatggtgctagtagagcattgtttttcttaaacaagaattctgtttccatctgcatagtagccaaattcaacttttttgaaaagctcaaaccaaagaactaaaatcaacattttataggcacaacatgactcaaccaactctgaagtatttggtcaaaaaggtgcctgattcaatttaaatatatttattcagcatctatgctgtatagagcagtgcttctcaaactttaatatgcatggaaattacttgaggggaattgtccaaacacagattctgagcctgtaggtccagtcttaggtgaggcctaagactctgcatttctaacaagccacccggtaatgctgataattccagtctgttgatcagaccctgagtagctccagttcaggccaagattctgaactagcatgactgctggatcctcacttctacagccattccgttctccagggcatcttctccacccagggactgaacctgggtctcctgccttacaggcagattctttactgtctgagccatcagggaaatcctcctcaactccattgccccttccctaccaactccacaagaacagaagagtaaagagaacattgtaagaagcttcgagtttactcgactgt

SEQ ID NO: 35665 - DNA, 1477 bp, Bovine  19866880669642
  misc_feature (1)..(1): n is a, c, g, or t
natttgtacacttattttatgggaacatatctggtttgtcatactagctgataactgctaatgttcagtaagaggaaattttacttgggtaaccctgttctctgcattttattagtcaaaattttaatattttaaagagaataaagatttgctccattgtaaaaaggttccatatggccctatgaattagttctaataaaatgatgaatgattcttcactccattagcaaatgatcattaattttaatttatatgtctgacatctgttcctgatctttatcctttcaagtgtaattaaaataattgtaaatatgcaagccatcactgaaagttacaggtgattgcattgtactgggtctattctccagccagtgaggctgtatttcctcgagggtggggtccatcgcagctgggcactcagtcaatatgggggaaatggtaagtgttataagggaacagagatgatggtactctgtgtgagaggcaactgtttaaagagatggcttgaaaatagatttctttcggatataaccatgaagcagttctccaaaggataattctatgtctgtggcctttttcttttggggccatgtctaagttctggccatccatccagaaaatggtagcatttcatggagtaggaaaagtcctccttctcactctttccccccaaaaagtctaatcaaatattcttgagattttctcagaaataatatttctcacaattagaagggttatacattaacatgtgtatggcagaggagatatttgaattttcactaaagtgtgaatgactgacatgaggtaatttcctgaaaaggagttttgatatggatagtgtcctgactacctagagtaagaaaaagcactccccaaagggaggcttaacaatactctgttgcttgagcatttccagaactctcaggtttcataccttactgtgtccttccaaaatctggtgcagatagtgtgtggaagaggttagctctagggtcagaaatttgtgctaagggtgtccctaggctcagttctaggatgattcttgagaaatccatggaagatgaccttccccatgactgctgaagttcctggtccctagcgcactggagaaaactggcctccataaactgagtcagcaatactgcaaagccactcccttattaaacctctcatatctctttctgggagaaaacagcctttattgtggataaaataaaaattttaatacatttgggaaaaactatacaagtgaagtgttttccatatacctgggtttaaattgttacagggaaattttattgtcataggtcccatgatctcagaaaccaggtttttatccggaggctattctgcttttaaaaccacatcaaatcggtggaacatatgagctgatgacaattctggttttcagatccatggagttcatgaagccgatttctgctcttgatagagattcagccatgatgttgttggagtt

SEQ ID NO: 35666 - DNA, 806 bp, Bovine  19866880724377
  misc_feature (1)..(1): n is a, c, g, or t
ntgtttttgcctggagaatcccagggacaggggagcctggtgggctgccgtctctggggtagcacagagttggacacgactgaagcaacttagcagcagcagcaggatcagtagtaaagaacatgcctgccaacgcaggagacaataagagattcaggtttaatccccaagtctggaagatcccctggagaaggacatggcaacccactccagtattcttgcctggagaattccatggacagagaaggctggtgggctacagtctgtagggtcacaaagtgtcagatatggctgaagtgacttagcatgcacacacagtcactttctgtgaattaagaaaagatccctgattgttttgatagtcctatgctaggatgtatggtttggtagcagaacacaggccatattcagcctcagttcattttggtggttgcctttatgcagtgaataacctgtacaaccatatgtggtaggcttggctttagctcctttcagcagattctgagaaagacagtaatccttttatggtccagcttctcttcacaagagaagacaggatttttaaaagctatgtcatccattcttgggaaagtatgctgtacaaagatttccaatatatgaattcccaagaaaattactaagaagcattatgctcttacaatctgagaatatcctcacttatctgcaatatttcaaatcaatagtatcgttatttataagcaattcccactgttcttaatgagtttaatgaataaagaatgagcataataagtgagcttaacttcaccaagaaatcatttcttata

SEQ ID NO: 35667 - DNA, 1068 bp, Bovine  19866880734567
  misc_feature (1)..(1): n is a, c, g, or t
nggtgcctatgtagtaagataaacatcctggaacagcagggcagctaaattcatgcttcttcattggagttggaacaccagaatatttgaaactccacctctgactggcaaaatcacttttatttctgcctttaatagacacataactaaaggcaagggctaatgggatgtcaaagcagtcacggccccttaattgatttgaaggtgcttgcataactattcaaggcaaaatgatgttctcactgatgggagatatggaatgtacaatttgcatttcataagaaaaaaaaatccttggtttcctctacaaagcactaatgttttcaatactgctgactgtggtattttgagaaatagccagtatgccctctgcacagttagacagtaagaggaaatattgcctccccaggtgtcaaatttcctttctctaatggaaggatgtgtgggacagcatttcaaacatagtcacagagggaaaaggaggctgacaagtaagatggatgaatgagagggaaaacatgtgttgagatggaagctgtcaagggtagatcctgtttgtgcatcagaagtgtcctaattaaaaatgcccatcataaaagcctttggggaggaaagaggaaaaaaaggaagccctcttctgtgcaacacaagagatttcatagaagagccaagcctctggagctctagtgaactgcagtattcacatcagtggctgtattctgtcatctaggatattaactatttctataactcaactcaaaaaatctgcatcttcttccagaatgcctctgttttgaaagaatatcacagattcacctgaaatacagaagttggagacaacggggtgtcactatgcaatttggggctcagcttttccaaattctcatcagtaatgatttccttctttcccataactggcgtcctaagccttctaatgtttacagtgacattagtcaattccttatatgcactaagccaaattaaataaaggactgcagggaaatttatctatagaacatgaatctttaatgagccttcatccctataactcttatagtagaaagaaat

SEQ ID NO: 35668 - DNA, 879 bp, Bovine  19866880742666
  misc_feature (1)..(1): n is a, c, g, or t
nccctctttatacagatctaactggctcaacttccattcactgatgtaaagtagcattagtacacattacttttaatactgcttccctcaaatattgatttttaattttttttgtcaaacagaacatatgctctcattttatactgtcagggtatacacacacacacacacacacacacacacacacgcatgcacgccctagctgagagtcatcacatgtgtgcatgttcagttgtgcccaactctttatgaccccaaggactgttgcccgccaggctcctctgtccgtgatatttcccaggcaagaatactggagtgggttgccatttcctcctccagaagatcttccagattcagagatcaaacccgagtctcctgtgtttcctgctggttaggcagattctttaccactgagccacctgggaagcctattgaattgtacctcaagttaaccagattaatttagaagtagctttaagagtcataacactttatttaatttcctaataatgtaggagccataatgcatgaacatcaatattatttaatttattcttgtttcaaggcttaaatataggaggatagaaatgacgtttgtagagaagatcccatgttatcacttagaatcaaacgaactaaataacatgactgagaaagcaaaggagcccagggcatctcctggcctcagcaggagataagaaactgatacatgttgaatatttgctatatgtctggcactgttctatatattttaaagatattttctcatagagtcctcaaaacactatcaccaagtagggtgatttcaaagacaaagaagataggtaaagagaagtaccttgcacaaagtcacagagatactaagtagcagagttgact

SEQ ID NO: 35669 - DNA, 2625 bp, Bovine  19866880756036
  misc_feature (1)..(1): n is a, c, g, or t
ncctgactcagggatcgaactcaagtctcctgtgctatataggcagattctttactgtctgagccatcagggaagaccaacatttaagtggtagcttacaaacagcaaccatttatttttctagctcacaattctgtatgttggcaatttgagttgggttcagtggggtggcttggctgatcaaaacatggggattggccggtcttgactggggatcaagtcatgtgcctgctgttagcagctgattagcttaggggctggctgaccatcagtggtgtcttatcctacttcctgtggtctctcatctttcagcagagcagcctgggcaagagggtgagcccctgtggacatgtacttctcaagcttctgcttggggcatactggctaacattgagttggccaaaggaaaccccaatgccagtctgatccaaggggtagagaagcagactctacctcttgatgggaatcgctgcaaggatgcactctgtagggacatggcaacagggagggaaagaatttgtggccagttttataatcaaccacccttccaacgtcagtcacgtgctgtacaatgctttcaactttgcaatgttcacctaccatcctttttaattttctttaccttggtttaaacaaaatgcctgttttagcctcctcctatgtgatcttatccttgaaatcgcaatatgttggttattgttatgggttgaattgtgtctctccaaaattcatgaactacagtcctaacccccagccccttagaagatggggttatttaggaataacgccactgtggatgccattagctaagatgaggtgatactggggtagagtcggccactaatccagtatgacttttgcccttagaagaaggtggccatgtgaagatggggagactaggagaacaccatggggtgtcaagggcagctgcaaaccaagggtgctaaagattgccagctaataccagaaggtaggaagaagcaaaggcttcctattggcctgtgggggatcacggccctactgttaccatttcgaatttctagtgtccagaagtgtgagacaatacattttgttattttaaaccagctaatttgtggtattttgctatggtagcctgaggaaactaacacatttatttttttaaaataagataatagcttaaatcatatgaaatttcaacctttgtatttttcagatacaaaatggttgagtaacagcaatttcacattaaataaatacctgactactgaaaaaacttgtgggctacctaaaattatgtgtatgcaatctttggtacattgctacactatggaagatgtcaatttaaagttgtctgttaaaaaataaggcatttcaatttcggtggaaaggtcaggctcagttaatgcttctccctcagaaatcatctttcttgcttctacatccttgcagaggcattagaataaaaagctgtataattaatttgcaaattttctaaaaaagtttttagtactgaacttgattttaaaaaaatcattaattagtctctgacctcgggatcataaaaaatcaaggagtggattttctaggccagacaaaatgtgccttttggcttctaaataagatatgtggattgcatcaaatttccttcatcgagacagtccagattagcttgtaactatttcagtagaattgaatttcagttacttttgcatggaaatcaaataataaaaaagtcatgaaatctaaaatttctgagtcttgcgaataccagctaattaagagactttatctgtcatgattattttgagcaactgattatttccatcaatcaaccaagcaactctgataagccaatcattttttaatcgatgttgagccactgaaaaagttaccatagataccaaattctacagccatcacaacacaaagtcaggttagaattggaagtgacaggtgtattcatcacatagttaaccagcctttgaagggaaagagagagtttgtcagagtccttaggctgggtataaaagattgcagagaacactcaaacaattcccaaagagcacttcaaaagcaggagaaagggtccgtttttcattacaaatgcaggaagatgtttgcttgaaattcaagctctaagtaacaagttccttgaagttttgcttgcctgtcatttaccaggggtcaccagtaagttatctttagagcagagcttccgtttttttcttttttctgcatcagaagtaataaggatggttgagagcatggggcaatgattactgtaaaaagcagtcctgattgcactgtttatacatgtagaaatgtgaatatatatgtgtttacatatacatgtatatatatttacctgtggtcaatgctgtcagaataaaagcatagaaacaaaaaatatattttgagatccattggacataagccagtgtctgtttcaagtaagaatattgcatgctcagagcttcagagaataaatggggagaaaaagagagtttggagtgaaatatatgaatatatttcaaaggtataacacataccttccagttttttggggggtagctgaggcaaacccaggtccatgtccagtgagctgtcctcctcatacataccagcacttggactgcgtggagg

SEQ ID NO: 35670 - DNA, 1324 bp, Bovine  19866880758816
  misc_feature (1)..(1): n is a, c, g, or t
naaacggtaacccacttcagtattcttgcttggaaaattccatggacagaggagtctggcaggctatagtccatggttgcaaagagtcagacgtgactgaaaatgtgcacgcatgcgcgtacacacacacacacacacacacaggttggaagaatatgcattttagatcacatggaatctttctggttttgtaaagaataagtcctacttctcaaacagtgtattggctcatacttgagtatatattcttgcttttttttttattcttgcttttttaaaaaatatatttgccagatctatttagtaatgctaaaatccacagtccataatggctaattggttacacacttctggtcagcatctgcatgataggagtttggataacactgaagtgtttaaacagacacatgtgaggcacacaagactccacatcttggggtttcctggggtgcacactcagaacaggatgggtattaggtctcacagagggctaccaggatctgagaagaccccaagccgatttctggaagctgctgcagtattcatgggctgcagaacaataaaatagtgattctgttgttagttccagtaattgactttgcagcatcagaggcaaagcaccccctgcagaggacatcaataactcagttcctgtaggggaattcttgctgacgcctgggtggatccgtgacctttgacagatggagcagtatttgaatataccaaatcagggaaatgaaaacaataaaagaaaggcaatttgctaaatgaaatctacatgaactaaacttcctgcaaccattcatcagaacttatgagggtcacacaggtttttaaccaccaccacacctccaaaagatccagtaatttcctatttcaaaaaaacaaaagcttacttcttgaaaatatgtactagaaagagtacatagaaatgtacttggtcctcacccatttcaacatttcaggtctttgttctgctttaagatgtgcatgtgtgtttatgtatatttattatcttatacccattgcaatatctatctgtttaaaaaaagcaaaactaaatttcttttcctctcaggaaaattttccataaaaccttttttgcacagaattttagtggaaagaacaaatcatgcaattatggaccagctagattttcttaggattttcttagattttcttaggattcagtttccattatcattatttgtacctcaaaaggaaccctgagatgcatcctctctccacagtccccaatgatgggaacactgaactttgtgaaaattgccagagttgaaggagctcagagggtttatgtggggct

SEQ ID NO: 35671 - DNA, 949 bp, Bovine  19866880758817
  misc_feature (1)..(1): n is a, c, g, or t
natgtggagtcttgtgtgcctcacatgtgtctgtttaaacacttcagtgttatccaaactcctatcatgcagatgctgaccagaagtgtgtaaccaattagccattatggactgtggattttagcattactaaatagatctggcaaatatattttttaaaaaagcaagaataaaaaaaaaagcaagaatatatactcaagtatgagccaatacactgtttgagaagtaggacttattctttacaaaaccagaaagattccatgtgatctaaaatgcatattcttccaacctgtgtgtgtgtgtgtgtgtgtgtacgcgcatgcgtgcacattttcagtcacgtctgactctttgcaaccatggactatagcctgccagactcctctgtccatggaattttccaagcaagaatactgaagtgggttaccgtttctttctccacggggatcttcccaacccaggaatggaacctgcatctcttgcatctcctgcattgacaggcaggctctttattatttttatacttttgatatcttttaaggagtaaatgatagttcccctgattcacacatacatgattgagaaattgaataaggcatatcacctaatggcttaattccatctttaataaaagtaacaataaaacagaccaacatttgttattttaaacacaaatcagttttgttaaagataaaataccatctggagcaaggtttcataaaattatacagttggaaaatacttgagatattactatgtctgacctagcttaaaaatctcccctagtaatgacctctgaagacctgtacataaaaaggagcagccttgtggaagttctgaattctaggagttggttccaaagctatccagtgtcacctgctcctaagtctctgtcttttttcctcccaagtcaataccttttacttgttttcggctcattttcctagag

SEQ ID NO: 35672 - DNA, 1808 bp, Bovine  19866880771050
  misc_feature (1)..(1): n is a, c, g, or t
natatgactgaccactcagagtccagcccaccttaagtcatcgccatgttccttgtcccagaaccaacctcaggtctttacccccaagatgagtgtgagaagccctgtttctatagcccttacttcctctcccagactcttggctatgtaaatacttattgactacctttgctgctccaagtccaagatgcaaatgaacaagaaatagttcctgacctcaaggagctcagcatccaatgggagaaatgtgtaaacaaataattacaaagctgtgtgatattatgttacagaagaggaatagatgactcccgggactgggaagaaaatgatcagggatgagagaactcctgatctaaattggggaaaaggaggaggaactttccaagtagacaaggagggggaagacatccaagcagaggagtcaatgagcaaaggcctgatacagagagctgcacctggggagatccagaagggaagcactgaaagatgagctcaaaggtaagagaaagagaggccacgtgagccttcaccgtctggttaggagtctggtctctattctgtaagcagtggaaccactgctgacttacaggggagggctacaagcaaatttgcattttagaaatatcatccttgcaatatgaatgacgaacatggggacaagagaagcagaccaaggaggaagttatcagggtgattcaggtgagaaacaagagactaaaccagaacaacggcttggggaacacaggtgggagaatgcctttgacattgttaagagctggttagtttttagagtgcagctagacaatttggacaacttaccaagtatataggccttcccaggtggcacaatggtaaagaatttgcctgccaaagaggcagaatggatgcaagagattgatccctgggtcaggaagatccctggagaaggaaacaccaacacacttcagtattcttgcttagaaaatcccagggacagaggatcctggcgggctaccttccacagggttgcaaagagtcgacatgacagagcagctgaacatgcacacgcatgcatgcatcaagtatactacaggttaaccaatgttttgcaattagggttagaggcctaactctgtagtaaccctgtgtccatgggaaagtacacagccttctaaacaatttccttacaaatgaacgtttggacccagcccattctcagagaacgtactgtttgcacacatctggttcctgtcctctatgccaacaaaacacatatttcttccaacaaacacttttgtttattggtatcacgattagcacatcttaatgttgtgaaacacagctggattttcaattttgttttttagcaaatgtaattttattaattgatttatttctgattgctctaattaaaaaaaaaaaacgaaataaaatccttcctaatcacctttgacagattgtaaaccatgagaagtgaccataagaagagaaggcagtggtgggaagttgccctgatgggaagcaaagagaagaaggaagtcaaccatttctcccattagatttaaacttttgggatagggaggaaggaaagacatcctaagatgcaactcaaaagggaaaatgcttagagtataagctctgtgagcataaagaccctgcttatggtggttggtgatggacagggaggcctggcatgctgcggttcacagggtcgcaaagagtcagacacgactgagcgactgaactgcctaactggctaccactgtaccctccagtgcttagtatgttgtaggtatgccacaaatatttgctgggagggagggaaggag

SEQ ID NO: 35673 - DNA, 828 bp, Bovine  19866880771136
  misc_feature (1)..(1): n is a, c, g, or t
ngtggtcagggcagagtgccagcagtgtccatcacactgacctgatggatcaccgtgttgcagcagtgatcaaaacctcgggctgatggcatcagtttagaatttcagaaattagtgtttagagttcttttaatatctgtacttacctaaagctccctaattcaactatgtaaataaactttaaatggttactgaactcatctattgttcctggaaaatcatcatgagccaaaaagtttagttaagtttagttggctctgtagtacatataactgcacgtgatttcatctgtcaagccagtatttgtccaactatatcctgaactaaccttgatgttacattgtctttgtactttgggactatttcttggtgatagagcaataaactgacagccccatcacgcttccatggatgcacacatgtcaacagggcagctctggtcagactggcttcaacagtcttcacgttaccataaactcagctttttcatggcatagggagcccaagaacctagtaaaatgcaagctcaatctgtgtaaacaataaaccctccctgtgaaatctgatgtcctagaaaaaggacttcagataataaaaacaaatggtggaatgagatcctcaccacataccatcctcacccacgtggggctgtgtgggctggcagcttggggcaattgcaacatagggtgaggccaagtgggaggatcacagcaagtaaattgcaaacaaactcttctgggaattgtctgtgcaaattcacaagctgaattatcactgaatgggcattttcaacattcataaatggattggcctgctgcgactgggtgc

SEQ ID NO: 35674 - DNA, 1421 bp, Bovine  19866880773944
  misc_feature (1)..(1): n is a, c, g, or t
ntcctggtgcatgataaaggctcaatgcctacttgttgaataagtggacagatggacaaatgcactggcatatttgtctccagctgtccatcaacccaaatacaagattcattcttgagttataaactataagttttaggagaaacttttaaaccttgatggaggaaacatcccttttgctttctttattctccacatcccaacaaaatggagttttactggaatctcatcacaatgtaaatgcaggcccctgattgtcctggttgaattatggatcttccagttagacttagattgctgttatttttgacaggttgaaaatatttttaaaatagtcctttcttcagtgtcttagtgcctattctagatgagaaaagggaaaacattgaaactttgagtaccattcctcactgtaatctcaaaacaaaggattcacgtctttattttttaatgtgaattgaatttccctgcaactccaccccaaatcacagaatggagagaactgacattgaacaaactgatgctttcaggtgtaacctctgaactggaaaatctgtattagtttctcagggctgtcataaaaaagtatcacaatctgttgttgttcaattgctaagtggtgcctgactttttgtgatcccacggactgcaggcttccctgtccttcactgcatcccagagtttgttcaaattcatgtccattgagtcggtgatgccatccaaccatctcatcatttgttgccacctttttctcctgtcctcaatctttcccagcatcagggtcttttccagtgaggcggctctttgcatcaagtggccaaaggattggagcttcaacttcagcatcaatctgggtggcttaaaactacagaaatgtattctgtcacagtactggagtcttgcagtctgcaatcaaggtgtcagcagtggttggttccttctggtggtgctggaagaatctgtttcatgcctctctccgggcttctgggggctgcgcgctgcacttggtgttccctgacttgtagtgtctcactccagtctctgcttatcttcccctggccttcttctctctgtgtctgtatgtccacgtctcaaatctcttcctttctcttagaaggacatcagtcattggatttggtgtctctctgtgtgtgtgtgcacgcacatgcacactcagtcatgtctgactctttgtgaccctgtgggagcccatcttaaatccaggatgatctcttcctgaacccttaactacatctgcaaagactctgtttctaaataaggtcacattcacaagtaccaagggttagaactttgacgtatctttttgggggacacagactggatggtgagatccagagaggcaacatgacttgcccaagacatacagctatttatcgataaatcagaactacaactcagac

SEQ ID NO: 35675 - DNA, 1865 bp, Bovine  19866880775601
  misc_feature (1)..(1): n is a, c, g, or t
nccaaagagaaaggttataaaaaagagaatcagtgctaggaatgagaggaagcactggagtctaggaggttctaggatcaggaaaaggagtagggcatgcacaatgtctcaaagggtccaagagcctgagagtgagagcctccaagagccacagggcagggaagcccaggagaaggattggcaggctgaactgggcaactgtagagggattgggtataaatagtggagggggtgaggtgacacagactccttggagacccagaatgtgtcctgaacctatagaagggctcttcctcctgcccactctgcaattgttcagcccagagtttggaggtggaaagagagggaccatctggcttccatgcctgcctactacccagccattctagggggaggtgtaaaggctgcagagcataagtcctgccctgtttctgcccaacctggaactcagacctccaagcttcctttgcacttcatccagccacctgtaatgctctgcctggaggctttccctggatgctcagccaataaacctcacttccctatctgaagttctgtacttcttgctatagagtcactgggcacctactccactagaccatctggcactttggtgcaaattagaaaaagttgtgccttcctctaggcaaagcagccttgcaccaagctctagagtttggcaagtggagcatggactggatttcagcccccacttgcctatccaaccaaactccctcgtgtcctggacaaccatccacagcagcactgattactggagcctgcctgtatatatatctccatgtatgtgatcaccatttagctccctctaatatatatcgcaggtatgaatatgccagaagtctctccctcattagacattatgccccatggtaagggaccatgttaactcacccttctaaatgtttttggtgcctacctagaatagtgacccaaacacatcttcaccacaatagctattatttattgagtgtttattattttcacaacaacctcgtgtgagacaaatatcattgtttccactgttcatatgagaaaactgaggcttagaacggttaatgtgcccaaggcattgtaattagtaaagtgcagaaccaggttcaaatccaagcacacctaaatcaaaacctgtgttctctaggatctagagtctaaatgatctacaaacatgtacgggatgaaaaaagagaaaagacagatagttcatggtaaagttccaaagaaggtttgaggtgcctcagaaaaataacttggggaaacagggggggcccaagtaaggaatgatggggtcttaccgaagaagcagtagacgactccaaacagacagcacatgatgcagacgagcgctggaagtgcctcgtacctgcgctccaggggctgttcacagggtgctccccagaaggcatcatctggctccgggggcagcaactggaaccgaagtgttgccacagtgcccggcatagtgctgggaacagaagggagtcaccctcccacgtcagcctgacagagaggaagttgggggtcaaggaggagtcctgggtctccaccaggatgagggtgagatgggagtggagaactaggcaaagatacagtggacaaagggagtggtgcccacattacacagctctggaagcatccctgaagtaagggacaaaagacaaaagaggggaaaagtgcctggctagagggagctgggatgaagaagttaaaagggggactaagttggggggagaatgaaggccagcgtgctgcccggtgaggagacagccaggagactggtctgtgggcggttaaatctgggattatccaagatctacctgggcttggaggcgacctgagcttctgag

SEQ ID NO: 35676 - DNA, 1643 bp, Bovine  19866880815670
  misc_feature (1)..(1): n is a, c, g, or t
nagctcagtcaacagaaaagggaaaaaattaaatgtttccttccacctgcccctctatgaacatcaggcactgcccactgcacagttttcatctctataaaatcactcctttctgtaattctactacaggagaaatatgtgcacagtttatttctagatgtcatgattattttcagcttttttttttcttttcaaagaattctattcaatttgaaatctgtttacttataccagagagtacgtgcatgctcagtcgctcagtcatgtccaattctttgtgaccctatggactgtagcatgccaggctcctctgtccatgggattttccaggcaagaatattggaatgggttgccatttcctcctccatgggatcttcctcacccagatgtcatgattgttttcatcttttattccctttttgtaagaagtctatttgatttgaaatctgtttatttataccacagagtactgtttagtaataaagaggctggaaagtatcacttatttaatgcataatgtaatggtgttttactggggaaaaaatcaacgttaaggaaggaaaagcataaatatagatggagggttaggagaggtggatgaagaaagatgaaatgcgggggggggggggggagagacaagacttgagaaagagtaaaataagagaaaagtgagcaaaagaaggagaaagggagcaaagacagaaaatgaacttgttgggcagcagcccgagacctggtaccaaccatacatccaggaggagaggaagggagacagccatccaagaacaaagtacagaggacaccagatttatgaacagaactttgttatttggtctgaattcatcacccagatcctcaaacaaacccatatttatatgcaagtatggcaaatgcacatggagtatttagcattaacaatgtcattcaaaaggaaaacctctagctttcctgaacctgcatttgcatttattattttataaccgaagttctggcagatttcattcatcctcatgatgaccctgggagaaatatgaaactcttaccattgttcacattttctgttctcacgctagaacttatggaaaataagaggccttattcaataaatgtgaccccagatgtagagtgtatcactttaaccacaagataaccctgtttatcagagtatggtgagggaaaaattgggtgtatctctttgtttaaaacactgattttacattaagcttctcatctgcttcctaagatttctccacagcgctaagcagcacagcaggacaggtgacttcctgatctttacacctaggatcacctggtctactctaaggaaaaataaattctgccatgatagtgctccaaccctgaaacacagggacctggagctaagaatgtggcttcatggggtgaagtcaagataaagtggtgaagaggtgaagagtggttctctcaaggtaaagatctggtgaagaggtgcagagtgtgctaagccccagtgccactctttcaacaaacaggatctaattaaggagacttcgtccacctcttcatctatttcctaagactgttgtgcctactgctattaacttctgctgaaatctgggggctaacattggactttattgctatgcattaaaacagaatttgta

SEQ ID NO: 35677 - DNA, 1074 bp, Bovine  19866880860953
  misc_feature (1)..(1): n is a, c, g, or t
ncttggagaaggaaatagcagcccactccagtgttcttgcctggagaatcccagggatggcagagcctggtgggctgccgtctatggggttgcacagagttggacacaactgaagcaacttagcagcagcagcagtttgttacttctggctctaggaagataagaagaaaacatgatctgaaaaatgagttttcagggagttttagcaaaactggaaccactactgaccctgtgatatagtggcttgccctctacaatgcttataaaggtgtctaacgatgcccaccaacccaaaacatgaccttcaggtagtcagagaactgaaacagaatcttgttcctaattaggtcagaaatcctgagatcctccctttgtctgatatttccagctacattcaagatatttttagttgcttaagagtgttaagcatggtttaggattccttagagggaactgaatatccatatgacacttttcatggccattaaagtcaagtcgaaaggtggattctcaatctgggaagggagatgccctctcagaatttcaatcttggtggaaggggcagcatgaagatgtccctacctgttgaagtttttggtatgtcttttgtaggatggaatcaagaaccctgggatttccttttattgttgagaatcacacttgtgggtctgaggtcttgggagagatagaaaatctcactgagttcatctgttcagactgggacaatcaagggttgctggccacagaaatgtccttatagatgggtggcagtcaatttcaacaaatggaaaattcatgttgagtcaactgactgtcttcatgtaggcctcagtgggagtctaactgagcatgatgtggccttttgatcatccagcagctgaccaaaccaattgagtttttgcaactgcagcttttcattaggcatcataaagacacaacctaaataaagcattagcctctagaatgtgtttaaattgaatttctggatactttggcatgtgtccagttttaaatatgttctgatctaactgtatctaatctcaatcaaaggatcctagtataggaacattcccg

SEQ ID NO: 35678 - DNA, 3405 bp, Bovine  19866880867780
  misc_feature (1)..(1): n is a, c, g, or t
nttctttgccccagtaaaattacataaatgctctagtgtgcatgtggtttatatttaaggtgtaatgagctgttcaaatagagaagggcaggcaaccatattaaaaataaacatcaaattttaacaaagacacatccacttagtttgcaaatagtcctaatggtttcagtatactgcaactagtccagcctacaacatctttggttgaaaccaatttccagtttcagagtcttccagttaaattgtgatcacattgtcagagaaagaacagtctgtgatgagaggatagaaataagagtaaaatagggtagcagggataggagtacttaagactgtctaaccaaggctagtggatcaaaagtcagcctcaatctatgcgtgatgtgcatcgtagtggtatcttcctgactggtcctgggcacctccctctgcgttttgacaccaacttcttacacagtactatttataaaaccttaggggaaacaataagtcactcctctctgcttattttaggtttaaaacacatgcaggatagatttcaagtgcttaaagcacacgcatacacacacacacacacacacacacacacccctcatattcatcatcttctctatttataatggcaaatctgccctgatatttgcctcaataagtggtctttgtaaccagggaactaaccttgattctcagcccaaagaaatgctgggattctgtctttgaaaagatcaaaagtgagatctatggttccaataaaaccctatgttctagtttatagtttataaaccataaaatgttaactctccttggagtcttccaagtttcaaccgaaaaaatgccaaccgatcttgaaataaaacagctaatctcggagttttacattgctgagggttgacaacttcatctctctttttgcttgctagagactaggagttggaaagcagttatatcacccacttggacttgacttacaaataagtagccaaagatattttgagtggcaggtttccaagtttgcagaaacaagatgatgaacctaaacaaaacaaaacctagttggagctatacactctaggtcatctaacaccagtcagtgcattaactagattttcaaattcgttgatgatgccaatatttctgtcagtatgatcattaaggtaagccctgtttcctataatatcaaaatgacttcaaatcctgtctttggttcttatgtttcttgtagatttttctttccaaaaatcagatggtacttttcacctacccatcgagtgaaactttccctaactatctgaaacatctctggtttccaaaaactacaatgaaaaacttgtaaaaacatttcaagaaaaagataacatggaaacatgggctaaagtttagtctgtcacaaagatgaatttcacatctggaatttgcttggacccactttctgcaggctaggacatggagggattttgcagaaaaataaagttgactatcctagggttatttcatggcatatctgactctctgatgtcttgaaagtggttgcagtatctcagaaaggaaattccactatttaccctctgacaaggaggaatcacaaacttctaagctttttgcattttacaaagagttggaggcagtgggggctttataaggcatttggctgaatgagttgagtccttaggcagataattagaaaaaaatctgaaagaggtcagtttaacgtagaggtgggaaaaatataaaaataagaatctctcttagaaattttacagttttattggaaaacatttgagaatgggagaaaactacatggctatctattattaggaagaagaaaaaatgtttcatcctctggctaataattaaaattgccttgttgcttgttctgttagatgtctttttttcattgttaaagtaatacgtaccttaaaaattccaaagatatagaagtgtatggagttaatgatagtttttcttttgtcctctacttttcacttttaaccattacctctttccctcattttaataatggtcaaaatcaaagaaagtacatattgcgtaaacttgctactcaaagccttgtccacaaaccagcagcattgacatcctaagaactaggtagaaatgcagaattttagatcatattttggacttattgaatcagaatctgcattttaataaggtccctagtgatttgtatgtctatgtattaaagttagcatgcattgtcctacaaccctgaactctcacttgttggaatctattatacagaaatacaatacatacataaagctacaaatatatatatacacaaacacaaatatacatatgtgtgtgtatatatatatatatatatatatatgtataggcttccctgtggctcagcagtgaagaatctgcctgcaatgcaggacacacagattcgatcgctgggtcaagaagatcctctggaggagggcatgacaactcattccagtattcttgctgggaaaatcccatggagagaggagtcaggcagtctacagtccatggggtcacacagagttggacatgactgaagcaactgaacacacacacaaaaacatatgtgtatatgcttggattatatattataatatttatatttgggcttcccttgtggctcagctggtaaaggatttgcctgcagtgtgggagacctgggttgaatccctggattgggaagatcccctggaaaagggaaaggctacccactccactccagtattctgccatagagaattccatggattgtacagtccatgaggtcacaaagagtcggacacaactgagcaactttcactcactcactcatatttatatttaaagtgaacaaaatattatatagccatttgtaagagcaaaaaattagaaacaaccaaaatatccattattagggaacaatcaatcatagtgcagtcttaaggttgaacacaacacagagtgacgtctttcttcgagcctcaccgatgctcacctgagatccacctgatgctttggggcatttcatttcatagccaaaaagccccaaaacatgttttactaaatggatgaagataaacagataggtgagttatatctttcagatatagaatcatccagagtcaagttttccaattactttttccaaattgtatattgtacaactatatataataattttgaggttatataacatatatgatatattaagtaatgagttaacaatgctaaactggcacttagcatttagcatttataggaaatttggtatctctcctgggtctctaaattcctctcctcatccaatctcagccccttagttgatcaagcaccatgggatttgcttagatcaaaaggagtcagatctactctcaaatgacaaattgaggaagaaccagagcgtggatcagttccctg

SEQ ID NO: 35679 - DNA, 1042 bp, Bovine  19866880872086
  misc_feature (1)..(1): n is a, c, g, or t
ntgagaacacggtggccaaagttgatgaggtgaagtccactgtcaagttccagatgaagaaggtgctgtgtctggcagtgactgttggccacctgacgacgacagatgatgaggttgtgtacaacatcgtcttagctctcagcttcctggtgtccttgctcaagaaaaattggcagaatgtcagggccttgtgccttagagcacctgtactaaagcacagcttaataaaccatacttcactataaaaaaaaaaaaagaaaaacttggatgtttttggatcagttgatgctgaggttttcattctcaacaatgtcctactcacacatttttgggtttcccatcctatagcagctggtttgattcatttatttattttaaagttcaatttgtgatacagttagaagagactgtcagcaagggagagtcaaacggaaagtttatttatttttctccaaagggtaaatggtggacaagtaggggactgctggcatggggcttattggatttatttggtttattttttcctaaaatccttccctctaagaggacaaagttcttcttttctctttaagtgcaaagcccaaagtgagaaaaatttgaaatctgatttaaatttttttgatgtggaacagactaaagaaaacactgaggctgactgaattttctttaatttaaataggagagagattggaattcccacgagaggattgattgttgaaattcatatttatttttttaaaatctgtcattggggatatgctgattttgaaggataaaacagagagttaggagctccagaaatatgtgtgagactgggtcatgaaaggatgagaaagagctgaagccagtgatagccaatagccccaccaacacagtgagactggctcttgaagccacctgcaaatcccctgtctcaactgatgtgctgttaggctttatatttcctccattagaaatatttcatgatttgagtatgaattatataaaaacaaaaaagaaacattaagacccccaaccaaaaaccaattaaggaaaattcttg

SEQ ID NO: 35680 - DNA, 2550 bp, Bovine  19866880881749
  misc_feature (1)..(1): n is a, c, g, or t
nccatggtgatctctccctctttgggaactggggttggggtttgggtttttggttgtaagggccaagcttccattgagtcacctgtacattctgggtcttcttatacgtgtaaatagaggaggttgactatactctcttcattccacacccctctccctgacaggagaaaacacaatgtaatcctgacctttctagaaggatcaatcccagtaatcaagggacagcctttaaaaggtacaaaggcttctctcctgaatttttctcccaggatggagctgagaagaaccgcccccaccccagcccatattgcgttttgggggggatcatgctggggaaggattaagtttctaggaactttacctggccttctcctgtgttatcattccttgatgcaatttgtcccaacgcttcaataaagaacttcataaatacctgtccagccctgtgtcaaaattttggggagactgaatagacagagggtaaagggataggggactccttgctgatttcagtgaggagggcccatcctaactgttgaatgacctacattcaagcttagaggtggccctaggaggagctggagaaagattgccaggtggggaggagagcttctcagtgggaattccaagaggagcagtccaggtggcctacgggtcatggatctcagggtcctaagggaaaaattgcctggaaatccaggcagagccatagtgccagcctcagggtagggtgggattggaggctggacccagagtccccaaggttgctttggggaccgcaagggtttgtgaacttggccctttgtcccttcacttatttcagggactcttctctccacttgtctgccccttagttgctttctctattgcctttctccccagcatgaatagctttgtttacccctctagatcctttttccattcttccctgccctgctttgtgggcttccctgatggctcagcaattaaaaaacaaaacaaaacacaactgtccacctgcaatgcaggagacttgagttcaatacctgagttgggaagatcccctggagaaggaaacagcaagtattcactccagtattcttgcctggaaaatcccacggacagaggagcctgctgggctacagtccctggggttgcaaagagttggacacaacttagcaactaaatgacaacagccctgctctgtgccctgggaggcacaaagaccattaaaacatagaaatggaattttaaaaaaaaaacttgccaggtgaatgaacaacaccccagtgagttaatcctctgcgttgttcccagaggaagaaaagctaggtttaaaaaaagactcagtgagaaggtttcagggtggtaatggatcagaaatgagccctctcaataggtcggagccaatcagttgaaattagtcccgttattaattggtgaggaagcagacagcagtaagggttcagtaaggacccagcctccactcagcgttcatagtcggtggacgacttcagccggtcagaaccagccttgacaccacgcagattcagtgttgatctcctttggggcaaagcacccttacagggaggactctttccctccccgcttgaatggatcacccactggctctggtttgttttggccagtggagacggggctagggagcccgggggcttggaggaagatggaactgaggcctcattcctccagctcctttccttccagtaggctgggggtggctgactgcttccttggccctagacagcctctccatgcaactcccctctcctggttctgatgacgtcaggcctgagggtggcaagatcccgctgttaccagctctcaggtactgcatcatcctttgttaattttccttaaccctgccccccactttgaacataatctctttatccagtctttctcaaattactcagtttgagtgtagaatccttttcctgccaggaccttgacaggtaggttgacagatacaacctacactgcctgatttttttcctgccttcttactcacattttttacatcctcccaactttagctcgcatgcagcttgcatcgtggcactgttatctgccttaaaactttcagtgttagcttccactgcaaagggccttggtcagttaacatttctgagcaagtatcagatgggctgagagcctgttcttatgtcagggccacatcattcatgcctggcaagcctttaaatcagctcatttgttcagatactctcagttccatcggccatggctaaaggtggaaggaattctacggtacagagtgccgggtggggactgggtggggttagatgctgtgattgacacagaacttttcatacatttatgtctcctctcccttgtaggccaagagcatgtcttaactgcctgtgtatctacccaagtgtctagcctggggcttgccaggtggcactagtggtaaagaacccacctgccaaggcaggtagacgtaacagatgtaggttcaacccctggactgggaagggcatgggaatccacttcagtattcttgcctggagaatcccataaatagaggag

SEQ ID NO: 35681 - DNA, 1641 bp, Bovine  19866880910487
  misc_feature (1)..(1): n is a, c, g, or t
natgcacgatactggatgcttggggctggtgcactgggacgacccagagggatggtacggggagggtggagggtttaggatggggaacatgtgtatacctgtgtatatggattcatgttgatatatgacaaaaccaatacaatactgtaaagttaaataataaaataaaattaaaaaaaattttttttaacttgtttattttgggctgtgccgtgtctcccttgctgtgtgggctcctctgtcgtcatggctagcagaggctcctctctagttgtggtgtgcactcttctcattgcagagacttctcctgttgcagctcctggactcgagagcactggctcagtagttgtgacaggttttcccggactagggatccaacccgtgtctcctgcatcggccgacgaatccttcactgctgagccaccagggaagcctaatacataaatattttaaaaataatgcaggagataatgttcagaaggaaataattgtgaataaggcgaaggcaaaggactgatagtctgacatgtgctgtgcttaatcactcagtcatctccgactctttgcaactgcatgggctataggccaccaggctcctctgtccattggattctccaggcaagaatactggagtgggttgccatgccctcttccaggggatcttcccaatgcaaggatggaatctgtgcctcttaagtctcctgcattggcaggtgggttctttaccactagtgccacgtgggaagcccagaaagtggcagagtcagatgttaaactcagacttgtctgattccaaaggatggtagcatccatcatgctacgatgccccttatggggcactgcccctaaagccaagtggacaaatgttgggtggcagcgggccacaagaggatctgaagaactaagttatgtaagagttaaaaagaatcctaccagggaggttttttcataagtcttctccaaaggccagagctcagatttatgatgttggaatattcatgagttgccgcagtatgcagtactagagggaaaagttgcctgtgatagaaattaaccttaaggaagagctcttctgaatgaaggttcagatatggaagatgtgatcaagcaggcacacaactcatctgggaggctatggattcacgtcttaaaacgatgatgattgggaacgtggcagtatctattttcatgtatctatccatccatccattatctgctgtttgtgcaacccttattgaagcctagagagttgtaccaaaaccgaagcaaagcgaaccaaaccctcataagtggctttcagtcactctggggaaagacagatgcatgtaagaatagacaaaccacacggcaatgaggtgtccggttgagaatcaaaatgggtggtccagaggctggtgtttcctagtgaccctagaagaaggaggtcttgcaggatgtggtatggcccgtctggccatattggttgccttcagggaccattgtgaaacccgtgagactgccaggagtccagttaattctagtcttgagacaggctgagctgcaaaattggatatatagtctacccactgctgagatacagtttgggtctctgttgctctgtgtttgaaaatgagatgtcacctttaatcttaaacaccagta

SEQ ID NO: 35682 - DNA, 3163 bp, Bovine  19866880916010
  misc_feature (1)..(1): n is a, c, g, or t
ntcttttctttcaaccaagtttggcaacattgcctcaactggtgattaattattcactcagtagtgtgggactctttgggaccctagactgtagcccaccaggctcctctgtccaaacaattctcctggaatgcgttgccacttccttctccagtggatcttcctgaccctggaatcgaacctgggtctcctgaactgcaggtggattctttatcatctgagccaccagggaagccccagattactgcttattttacattaagtattgtacaacagtgtcttccccaagaggttctgagaaataccctagtcagcagcaaatttttaaaacttctcttaggggagattttcatgcatggttaatctccctcatgttaggttaactcttgttagtctcccttccagccaggaatgcatccgaacttgcgtcttaattctgggggttgtactccgttcggatcccacagcccctgtgcaggcgacattccacttgcgtccgatcactaaatgaagcaattgagtcactgccacccgcagtaataacacattctgacaaaaacatgaaagatagcatatctctgccttaactcatgtgggtatcagtagaggggaagaaagtaaattcttttaaaatacagacagaatcttttatcgatggaaaactgtcatccggtctttcttatctctttgtgcaatgacagcaggatttatctttcttagaagcaagcctccaaatgaatatcatgcctgttttgccaaggtgagtagtttctcattgttgggcccgcagacatgttttacatagatgttgtagtgcacgcacgccatctgtcatcaatccccatgccctccaagacgtcctaaagctattagcattagttagcccatttctctcccaaaaaggagagtccatgtgttcaaagcctgctctgcagaccccaggtgagcaaaaattccatattgcaatctctgcatccggccatatgtgtgcttctgtagctgcttcgctaataactgatggtaagcttagctagaagcttctcctccactggatgcaagagtccagattgggatcaatgttacaaagaaatccttccatctctctagacaccagcaagtagcagtttcttcttttcacccttcagttcattaaaaaggcttttatttctctgtaaacccaactttaggttttctcctaaggattagctcctttggtaataaccgaagagtaatcagtctcaagaaaataacaacagcaaatatttaccttgtgccaagtaccattctgagtatgttacaagtatcttaactcattcaatctttgtaacagcctatgaggtactactagaattgtccccattttacagatggagagactgagctacagtggccctagaggtcccatagctagcaagcaacagaaccagtatgtgaagccaggtaaatgggttccagaacctgcaacttcaaccacacctttgtcctgttggtcaagaagtttcaagacggtgactgcatcattatgtgactcttttctaaatgtcccggaaatgttacaacctgacactaaggacaccccctcccccactccaagaaactgccaatgtgacttctctactttgctcaaagtgggaggcatcattcttcttaagtccaatgtgagaccaaatcatatgactctaatcacagggaaaacttcccccacacaggtcaagtcgcaatgtcctcacagtggagagtttttctaactaaaaaagcttggaagttctatcagttggaatctggggcattaagtcaaacaggacatttattagaaggctatcaagagatttaacagaactgaaggcagttggagacccaggctgcacgaagaacaggagttcagagatggtctctttgggacagatccatggggacacccaggctttcactgcaatctgcccttacatcgctcatgtatcaagtggtgtcttgtgggcttagcctgagtcatgtacccaagctcagggtccactagaggagcctcacaggaaattctgattcaggggattgagtggcacttgctttgaaagaccactacagctcacttgttacctatacatgctttttttccccactttttggccatgcctgatggcatgtggcgtcttacttccctgatcaggggatcgaacccatgccccctgcatagaagcagggggtcttaaccactggactgccagggaagtccctaaatgcattttttaattccatacaaaggctagctgccaccgaaagtccaagaatcttggaagagatggaagacaagaatcattttcctttctacagatcaagatgctgagataggaaaggctatgtaatgtctggggaacactctagctgagtagcatctcaggtcttctaagtcctggacttgctttccaccccacatggtcccctggagacataagtgtagacttcagttcagttcagttcattcactcagtcgtgtcagactctgagatccaatggactgcagcatgcaccatctcccagagtttgttcaatttcatgtccattgagtcagtgattacccaaccatctcatcctctgttgccctcttctcctcctgacctcagtctttcccatcatcagggtcttttccagtgagtcggctctttgcatcaggtggctaaagtattggagtttcagcttcagcatcagtccttccaatgaatatccaggactgatttcctttaggattgactggtttgatcttcctgctgtccaaggaatgctcaagagccttctccaacaccacagtttaaaagtatctattcttcagcattcagctttctttatggtccaactctcacatttatacatgactattggaaaaaccatagctttgactagatggacctttgtcaacaaagtgatatttctgctttgtaaacctgagctgagctttgttgatggtgatggatccccaggctgcaggacctgctctctcggcagaaaggcctggggatatgatcgcctgcatcttccgctctcccagctcccagtcatgtctgttttcctagagcaggactgggggagagagaggttttattagatgcagcagggagcatggctcaagaaacacttgagtgattctcagtcaggcatgaacgagtgtgca

SEQ ID NO: 35683 - DNA, 1023 bp, Bovine  19866880956887
  misc_feature (1)..(1): n is a, c, g, or t
naaatcaaccatccgttaagaaaataatacagtgatgtataaattcatatattctgccagccaactcaaattccttcaaatctaacactcatacaagaaaatcctgattgaaatgtccagaggaggctatgaattctgtcccctggcatcagacttaaaggcattcccctttacatgttttcatatggtcaccttcaaaaagaaagagtccgggagggaggaagggagggaagcagaaggaagagaggatgataacctaaagtcttgctttggcaagaaaaattcctttctgcaaacatgagagttagaacattctccctgcataacaggcatggttacataacattcctgaaacagacgaaccatgaattccaatgaaagctccattctttcagaatgccataactactagaagttaatttatggacttgcctgaagtgcagatgctctatctgggtcttctgacagccttgcaattttaaaagcaagttggatcccagcgctcttgaagatggagaggcagccgagacccaccttccctgattgtctgatcaagatcccacttgagtggagataccagcttactagttattgtgtctaatgagtaaattgttgagcctctagctttaaatgagttgtatgcagttattctctaccaatgaagggatggggtaaaagattttccaatttaacctcatgttttacacatttttagataaagcagtgaaaaacaacgtttaaaatctgattaatgagttctattttttttttttttctgttcttggcagggaggttactaaaatagtgcaccggggttctttgtgtggtttctttgccctttaacagttatttaacaaaaatactccaatctgcatttgatatctttatgctattgacattcaaactcctaggagctgtctagcccactgagactggcttttatcttttcctggtatttggagactaaaatggacaatgacagcagccccagccttactgaagctcatcaaactgtctcattca

SEQ ID NO: 35684 - DNA, 1456 bp, Bovine  19866880958687
  misc_feature (1)..(1): n is a, c, g, or t
ncatggggatgactctggcatgacattccctttagagaaagctccagagaaggaaatggcaacctactccagtcttcttacctgggaaatcccatgaacagaggagcctggcaggctaccctccatggggtcgcagaagtgttgcacgtgacttagctactaaatcactagagttacatggctcccctagaataaaaggtgggaatacctgggaagggtgaggggctcaaaggagggcctgcttcccgccccccccacccccaccgccacacacacacaaaccttccctcaccctccagtcagattgcttcccaaggtccctcctgggctggggctgagtctctagccctgcacactcatgcatgattctaaccaccttggatgctaattaagcaccttcccacagagaaaattcctctgttgttttaaatatttatctgtgtttccagagctacagaccttgaatttcttgctcccaggggatctataccagcctggagtttgtttgtatgtggtttcgtcgtagacatttcgttgtgggctgtccagtgatgcccaggaacaaggctactcatgcattgaggtaccatgccttatttagatgagtcatgggataattttttgagacctctgagttaatcttgagttagtacctgaaaacagaaagaatcataaagaagagagcattggtcgtgaagtcagaaaatcaagtttaatggctttgccatttctagctatatgtcttggggtgagtcacttagactgtctctatttcatccatatgcctaccagagtttatgtgaagttcaagtataatacatacataaacagtattatatatatgtatgtatatatatagtatataatatttagtgtatacatcatatagtattcattatactatattatataatattttaatattatgtacatgtatatgatatttgtgtatatatgttaaagtattatatatatcaatttgggaaaagtactgaactgcatgtgtattcgggattcttatttttgaaataatgtagttttcatatcccgttacatttagttctgttggagcatgttcccagtgatgtttgaattttaaacaagaagcactgtgatataatagctcagttgttttaaatggactgtcccgtctcctcttggggaaaatgaaagtcacaccagaaaatcatctagtatgctcctcttgtttccaactgcaatttactgtggaggcaaggaacaaagagaggtaagtcgatcagctataaaggggacggtgaccttcattcacttctactctctctctttttttgtgtgactgagggacaataataataaattctcttcccttgcctatttcaagacagagagattttaggggtgttttatgactttggcttatctcaagccaatccgctccactagtggtgatgaaaaaacccttgatgcccattag

SEQ ID NO: 35685 - DNA, 887 bp, Bovine  19866880968071
  misc_feature (1)..(1): n is a, c, g, or t
nggttctccgtctcttctttctcctccttcattctttggcttagaacatggacatggacaaggtggccagacatcttggactgtgaagatgtgggaacagtctaagtttggcagagcaacagcacacaaggtgcctgggttccctgataatatcatgagagcaaagccaccatatcaacttgaccttctttgtaagaaatatatgtgagaaataggtctttttaaaccactgttatttttttacttctgttttagacagcagaaattatgtcctaactaatgttgcttgtataatcatgaagttccaaaacttcagccttatgtaatttagaaagtatccagtccaacccttcatggtacatatgatgtatctgggacttgacctaggtcttctgactcctcccctctcacttccagcctcagaactttcccatcaaactgcattaattgatcttctccactaagcaggtaacagagattcagctatgaatgatcaaatttggtttttaaagacttttccccacctataagatgatgtgtgagtgaaacaacagtaattgcctccttctaaaaggaacaaagaattctgattcggagtctgattgtggctcagtcggtaaagaaactgcctgcaatgcaagaggcccgggtttgattcctgggtcggaaagatcccctggagaagggaatggcaacccactccagtattcttacctggagaatcccatgaacagaggagcctggccaggctatagttaatggggtcgcaagactcggacacgacttagcaactaaaccaccaagatgatgtgtgagtgaaacaaaagtaatcgtctccttataaaaggaacaaagaatttctggttctgagtctgcccacttttatt

SEQ ID NO: 35686 - DNA, 3505 bp, Bovine  19866881062517
  misc_feature (1)..(1): n is a, c, g, or t
nttgcatattgcccatgttgctctcctgctacatcagagtttcattaccgcacagagaaggtgacgcacaaaagccaaaaatatttactatctgaccctttacagaaaaagcgtgctggcacctgccctcaatcacagaggccactatgatcaagaagttggcttttctcagaggaacacgagaagccattaggggacttggagcagaggagtgacatgaccagactcacaatttagaaggatcagggcagctgctgagtaaagaataaattgtaggagtagaagcagggaaatcaattaggaggtgagaaatgaagatggtttagactggaaatgtaatcagattagaagatgtgcagagtcgtgtggtgctcatagcacagtgagctggttgcttcaccctgaccctgagcatttgggtttatgcaggagaaatggggagtagtgaggggaaaaatgggtagtttttcccagggcaggagcaaaaccacagttcctaaaggttgccatgagctaataccctctccaagtgatctcctattgttgtgtgttctgggcttgggctggagtccaggaaagactctgaatcacttctggtaccggaagccacgtgtgctgttgttactgttttattgcctgtgcctggcttccttgctaagacgaatgcaaactccaaatggcttgaggttgggggcataggtcagaggggctcagccagaggaaagacagtccttagagtgatggctgttgaccagagactcagaaagtcaaaggctagaaaaggaggtggctccaagaggagatgctcaaaaagaaggtgtgagggtcttccagtcgggccaccaaccaccaccaacaggatgagctttttcctctcgccatctgtctccctccaaacaccacacacacaggtgccccctttaaatgagacctgttttctccatcacctctttctcaatgttattttaattagtctctaccacacatgggtgtgggagaaggctcagcaagatcatggggaagcccattaggtctttctcagcaagaaagaaaataaaaaagagtatgggaatctaggatcctcgggcttgaacctcctaactgtaacttactcactgtgtgaactagagcaagttacttaacttctctgtgcctcgattctctcacctggcagataggggatgagaaagcagtcaattatacaactgatgagaaagcaattgttatgaggattgcaaatcaacatataagaagcccctgacccttatcagtagccgttaccaagactagaattatgtgatggaaagaggacgttttgtttaccaactgtgtaatcctgagaaagacaaataacctttctgagcttcatagtttccttgcctataaaatgaagagcatacaacctctatcacagaaggggggattaaattcacccaaaataaacagcagatgtaaagtatttaataaagaattggcatagagggcgcagtgcagtgatacctttattatttgcaaaaataaagttctgaagtcatgaccttcaacaagagggtaggagggagactgacaaagcaaccaaaagatttcaggcccatagcaggctaaggccaaagacgaccaaaggccaagtaagggtgcccacccagagcagagttgccacgcctgttgattccagctcaacctcagtcaggattggttccaatgggcttaggtcctggactggaccttccttcccctacaacttccagtggtgagaagttgtaatagatgatcaggattccctgggagagagaaagaagactcccattcctgtctgcccctctacctcaggcctcttcccaagaccactgacgaaggagcgcagacaagcttggggcgctgcaaggaccaacagacagtgagtgtttgtgaattgaaatccatcgtggaatctgaagacgagaaaggatctgcgcggtcagtagggattctagcagaactggacaggccactgactcacttaccctgagcctatttcttcatctgtaaaagggaataaattgttgtgagctctaactaaggcttgagaataggaaattaattaatcaagactctctccatccaatgtaccacaagtcccatctcagagccagaaaaatggaaatgaaatgggaaggaatgcagttagatagcctcccaagctcccagttggtcccagagtcagtacagcaacccacactcctgactcccaactgtaggcctcagaccttgctgcccactctgtcccggtgcttattagagtgacaggctatgtgcatctcaaagcaagtcactgtgtgatcctggggaataggacttgtctggacctctctggggaccctggactgaaccagcatctcctgaagaagtggtttcattggacctgatgtacactctaaggagatatgggagaagattgcatatggtgcttagagatacagaataaagagtgacacaggactgatgagcaagctcaggctgcatgactctggtcctcatccccaactccctgcaaatctctgaaccctagatggactctggagctaccagagtctattgagctcttctctccttacaggatgtatctaaggcactctccacaaagtttacagagcaaatatgggggctccataaatttcaacttgttaaatgagtgaagaaatgaatgaagaaataaatactgaagttccaaaaaataaataaatactaaagttccaaatcttgatggctgattcctatataccttgactaatgcccatctcacaaaaatgacactttgttatccaattgctagtctaaaggccgagggcctttgggttcaacccaacctgtgcccttctccacaaaatgacagtggcaatggcttctcagtttattccacaagataactgagagaatcaagtcagaatggacatgaacatgctttacatggagtaggatacacaatagtaagcgaatatcacaaagatttcaaaatatcccatttatctcaaaatacctcagtttatctcaaattatctcaaaatgtctcaatgatcttgaatatcacaaaaatcttcagaagcttcctcaggcccctttgaggtcaaatggggggacaccacatgctggagaggaggaaatagtgctttgattctcatgccagcaaggtctccaacagtgcacagcctattctgtgctttccttgagagtctacatatctctccacactgacgacaggagtgtagtagtaacaagacattgtggtaacaacagcagcagtagaaagagccaccactgtttaatcagtacttactatgtgcgtggctccaggccaaatgcctctcaccatcatctctctaagtcgccaaacatctgtttaagctggaagaggtaactagaatgtgtgtgtgggtgctaagttgcttcagttgtccctgactctttgtgaccctatggaccatatcccaccaggctttctgtccatgggattctccaagcaagaata

SEQ ID NO: 35687 - DNA, 934 bp, Bovine  19866881073499
  misc_feature (1)..(1): n is a, c, g, or t
nccccactgtggctcttcccaccccgtggctgaccgctccttcctgggcctgctgccttctccctaggccactgttgaagacagagtcttcctcggagcctccccggttcttctaccttcgagtgttcctggttgaaggtgagatctggcccgggccttccagccgtccagccccttggcgcctcttcgtgcctttgtagtaattcagtgccaggatgtagacttccacccagtagcagtctcagtgtcccggcctctctggagggtccagggcatgccatggggtgtcttgttgctcaggaatctttgctttggggcccaggctttgtgggaagtagagcagatcatctcagtctgccctatcctacccttttggtgaaggggagagtgggtgcatctttctgatgtaggggtgggagtggggcaggttctctctgacttgggcctcagaggttttggaggctagagatccctggagtttgggaaagtgagaactgtggtccccagaggcacaggccttgctgtggccgcctcactgtggtcactcctcctctccgagcagcactgggacaccagcccggggatctggctcttccatggccttctctgggcctcaccctgtctcttgtaccctaggaccggctgcctgccctgtgtccctgttgctgactctgtccaccctgtacctgttagatgaggaccctgcagggtcccaggcagagccccctcctccagcagcgtctggcgaagcatctgagaaggccccaccccccgggccaggcccctcagtgagcgtcagggagcagcagcccctcagcagcctgagctctgtgctgctgtatcgcgtggccccagaggctctgcggctggtcttctacgacgaggtgtggagcgaacgagagagaggggtggggagggggtggtgaggggcggt

SEQ ID NO: 35688 - DNA, 900 bp, Bovine  19866881080348
  misc_feature (1)..(1): n is a, c, g, or t
ntgggacagataccttgtttactgggagtctagaagagggaaggaagagggaggccctgaactggaggcaaggagagagagcagtgggcttctggactgtggaggtacggggaacactcctacagtgcttccaactctagtgctttaggaactctgcaatctcctgactttcctgaaacactcagctggcatcaccaggtcagaggacaggctggaggactcttacaatccaagagtgttggagctggaagacagatgatctcatctacttcatctcagttctgcaataagtaaactgggaccatgggagtgaaatagcccctcccaagataataggctgttatggggagccagaactattctctggagcacagtgggcatctttactgcatctttactctttactttagtgacaagagtggtgcatgtgtcagagaaagatgtcaagtcacaaaagtcaccacaactgatttgctagacacggaaaaggaaaaaagttggtcgatctggttacctagtgtttgacacagcccagaggctgttggaatataaaatcctgtgggcagacctggaaaatataaatcagaacaactgggtataataatttggctatcagctgttagcccaacagaaagacatttccttaggaggaggggaatagaaagaaagctttgttaaatgcactcaaacctggtgaaaacatcaaaataatctcattaaagagtaatacacacagacaaaaggagttcactgcagtcttaaaaatctctttaaggaatttcatttaattctcccctcggtagacttggtttgttttttattttcaagtttgcctataaggcaatacttacatcattatatttagagtaagggtctatccctgcaaacacttatttaggt

SEQ ID NO: 35689 - DNA, 1759 bp, Bovine  19866881108284
  misc_feature (1)..(1): n is a, c, g, or t
ntacctggatacaagagagcctgagaaaagtcactttattctaaccggccatctgcttaactacgagttctagttttataggagaagaaaacagagtttgggaatagctatcagtttttgtcatacatcatgtctgagacagtgtagaggacaggatctcctattgcttgcatcggtgctcagtgaggcatggggggaaccaggtggggaagtccttgatatccttgacaaaagcccaacttggaggaataactgtgggtctcagagacctggctgctcaagctctattattcaaataagtgagcaatggttaaaaactccttgtgggagaatctgcccagtcccttatgttcccctttctctgagctttacacgttcccctttctctgagctttactccttgctctccagcatggtgggcaatggtagccatgttggtacctaacaaacacgtagccatgtttcccatcaggggccacagactgaaacaggggtggacagctgacctaggctgggctcacctgctttctcttgggtattcagagctgtagctgagagactcctattagttgggggccatttgcttgagcctgagtgttatcaactcaaaagcggtgagcattatcttctgtcatttgtgtggagaatcagaggaaggcagtcctcagacagagaaggacgagacagcgtttggagagggcagctcccgaacctgtagggtctgagagagaaattgggagccggtggctgattcctgttggtgccacagtttcacataaagctgagatgcattcactcctgttgagtttattaaaaatacatcatgtatttatagagagagcttttttttttttttaaaagaacttctaatctgaccagttttctttctttttttaaaatcaaatcttaaaatctcacatatcattttagcagctaatggcttgcaaatttcaattttctacttgtcactaagagtgacaactcagaagggactatataaattgattcacccagccaaacttatccaaagtggggaagctaaataggtcagtcaatggaaaccataaaccatggtgtcttttcccaaataaaacagcaagaaatccatataggaagagatgaaatgcagtgcatttgttcagaagggagactgaaaacaacccctctttatttttaaatatctccctctctaactccagggaatgtggttttgaaaaagatcgtatatgtgggtcttagaggacagaactcactctacatttataacctgacttcaaaggaaaaaaaaaaaaggtaggcaagtcatcaacttgcttaaataaaatttaagagtggaaattcagatgaggaatagagtccatgctgtgaaactcctcatatgaaatatgaaatccactaacagaaatatgttagtgtaagagttccactgactggaacctaattaatcagagctttcagtgattatcattcttgaaaccttaaatcagggatataataaaacaaatgaagtccttgggagagtcataactttaggcttaaaaattgtttttacttccaatacttatctagagccagagaattgaccaaatacttgcattttagagctagtaagactttaaaggcggtcaagtgtatggggttttcatccttagctgcatattacagccccttggggaacttttaaaaatctggatgttcaggctgtaccccataccaattaaatttaaatctctggctggggggatactgggcatccgta

SEQ ID NO: 35690 - DNA, 974 bp, Bovine  19866881122420
  misc_feature (1)..(1): n is a, c, g, or t
ncgtgagtctgtgacagcctgtggttgtccctactctgcagaacccccagtgcgcatcctatacccccaggacgaggtgaccttggtggccgtgagcttggagtgtgtggtgctgatgtgtgagctgtctcgggaggatgccccagtgcgctggtacaaggacgggctggaggtggaggaaagcgaggccctggtgctggagagcgacgggccccaccgtcgcctggtgctgcccgccgcccagccccaggacgggggcgagttcgtatgcgacgccggagacgactcagccttctacactgtcactgtcacaggtgggcagtctccgagacccccttggagaggaagagaggcaggaggctgagggacagatacccacccctcccagttcctgcaccttcaggacccctgtgtgccacacacaactttccccctgtccaggcttccctccctcccagcctcctcattctcagccatcagagagccctgagttgcccaaaccaggtcaggacagtggccagaggcctggtggagagagcccaacaattgggagagctcattcattcgtgtattcaacaaacactgatctgctcagcactgttctgatgctgagggattcggtaatgaacgaaggagagaaaacctgtctttatggagcttgccttcttgtgagagcagacagacagcaaataagggaaacaggtggtttttcaggtggtgatcagttcttcagaggcaaaacaggaaaaagggacaggaaatggaggggtagggagggctgtgcattagggttagatctgtgagtgtgggtctacctcttcctgtccatgcaaccctgggcaagtcagttccctataaagaggcttcaggtcctcatctataaagtgaaggcagaaatagggagtgtcaggagtagctgagaaaagaactgtagtgtccttagcatgacacctggcacacagtaagtgcctacg

SEQ ID NO: 35691 - DNA, 964 bp, Bovine  19866881150769
  misc_feature (1)..(1): n is a, c, g, or t
ngtattctaaccaggacctggtgacatgccccaactcctgattcctgttctgtctggcagccttttgccattcctccacggactcaaatttacccatctactcacgggggctcagtacaaagtacctcgtccaggtcaagattcccttccacgattgcacaacagcacaaaaatccctggggaactaagacaaggatggcagagtgggaaaattccagactagtaaatgagaaagggagaagctagcccatgggttcacaaaatctccctcagcaatggagtttatctgcagcttaggccccatctttatcccttcagagagagtgagcgattccagacctggcttgactttttctggtttatggtgaagtttctgccttcgaggtaaggagcagatgtttcctaagctcctagggatttatcggccttgttcacaccttcaacagacagttcattgtaggtttaatttatactgttctgtttcactggtgggacaataattctggctccatcttaagtcacaaaatggcggtgtaaaagaaagccaaaccgcgcttctccaggcttgcatctctgcctcggctcttctgtacatgtgactcccttccactacagttcatatattctctgaatccatacaataaagtttatctcagctttgcaatttgttgccaagcaaggctcagtggcaccgcaggaagatcatcaactgggaagccgggggtctgggttcaaaccctagttgtgccagtaaattgcttcccttctctgggcctcagtttattcatctgtgacctgaggagattgagcttaatgatttatatagaaggtccctcccagctgtgacattctattaaactggaaggttttggtgaagagaggcgcttgacatctactccagctgtaccctcccaatttcccacaatgcccctctgctcctccccctccactaggcttaacccgc

SEQ ID NO: 35692 - DNA, 1042 bp, Bovine  19866881170048
  misc_feature (1)..(1): n is a, c, g, or t
ntgaaatctggcaacagcagtgggttgtgtggtatattcaattacagcaaacacagacgctgcccggggggaagaagccagtctggacaccaagcaaaagtaggaccctcctggtaaccaccagtagagaaaggaaatttgttaggatgttacaaaaatggggagttggtgaatgcagacacttcaagcaggatcgctcctccacatggctctcacataagcgttctcaatacatctccaactctgagcgcctccagagacaaagcccttagaaggccagatcttggatttcctaccacctcttctgtgagctgactgcaagccttctagaaaccctcctgtttcgtgaatgtacgcatgcctgaagggaggaggttttctgtccttttcactgacttgttctctcccctcctcaattcagtaaactctatgaagccacagccaccaagatggagccagaaacatcccaaggcactttactttgactggtaagccaggatgacacccagaccctggggtgggagagaacttgagtatgggcatgagggaaacagaaagtaaagatagggaggccagagagagaagagactctggacaatcaaccaagattaatctgtgtaaccgaaaatccaactgatggcaaaagtaaagagatgtcatacactcacatacacccatatgagttcataatcagataacactgtttcatttccccctgaaatctctttcactcttgaaggaacataatatagggctgcaaatgatcaaacaagtcaattctaaaggaaaccaacactgaatcttcattggaaggatggatgatgaaactgaagctccaatactttggccacctgatgcaaacagttgactcactggaaaacatcctaatgctgggaaagattaaaagcaaaaggagaagaaggtggcagaggatcagatggttagataacatcactgactcaagggacatgagtttgagcaaactccaggagataacagacttctgaaggacagggaagccggcatgcagcagttcagggat

SEQ ID NO: 35693 - DNA, 2668 bp, Bovine  19866881210816
  misc_feature (1)..(1): n is a, c, g, or t
nataatgaaaataaacttagctaaaaaaaaaaaaaaatgacttttcgtatattgaaaagaggattgaatgcaccacggaccaagaaatcccctcatcaaatccaatcttgatgttttacctaccacctgattagtcccacctgtcactcagctgttctatctcccaggttcagtgtatgagcaattttactgtggtttgtcaatttggtatcagtcccccgagactggaatactgttcaaggtggtaagaagaaaaaaaaaaaggatcttattattgctattagcaaatatttgaatcacattttaaaagcctcgacttcttgaagaaattatagcttactctacagcaacaatgcaaagataattatgaaggactggcacttaataaaacaattttatttatatagacctcaaggtaaaacttgatttgaaaatacaagtaattttatgactccaaagccaaaatactaatacatctttgtagtccttgagtatcctgagagtgaaataaatttggaaagattcatcatgagcagaaaaatcattctggaaaaaaaaataatggttttatgtttttcattagtattgtacctttgaaaatattctttcacgtctcacttatgttttatcataatattttcctcttgtttgttctgctgatactaattatcttgatttatgaacactgctagagaagttggacaagccaaatacctttccatattaaagacactgtgcttgtaaaaccactgggtgaggaaaatagatttttccaacctaagcactgattatagtcttggtttcatagaatagtaaggagtataatgacctctcagttatcctctgttgacaagatataatcaacattttcttttttcttgatctccagctgaacatttataaatggtcaccctattttaaataagttattatgaaatgagaaatatttatagaacattccattaggagagaaagttatacccataacattaaagtttgtttttctgtacactgcgtagggctatctcaagctcaatctcttccttatgttttgaaaatatggtatgcagttcatacacagatctctatgtaatacttctgctaaacttatttgtcaatgcaataaaatgtatccatccaaaaatattattacttagcattcactaatagcactgattattcaggcttgaagttagaaaagcatattctatatacatgatttattctccttcttgaaaattccatgcaaaggaagagatgtatcttatttttaatttgaggactagtaaaattattcagtattaatcaccaacatttaagtggctgtgatatgctaagcccctttgttgtacatactgaacttcattgtggccccagtttacagatgagaaactgaggaatgggaaacattaggaatgctttgtttaaaaatgagaacataactaatatggctaacaaatacattttatttttcttctcattaaaaagcagtgaaagtataaagcagtttggagctggtccattggctcagtatcatcaagaatgtactatctttctgtgtcagcctctcagctggttggaatattgctgcagggttgtttaagagatggaagttacagggtttagcatcacattttctgtttgtatcagtcaaggccattggggaaaacagaaacttctgtagctattttaaatggaaaggggatttcagtgtttatggaattatcgggatggtggtctggaagaatggaggtctgcataagtcattgctggttccgagtttgcaactagctttggggattaggaagctgcaggaactacagaaataactgatcatgattgccctgctcagcgtcaaaactgctgacactaaagaaaatgaccagcacgcatatatgtttagtcactcagtcgtgtccgactctgtgcaaccccatgaactggagcctgtcagactcctctgtccatgagattctccaggcaagaatactagagtgggttgccagttccatctccaggggaaaatgaccagaaaccactgcaaatatctctcctctgctgaagactatggatctgctcactgctgtccaaggaccaatgaaatggcttttgcttctcttctgcattccagatctcatataagtgctggctttatgtagaaactctgctggcaagaaatctgagaaaagtagttctcaggcttctggccctatagctcaggaagagcatcaaagggagaaaatggtattgagttgccaatagacaatcatgcatgaggatccgaggagcaaggaggcaaggaggatccactgacaaactccatccctttactggaaaagcaaatatttttgcttacatttcaaggtccagaactatgccaccttttgctcctagaaggcaaagtaatgaagaagaacctactgtgtcagagttccctttggtggtgtattaagactatatagattgtgtcctgcagagtgaggtggtgcaaattatacccacagggttggttgatctttctcagtatctgaactcatactctggggaggtgaaaactccagggctgtgttgattgaagatacatttcaatacattcaggcaaagaaagtgaaatcaccaatatgttacttaccaatcccaaaaatgacggtggggaggcaggggccca

SEQ ID NO: 35694 - DNA, 1468 bp, Bovine  19866881279153
  misc_feature (1)..(1): n is a, c, g, or t
nacctgggaagtctcctcacctatgaatttagaacagacactactggctggcctataagcgcatgttcaatgattcacatattttgtatgtgagtagttgttcagagtttggattctagagacggaatctctggctagattccaatcttagctcttccattgattaacagtgaccttgggcaagtggcttcatctgtctttgcctcaacatctgtaactcaggaataatactactcacccatcaggctttcagtgatccccacctacaggtattcacagtgttgtgtaggaccctcctccatcgtgccagagtcagctgtgtgactgagtacagcagaagtgatggtatattgctcccatgttataaaatacactgtggcttcaacgatactgttccctgtatttcttctctgtctgtactgtctctctctctctctgtgcctctccttcttttaggctaggggaagccagatgtcgcgaaacaaggacactcaggctcactgttgaaagtctcatgaagggagaaagaggcctgcaaacaccacatgaatgaacttggaagtggatcctccagccccaggtgatggcaactctggccaagagtttgatcctcatgagagatcctgagccagaccacctagctacacttctccccaaatcctgacccacagaaactgtgggataacaaatgtttgttgttttaagcaaataaataatggacactgtatcttatagcattgttaatctttataaaattctagaagaatacctgccacatagtaaaacaccatgtgtgtgtctgtcaaatacatgcatttacacatgcatacctaacttgggggttagtggaaggaaagtggccttccagttggtcaaaacctagtcaagccttagctgttttaaactcaaaagctcttgctttctttgaggcagtcttgcctgttttcacaacaatctgaaatgaggaagagaccctgatttatatttcccacagaagagaagagagattgaaatggtaagtgccagagaaattaaaagtaatttcggtttttcaattcattacttctggaaaaaaaatttgagcccagcttcattactagtgctctgttttagtgctgatgataattgcaaaggcagtattttaaattagaatgtataagaccacatgtatttaacctgtacagaagggctgagacttcatattaaactattaaatcaatcccagcagaatcactaatgctgagcaattgatttgaaaatactgtaagggcagagtaaagaagcaggatgctaattaccatccaggagcatttagcacacactcctcagttatagttagagtggcagactttttcctctggcccttaacccactcagaactgaggatgcagatcagttcagaatgaatacttaaaacaatcggagtttaaggcaagagagggtttttctgccactctgtaatctcatg

SEQ ID NO: 35695 - DNA, 1091 bp, Bovine  19866881301896
  misc_feature (1)..(1): n is a, c, g, or t
ntcatctctagctggggccctggagtgacaacgaccccattgcgcagccaagtgatgtcggcatctggtggggagacttcacaccggaacgtggcgtcatccccctcatggacagtgagtggtgtcagctccgagattagcttcaccagcgggggttctgggggcagagggcaggatcagacagtgaggggggctgggtctttctaccgccaccctcctcagcccctcctcatccccagtaacaggctttcaccccccagttattaaacagaatcttcctgaggaccagctgtgtgtcagtcatgagctgttttgaaggacaagatgtcaactccctgcctgccactcctcaccacctcgtctccatgctggccgggcacccacctttctgactccctaataaagacagatcgtttaggacagaccctgtcaatctcatttaactgtcacaatagccctacaggccaaacgctatcctccctctggggacccggggctcagacagtctaagcaacttgccagtgtgtcacacaactactgggaaggagacttgagactggaacctggggggtagactccagagccctctgcccctcctttttgaggattcctggaaaggggagccctgagccctcatccatgcgatagctgtgcatgcattggtgggcagcgaggtgggtgggggcgaatggtggggggttggcgtgaggcccttagtgggggggctggggccccaggggagtaaggacggcactgttaccttccacgctgacgaggaagatgcggctgtcctggggcgtgtcgcacaggtactccccagcgtccctgctccgtgccccccgcacccgcagcacctgccttgccccgtcctgctccagctgcacccgcccctggctggccaggcgctccccgtccttgtaccagcgtacagggccccctggcccggagaggcgcaccgccagctctaggtccccacctggggtgctgcgaaccctcgtctgggcttgcctcgggggccaccacccgcacaggggggctctgtggggtcaagggccgggtgtcattggggagggaatggctcaagggctggg

SEQ ID NO: 35696 - DNA, 916 bp, Bovine  19866881424177
  misc_feature (1)..(1): n is a, c, g, or t
nccagtgcaccagggtttttgactcccaagctgcactccagatgaagttgaaaagccacctttctgaagacaccacatctgaccatctgtttgactttctgacatgatcaatctgtcctgacaacctccccagcagaggaatcagtgatgcaaacacgtggcgtgcactctgtgatagaccacacagacagacccacggacagacagtcagcccacagacagacctggactggtggcacaggggccagagctggctgctctgagaagtgccccaatatcctgtggctagacccttcccccactggtctgtctattcatccaataagcgtcatcaagcacctatgaagtgtcaggctgtcagctggagagggaggaagaaagataaaatgttccttccatccagaggaattatcttgccactccctgccctccatccatttatgacctaactgaggagagcagctggaataagaaaaataatcgcagccccgtgtacatcaagtgtcagatgagtggcccagaccaggaggatttcaaatgttctaacaggggagtgatcctcaaggtcaagaggtttcatgtatggaaggactttggctttgcagtgtcagtggggctggaaacctaacatatatcagcaagtccaggagaacccacctcgtcccaggtcagttcaagcctgagcagggctagcagcttaagcctgtgacccagctcccactatggacaggaggacgctgatggaagagagggaaaccaattcagaaaggccagccatccttggcaggtaggtgacaacagagcagcaggcatctcctgccccatcagatcccctcggcaggcataaagacctggttttctcacctggtaaaataagacatgagtcccttcctcccagagccagtggaagatcaac

SEQ ID NO: 35697 - DNA, 801 bp, Bovine  19866881430807
  misc_feature (1)..(1): n is a, c, g, or t
ngctaatctttaccccaaaaattatgaaagccttggatcatttttaatcttatccatgaatgctttatacttattttaaaaatttactcctcctttatgattttgatcacttcttggtagttccaacagttttcaaaactacataaatttgaaaactgttatcttgacattgttgaaaattttctttggaaaataggaggtgcggtttcattttattcttcaagttagattttcctttgattttgaagctcactctgggtctttttttttttgcagcactgggcaatctgtggggcatcttttcatttaaataatattgcagtaaacagagaaatgtcagagaccagaaggagaacaacagggaaatatcacttatgatattcagacagatcttctatagagttaacaggttttaattctgaataaattcaacagtgagttttccaaaaaaatgtctgtctcccactttgatgattatgatatacttacaaataaatcacagttgaattcatagacccaaattatttatcgtaaagaaatgaacatggcaatatgctttctatgtctttccaattagagtttagatcaatttatctttgtgaagatattgcctggttgaatttttttcaatacattatgacatgttattggagccaactagctggaacacaaggttcctgagactcaacattcattatttatccatttatactaataaacctttatatcccacatgtccccagctcagattgaacagggcctcagaagcacaacctgctttaaatttagacacaacagcaa

SEQ ID NO: 35698 - DNA, 1399 bp, Bovine  19866881492248
  misc_feature (1)..(1): n is a, c, g, or t
nctgctgtatgatatacaagaaagttgttaagagagtcctaagaaagagttctaagggcttcccttgtggctcagctggtaaagaatctgcctgcaatgcaggagacctgggttcgatctctgagttgggaagatcccctggagaagggagaggctacccattccagtattctggcctggagaattccatggactgtatagttcatggggttgcaaagaatcagacacgactgagtgactcatgttcacttttcaagagttctaataacaaggaaaacatattttccttttttgacttttttttttactgaagaagtgcaaatcttttcttttattcataaggagacggatgttagctgaacctactatggtcatcattttacaatatatgtaaatcaaaccatcagagtgtctgcttttaacttatacagtgatacatgttaattatttctcaataaaactgggagtggggagacatttttccctctctgcataatttccatttcagctgctgcaagtgatgatccagaacttctggaggatccgaagaggtaaccaagagaacagtatatttaattaaagcaatgggtggaagggaaatggaagaatgcttacctgccaggcatacctcacacatcctcacagactcagaaaattccattctgaagggcactgaagctattactatctagagcagccagccagtgagaaattatgctctgggtttcagctcagccagctttcattactgttgtgaaatagcaccatataattcaacccagctcaagtcttacctcctctctcaagactttcttgactatcccagtccccagtgattactccccaccattgaattcctgtaggattaatgtgataacatatgaaatcacccaggactgaggccagcacattagccactgctcaaaaaccatctcccagccatcttgtagtacttattattggcactggtcctgtggctcccagaaatctccaccgtgtgttatcatttatctttttatgtagtcattttccctctccccaactcatttgtaagcctaggaaggacagggactcagtagtatatttccacttttcccggcatcatgcattcctctgtaataaggtgctcaggaaacacttgtttatgtgataattcccatcccatattctttgcagaatatatctgtgaatatgtgggggaaagtaatactgtaatagtattccatgttaaggtctgttttgccatttagacctccaatcaaagctgtatgaatagatggaaaaaattgatttttaaaacagcaggagtgggacaaacttgtgcttaggagagggcaaaatgtacataaggaaagtttaacactaacttagtagatccaacccttcccaaactccatca

SEQ ID NO: 35699 - DNA, 1441 bp, Bovine  19866881651419
  misc_feature (1)..(1): n is a, c, g, or t
ngaaatgaacttgggcgaactccaggagatgttgagggacagggagggctggcgtgttgcagtccatggggtcgcaaagagtcggacacaacttagagattgagcaacaacaacatattatatatataacattaatataataataaaattatatatattaatatgactggagaaggaaatggcaacacactccagtactcttacctggaaaatcccatggacagaggagcctggtgggctgcagtccatggggtccctaagagtcagacacgactgagcaacttcactttcacttttcactttcacacactggagaaggaaatggcaacccactccagtgttcttgcctggagaatcccagggacaggggagcctggtgggctgccatctacagggtcgcacagagtcagacacgaatgaagcaacttagcagcagcagcagcatattaatatgataataataagggctcacttacattttctaaacaaaaagatgcatgatagattcagagttttgtcttccttttgcatccacatatgatgtttatgtagagtggtagactgaagaataatctgatttacatggatttatcaaactttggtaatgcttagttcttaacagaatcctacttggacaatattttaaattttctttaatgagtggtaaagaaaatggattcataatgaatgcagggcagactcaatccacaagagtcttttgatccttgactttccattgggaagcatgaattggaaaatctggaagactcatgttttagctatgttttataaaagatacttattgttttcctctgagttccttcatccaaccatagttctggtatcattcattatttcctcttttaacgggagggcagggggagttgcccaatcacttttatttaattctgatcggggagactactgcattaaccacaagggcatagaggtgattatgtgacctagatctgctttatcatagcaccccatcccctgggttagggttagggttagggttatagtgattggcccagggatgggtttgagacccaaaccaagtcaatgagaatttttgcatggagttttctacatggaaacactttttatcccgtcttaggttgctagctgaacaggtaccagcctggagttatctaactgtgctttccccagcactcgcttggcccaacctcattcatggagaaaatgtactgtaaggagggagtgagggcaacacctgatgagaagaagaggtgggaggggagagagagacagagaaggagagagagatagagacacagacagagtacaaacacgagagcgagctaatgaaaatgtgtaaacgtccacattccaccattccttgaagccagaccctcttctgcgctccccttgttttgtatgctcatcacatttcatttgtctttaagttagttttctgtcc

SEQ ID NO: 35700 - DNA, 601 bp, Bovine  19866881786451
  misc_feature (1)..(1): n is a, c, g, or t
ncgccaacacacaccccgctgctcagcactaaatgttaagatcctttgattctgtgataatcttcatcctgtgatctaatgtattttgcctatagcctggttttggattaaaacaagcaactcatcttttgtattttttaagtctgagaatttaagctcagcccccacttttgattttatagagaaaagagacaaacacaggttagcaactcctcacaggttacatgaggtttcagggagaagagagcagggtaagaccgcccacgcgctcagttttcccgcttcttggggaggcctggtataagaaactaattttagaccccttttactagtcattgttctcccattaagtggcttcaaaaaaatactcttacataggcttgattcagacatttataaggtgttggtacattttttttaaagaatacaattggagaaatgaatttggcttgcctattaatactaatattagactcttggcatactaattgtataaactcccttatgtatctgcacggccatttggatgcctacctgcccaccatactcacatttctctatcgatcaagagggaaaaataaaatcttaaaaatttaccaat

SEQ ID NO: 35701 - DNA, 774 bp, Bovine  19866881858727
  misc_feature (1)..(1): n is a, c, g, or t
nacatgtaaaccttccccagtgcgctgtcactgagatttggggtcagtttgttactaagcattacttggcctaataaaaataccttctgcagagaaataatgcttcctgcctggattttttcaacacagtgtgctgtgctgggctgtgcctagctattcagtcatgtccagctgtttgtgaccctatggactgtagcccaccaggctcttctgtccatggtgatttaccaggcaagaatactagagtgggttgccatgccctcctccaggggatctttccaacccagggatcgaacccaggtcagacccaggtcagattctttaccgtctgagccaccaggaaagcccaagaatgctagagtgggtagctgatccctcctctaggggatcttcccaacctaggaattgaacccaagtctcctgcattgcaggcagattctttaccagctcagctgccagggaagctctttcaatgtactatctgaatttaatgtggatatttaccatagaagcaggttgcatgtccttttgtatggaaaaaggagggaaacatgacacctgaacttacaaataatgtcattgccaaaaaaagctgcctacatctacatggcttatcatgataatgaaattaataaaaaaatcttaaaaataaattaataaaaaaagcttaaaataaggaatacaaagaatataacatattttctgtctgatttttcttcctttctaaatatactacacagatgtaaaggcacctggatgtgctagactcaaaat

SEQ ID NO: 35702 - DNA, 641 bp, Bovine  19866881932295
  misc_feature (1)..(1): n is a, c, g, or t
ntttacgattgactggtttgatctccttgaagtccaggggctctcaagaatcttcttcaataccactgttcaaaagcaacagttcttcaaggcttagccttctaaggaaggagccttgcaggtatcctttgtctacagatgaggagaaaaggctcagagagatgacgtgagctggattgagactcaaacttaatccctcacttatttctttcacaaccacagaataaaaacccatgggtgaaataaaaacagaacagtccagtgattaaacctatgtcgccaactttgaagtaaagtatcatggcaccatccaggctttttagtaagcagtgctctgtgtacatatctatgaataactttacatttctcattaatggtatatgttttcataacgatcaagcctcactggcacccctctcttggcatttgcatgttaacattaattctcaataagaaattctttcctagtaagtgttatataatgatgaaataaaggctgcagcttaaattcagccctcacatcattctttttcttctttgctgatctcccactttggtcaaaactggatatacccatccaggtctcctgagtcaagatgtcaccgcgctgtgtaattaaattctaaaataaatagcaagac

SEQ ID NO: 35703 - DNA, 862 bp, Bovine  19866881978723
  misc_feature (1)..(1): n is a, c, g, or t
nctttattcctgaccatgaccctggggaggagattatcaccttccccagtcagcacaattggctggtactgaggttgttaacttgagaaaatcaccagagatagtattgggcaacttcaaaagtccactgtctttttcaatgagcttgtcatgaaagggcttacacagaatactaataacagctaaagatctaactgcaggtggctgtctaattccaatcaaaataatttccccccagtcttggtggataaaggagggcagaattaaaaagggaaccaggagtgatttttggcacgggcaccgagtctgttgtggaagaagacaattggtgttggcattgtgcacttgggttctttctcagcaacaaatttccctctcccctccatggcctggaaggtccggacacaaatgcttgtgtcagttgtccacagctgcacacaccatggggcgcttgttcagctcatgggatggcagggttagggtagattgttgggttttgaaaaatcagaattattaaaaaccaatatgttgcctcttctagaagttttcacgtgctgcgctcagttgctcagtcatgtccgactctttgtgaccccatgggctatagcccattaggcacctctgtccatggggattctccaggcaagaatattggagtgggttgccatgcggtcctccaggggttcttcccaacccagggattgaacccaggtctcccccattgcaggcagattttctaccatctgagccaccaggggagcccaagaatactggagtcggtagcctatcccttatccagaggatcttcctgacccaggaattgaaccgagtctcctgcactgcaggcggaccctttaccagt

SEQ ID NO: 35704 - DNA, 1024 bp, Bovine  19866880271543
  misc_feature (1)..(1): n is a, c, g, or t
ntgatgggaccagatgccatgatcttagtttctgaatgttgagctttaagccaactttttcactctcctctttcactttcatcaagaggctctttagttcttcttcactttctgccataaaggtggtgtcatctgcatatctgaggtgattgatatttctcccggcaatcttgattccagtttgtgcttcctccagagcagcttttctcatgatgtactctgcatataagttaaataagcagggtgacaatatacagccttgacgtactccttttcctgtttggaaccagtctgttgttccatgtccagttctaactgttgcttcctgacctgcataaaggtttctcaagaggcaggtcaggtggtctggtattcccatctctttcagaactggcacacctggctttcccgtgcttcactttactctgccttcctctcagatgaaccgagtgtgggtggggcctgcctgcctcactcaacacacgcaccaggcataccaatcggagctcagggctggcccagtgaaagcagtgagactgctcagtgggcgggcagcctccgcccccagtccatgtgactggccccgcaggatgagaaggtgtcccccatactcacagctcgcgccaccagcgtcatcagcattccggtgagaaaggtcaggtaatagcccgggtacaccccgtgccagatggcagagaggaagaaggtctgggtggtgggactcaaggaggcacgttcataacacaccctggaaaccacgacacacgtgagttgtaagaagcctgtcacccccacaaccatcattctttcagtcccagtcaggatttaggaaaacaaccacaccttagcttggccattagcctcagggaggttatggctcctatgaggtttataaaaagattttttacttctgtcttcttactggtatcaccaaaatggtcatttctagtgtgtggggagtctgtactatgtacagaaaaactttaataaatataaaagttattcttatcttacattattttat

SEQ ID NO: 35705 - DNA, 1213 bp, Bovine  19866880462265
  misc_feature (1)..(1): n is a, c, g, or t
ntaaacatgctggggaaaccattacaggcctatactcccttatctagaactttaaaattctgaatatctctgaaaaatttaaagttcaaaagcaacatttttagtagtaaaattgacctaaaataaattgacatgactatttacagtcttgcttcatcggaatatttatgttttcctgcaaactataaatatacttgcttatggagtatggccccagacctcactgggcatgacttagaaaatctagtgtatgtgctgtattaactctctaaactctgacaaatttcgtacacatctcacctcaggggttggtttcagataagaggttgcaggattgtattattaaggaaagaaacatggtgttgcagacttatcatttctaaagaagaggaaagaaactcttctctcaaaaatgaaattttcagcagccctttgagattggccaacagcccattttccaaaggaattttctaaccctagtagttctcaagaacctgagatttttcactctgaaatcaaggtttaaaatacattcttatctctgaaatttgcttgagggttggctgacttaacacaagacttagccagttcacttgctgtaaatgattaatttgtaaatgatttttcttggaaaggaaagatctatgtcttaaaagaactatggtaaacagtgtaattaaatagtaaaacaaaaagaaatgctcccccaccaccctgccctgagatgtgaacatgtaagcttaagcagaagtttcatttccatgcttaacaatattctccctcagtgtttctgaagggacccattatccacaaagtgagagaaatttgaatacacttaccacagtgatcccaccttagcacttgaaggggaaaaatcagcatgcagaaactattttacaaatgaaaacttaggttctgatgtcagctttgcttctctgtgactttgaataagttataataattaacctccctggactcagcccatttgtaaaatgaaggaagctggacgagctaatttcaaaggctacttcctgagcaggcatctcatgattccatcatccgtattctgtgttagtttaggcaccagagggaactgctacaagggccacattgctactggggaaatttaatcagtggtcctattcgcttgagaacaggcctgttttagatgacattgggggctaatttttgagaatgttgtcattttgttaag

SEQ ID NO: 35706 - DNA, 852 bp, Bovine  19866880582980
  misc_feature (1)..(1): n is a, c, g, or t
natgttgttagcattcatagtattgatagaaagtttccttataaagcattgtgataaatagtaccagttatggacttcctttgtagcttagatggtaaagaatctacctgcaatgcagagacctgggttcaatccctgggtgggggagataccctggagaagggaaccggctacccactccagtattctgacctggagaatcccatggacagaggagcctttcggggtacagtctgtggggtcacaaagaatcagacacaactaagcgactaacacacacacacagtatcagtgacactgagatggtctgacacaaatatagaaacacaaattccagcggaaggaaacctaggttgcatgcaagtggatgtgttttgtgaccttgctgagcagtcctgacctggttatgggtcagggcacttgccagttgccctgccttgcctcaggcaccctgaacgaaggccctcttttactcagcaggccagcgtgcaaaacgctggtgcagctcactttatgaaacctgcacattttaggaaagttgcacttaaaacgattgagcttctacaaagtaaaagttcgtatagatgtttactagcagtgatgtttagtcctttaagtggaaaaaaaaaaaagacagggctggtgagaaatccatcagctcttttgtgtcacggccagagaataagtaatggccttgtccccacggcgatggctgcccagaagagtattacgaagcattaaagagtatcaagggagtgattctaattcaagactcatagtgccttaaagctgtcacgatgagaaaatgaaaacttacatctctatgtgctgacaaagaggctttgagagagt

SEQ ID NO: 35707 - DNA, 1853 bp, Bovine  19866880612237
  misc_feature (1)..(1): n is a, c, g, or t
nctgaaccttctgagtttgacactctaacctctctggtcctacatccctttgcactttactatctcccatcccaccctccttaacaacctaatttattcactagctaaggactacagtctttcacattcccactttcctgaactttctcttcccattattctactattcttgcctgaattactcagcctttctttatccaaactcgaccgatttttcaaactagttcaaattctaccttccctcaaaagttctccttaatgccctctttcaccacctccagactcttatatttgaatcttcactaggcaatcaaccatacactgctgctgctgccattgccttctccacaaccatacactatctgatatcaaaagtgggcatcactttttatgttcagataaaaacgtaagtttaagtataaactaaatgaactaaaaccttccgaattaaaatacatgtttcgtacaggcaagagatccatgttaaaagactctcatggcatttggcataatgtttattagtttgattcaaaaatggatttgtatacaaggaaaaaactgagcagaaatacagactgtccaacagcaaaatgggttgtaaagaacagatttttcttttttaatctaaagcttctgacatactgaataaatttacaacttcaggagtgcttttacctaaaatgaataacctttatagctctgtgagctgtgactgccttaaacaaagtccataggcgctaccaaggggtcctgagaaaggcaagcaaatgggggaaaggagatgaaagactaaaacaaaacacaggaatagaagaacaatacacggatgaagaagacaaacagagggagaacactaaagaaaacaagtcacacacactcaaagtgctgccatttctcagtattataaactactaatttcaggattgaatatatttagacattaataagggaggtgtacttgaaaaacatgagcttctttatggttcaattctatctaacttgacattaatacagaaatttcaaaataatggcagtgaaacttagtaatacaggcatccattaaatatattagtgtttataagtttaacttcataggaaaactcaaagaatgacattatgatcaaccaacatatacgaccaattacagtcatagataacagtctgtaatcacacacacctgtcctctaatgtcgatatcagcatatttttggagaagtgctcgaacaatttccacatgaccacctctgacagcaccaattaagacagtatctccactctaaaaagacaaaaaaaaaaaccaaccatagataattgatgaggaaaacaaaatatactgtttttaagttaagattaatcatatattaatacaataaaatgtttttggaaatgtcttgggaaaaaaagtatctcagatactttctgtaaacaacaaagtttttaggtaactagtattaatacctgatattaatagcctgtagaataagggagagaagactatacatcaaaatgaggacatttatatctgaaattccaggacaaaactttagaaaggtaagtcacccacaacaataagccattctattttgaaggcaccctctcattacaaatgtaaattaaataaaatgacgccatgactgtcaatgaaccagatgaatctttggaaattacataacacaaatcccttggaatcatgctatctgacaaaagccactgactctaaaggaagctgcaaagctagagccatctgtgggtttataaccacatttaattaagggagaagggtggttcccagaacagaatctatattctacttggcattacaggccaagagtgcccaggactgactcattcct

SEQ ID NO: 35708 - DNA, 1292 bp, Bovine  19866880617949
  misc_feature (1)..(1): n is a, c, g, or t
ncaagaggtagtctttcttttcctttccactttgtataatcattaggcacacaaaactactgtaatcacatctccctctgcacaaagtggaacaaagtcaagtaatgctatttcttaaaaataataatgataataataaaaaacaggagaaagaacaatttactgtatgatagatagtcctaagtttttagagtttacttttcttcattgtacatctcaatcttgttttattttgaaaattaattcagagggcaaactccactcagcttgttcatattagaataagcagctgtgaaagcaagatttgttttaaaagctgtgagtatagttcagacaaaatcaacattacttcatttgttcaaagaagattaaaaaaaaaagacaagttaaaaggaacgttaagatcagagaggaaggcagtctgggaaatgtaaatgagcaaatattctcatttcttttttgtcttttaagaaacaattatgaacttttgtgactttatagaaagaaaaacttaatgtaagattaaactgcaattactattattccaactttatttagaagctcttcatgtacatttataaaccttacattgtaataagtaaggtacacccctaacatgttctattttgggctttttcacttttggttttatataaacatgtccatgtactgatgttagcacacttgtcatcccaacatcctatcctgttgacataacccctacatacttggtaattggagagtgagtgagagggtgttcataccattacaaggcctttctccaaccgcaaattgacttcgtatgtgtagaagaacagccaagtggagcagtataaacaaagaggaaggaaagtcattatgtgaagaattttattatggttgttattttcaggaataagttctcagtaacttctctttgtgaggttttctttaaaaaaaaaaacaaacaaccaacagaggcaaggtaataattcatttcaacatgttggaggaataggcttaagagacttgtgtgccagttactaagttattgtctattaggtgaaaatcaccctttcacactctgtgatgttggagctgagactctgaaaaccacatttccattttgccagcagctccatgtctggctctgtcctcaggggcattaggggaagtcttcaacactggaaggaagaaggaatttgtctcttcctagttgtttcctggtgacttcctgtttacttcctgtgtggcttttgtctaccgtgtgtgacttcctgtcttcttcctggagactccctgtctacttcctg

SEQ ID NO: 35709 - DNA, 1671 bp, Bovine  19866880743064
  misc_feature (1)..(1): n is a, c, g, or t
nccctgggaacaggggagacgggcgtgtccacggtgatgttggtgccaagctcaccgagggaagagggcgtgggcccctaagtgctcccagtgttttatggggcagccctggagggtggcacacagagggacccgcagagaagagaagaagcatcgagggcaacctgcttggaaatggtctctggttcactaccggagggagctccagagaaaagggagcgaggctgaggaattgactctgtaagtttactctaaatattcgtctgtggctagtggctgccatcctggacagcacgggtctgaaaaggacaagtgtgtgcgtcctcccgggaagatgtcctttcccacgctgcacacagccctggaccagccatggactcagaggagagctgcttccgtgaataaataagaactgtggctattaatacaacagtttaggggatcaaaagagaggccttaaaagtggttgtagacagttgtttattttcctctgaaatatctgagacacatccccacagccttgtttatgtgataaatttactctgtgaaatttgctttataaactaaaggtcagctgtggttgggctcctcagaattaatgagctttggccagacgtaggctgttgcagggtgcctgcttagggctcaattgtctattagatttttgcttgtttatagtttttacatgcaaattctggttgtaattacagctttttttttttctcttttcctgagctcgtgtagattttagagagggcagggtgtgggtgagggtgtgatctggttagaaatctcagcccagttggtacaagcttttggttccttgaaactctcaaatttttattatttttgttctaagattcctgtgctgtttttatatataaatgacagaggctttttgcagcactcaagtctttatcacttgaacttctaagttcaaccttaattatctgtaaatatgcaccataatgaggggtgtgtttttgagtggggcagtaattgcatttccctcttgtaattttaattaaaaattacctctaccgcctacctcacctttacttccaggctcttcctaacagactggaaaagcagctgttactgcttatctgctcttttctgagttcaggaaacagcatggccctttaatgacaaggcgagaattccatggggcggcatatttttacaagactttgatcagagagggtgtgtcccacagtataacctgggaggagaatgtcagagtttaaccttgtgataaagcctgtttcccctgctgtcagccttccacactgaagttcccgtttttctcagtgtgatcgagccaaagccttcgtggacagattactctcttggaggaccagcggctggagagttgaagcctggttgagagaagatctcagtggccactcgcagacctttccagcgtgtctgctgccctgcctcgaccttcccactgtggggcccggccagtccgccacctttggttgggctttccctgaatccactcccctgcctgcccagatccatgttcttactgggtccgcatgaccttctcctcccctctgccctctgccaagaagacttcagtggctgctccttgtctgtccttagaagagaacattaaagaacagtaagattagttttatttatattttacttaacctagtatgt

SEQ ID NO: 35710 - DNA, 1218 bp, Bovine  19866880827484
  misc_feature (1)..(1): n is a, c, g, or t
nctttgtctcttgtaatgttttttggcttgaagtttatttttgttggatataagtatggctacatttgctttattgggctctcatttacttggagtatcatctttcatcccttctcttttgagcttacatttgtctttagaactaagtgttctggaggctgcatttagttgggtcttgttttcaaacttatcagctactttctgtcttttaattcatggattcaatttccaggatgattattgataaatgaggacttagtactgccattttaccttttattttctagttgctctatatgtccattgtttctttttttgtttgaatttttgtttgccattttagtttcatggttttctattttgtttttctcagtttcctctttttcactgttaaataaggcatcggagaaggcaatggcaccccactccagtattcttgcctggaaaatcccatgggcggaggagcctggtaggctgcagtccatggggtcactaagagtcggacacaactgagcaacttcactttcacttttcactttcctgcatcggagaagacaatggcaccccactccagtgttcttgcctggagaatcccagggacgggggagcctggtgggctgccgtctatggggtcgcacagagtcggacacgactgaagcaacttagcagcaaataagacacaatagaaaaacagatggttgatattttgtacattgcattttcttcagaaaatctagagcaaaggatcgtttatatgtccataatagttcaacaccacagattgaaaacagaactactgagaaaacagctgaacttgcacttgaagtcaacttccccttgactgcaaaattcaaggtttctcagatgtcagtacagtgttgaaagcagtggataaaactttacagattgcttgtgcttgttcgaggctattgtactagtaaacccacaggctgtattcttcatcattcacatctgtagtcttcaaagccaataagctttttcctgcacccagatcgtcaccataacataccatttggatgattaaatacagagcacacccatgtaaaacatcatactgatctgatgtggatacttctataccaaacttggtaacctgcatagtaaattcttcctccaaagggacgaaaggcaattttttatcttcctgagtgacttctttataatttatcagttctagtagcccctcaagactttacc

SEQ ID NO: 35711 - DNA, 559 bp, Bovine  19866880855790
  misc_feature (1)..(1): n is a, c, g, or t
nctggggtttagttttctttggatagagaacaaagaaagtaaaacgaatggtctgaagcccttccttggggagaaacactcacatccccagatgctgaaaataagcaggctctgagacccccggcagccgcctcagtccgccgagagctgttcttgcctttggctgcccgtccctgcccccaggtccagccgcaccccaccagctcgcctggctctgtggccgcctcttcctgcccgtccctgcccccaggtccagccgcaccccaccagctcgcctggctctgtggccgcctcttcctgccgagttgctggctcctctgaaaccttacctttccctccgccctgacctggccggtcccgcggttttgtccaagctatgctctccactccccagctaccccccccaccccaccccccgcttcctgggtgagagagtgccgtctgggggtggagtggttcaaaggcagaagaaggggtgaggccctctgcccccctgcggtcctcctctctggtcccagctggggttcagtttgctttccgtcgtggtggaagccatcgt

SEQ ID NO: 35712 - DNA, 1827 bp, Bovine  19866880905746
  misc_feature (1)..(1): n is a, c, g, or t
nccaggtgctccagtcaaaggtggcagcccaaggcggggggcagggttgtggtccttgttgttacctagcggtactgacaggtgaggctggaggaatagaggccctgctgagcacagtcttacaggcttgagtgaggggctgggaaggtaggaagatgtacagaccactcctcccggggagcaggtccagagggcctgagactccccaaagtggggtaggggaggggctgaaggaggtgagggcacaggggggctgtgccagtagtggggcatccaggctgtgcccagtgactggccactgctgttcattcacgtgctctgcaggagtgtcttgggatgattccacgatggcccctgtaagtgttattaatgcactggagaaaacagcgagaagtccatttataatgccttacgggtgttccccacagtaaaccccttctgtagaatgatgttactccgttagaaagcagtgtttagggaagagaccgcacctgactgtcactgtcacgcgtgtactctcagcccagtaaaatgtggcttacctttacagcttcattattttgtccgccgaagaaaaaagttcctttgtttttcagatgtcaacaagtttcaagatgtttctcgataattggaatattcagacagctctctggctcaaaaggtaagctccttccagaaccgtcttcagctatgctttggcctctgggtcttgagactgagcttcactgggtttacattcttgattagagtaaattaaatgaatgctgtgactttgtgttaaccaggaaacacacttactgtcctccaaagcagggtggtaccaagcctgagaactgtttagccttgagtcctaaatgcagctaccacagacctctccatttgcctttaaaggtgcccaccaaggtctgaaatcgccagtacgtccctcattcatgggagatttgaccaaacaaaagtggctacataaccaccatacgtatgcattagattttccacaatagttaaaatattccagtagaatagacctttatatgttgggtgcaggatatgaagactgaacctctgcagttggaattcaaggtcttgtagagtagtctccacatgctgatccttgtagtaaggatgatgatgagagggcaggaggcgtgcaggcacggggggcgggggaagaagaggcactggagttaagaatcataaagaggaggttgtcacgggcacagggggaagacagaggactgattacaggaggcaaatttaggacagtgcacagaaactcccaggggtcctgtctccttgttcccgatgggatactgccaggttttgagtttatttcataaaacactgctcttgtgatagggggactctaagcaccattctctgtaatgccctttgtttatttatttttttaaatttagatttattttaattagaggctaattactttacaatattgtattggttttgccatacatcaacatgaatccaccatgggtgtagatgggttcccaatcctgaacccccctcccacctccctccgcatatcatccctctgggtcatcccagtaatgccctttatttatgacaaataatgacctttacttcttgaaacacccaaaatatattctcgtcacttcatggtgccttgaagtctccccagtggctgcacattttctgagctaattgttatgttatttttgttggtatattttaaatttcataccttaagaaaatctcattttcatgtaagttctccacctatgacaggaagacttttaagcacagcctgcttcccagtagagtacagttagatcaattgaaagtcctaaa

SEQ ID NO: 35713 - DNA, 848 bp, Bovine  19866880915299
  misc_feature (1)..(1): n is a, c, g, or t
ngggtgccctttgcaggacagaaaaataaaggtggctcaggccttgctggtgctgatctcccagtggggagaccacgtccctgcaaggggcctgttacagggaccagtcagggccagactagctggaaaaccggactgcacacaggcttccctgctccgccagccgagcccatagctgttcatagttttctgtcgctttccctcccacatctcaagcaccagcaggacaagtgagaaagccacgggtcaccactgttaggggtgaatggtggtgccaaggcggccagtcaagggagcccgaggtggcacggagctgtcctgccatttcaggaaggcctgaggggtatctgcccggacgggccagcaagaccacgatgctgtccttggaccgccagccccagacaggcctccgcaggtcgtacccctttcactcctttcaggtcccccttcagcaaactgtccagagggaaggagattatgttgttcatgttctgaatctaaaagacaaaaaaaacaacagaaaaatattcttatttcctttttaatctaaagcaaggacagtaaggaggttaagagaacacgtggtaataaactttccctaaaaccccatcatccttaacattctctgtaacgatgtcatctcatgaatgaaaacctaacagtgaaacgtctatatctgtttatgtttcacaaaatattaacctattactgggctatgaagtctgtggaaagataaccattacaatgaaggaaaaaatcaacaacagaagcactttaaagatccaggaatgggaacccaccaacatttcctcctctcacagctccatccacggcctggggctgtggct

SEQ ID NO: 35714 - DNA, 1360 bp, Bovine  19866881075467
  misc_feature (1)..(1): n is a, c, g, or t
natatggtagttctattttcagtttttgagtacccacatgttgtttcccacagggggtgcaccaatgtacattcccaccaacagtgcaggaaagttcccttttctccacagcctcaccagcatttgctatctgtggtctttttgatggtggcctctctaacaggtgtgaagtgataacactgtggttttgacttgcatttctctgatgattagcaatgttgaacgtcttttcatgtgcctgttggccaactccatgttatctttgggaaaacgtctattcaggtcttcagctcattttttaattgggttgtttggtttttcaaaatactgagttgtatgagctgtctatatattctggatattcatcccttgtcggtcatgtcatttacaagtattttcccccacttagtaggttatcttttcattttgtcagtagtttcctttgctgtgcaaaagcttttaaatttaattaggtctcatttgtttatttttgcattttttttctttatcttcagagacagatccaaaaagagactgacaatttatgtcaaagagtggtctacctatgcttatttctaggagttttatggtttccagtcttacattgaggtctttaacctattgtcatttctggtcagcaaaataacaccaataatataaacagtgcatgtcattcatatttattgtttataaacgaaaattaactttcaaatatacatatatatagataagcattctacatttcacttgaaattatcttatgttacttttatattaatattctgtctgttaatatataaatagttgcttgttatgacagtaaaatgctattacaattgatgagtataaaaactattaacaggaaagcaaatgagttaacgtgagtgttgagaaaggttcatttatatgacaactttaagaacattatatccactgaggaaaattttataaatgttttaaaagtcaggaaaagattattttataattctcttacttgtaaaattgtttagtgtactatcataaaataaaaaaaacctttaagaaccatataggatttttacttatttagttccttttaagtcatgaaaaaatgacctttttaatgaaaaagctctatttgggaactctacactaatgaattaaaagcagaataattagctctgtcatctcaatttcacaaggagaaagaactctaaactcacataccatgatatccataatgaatcatacatacataataaaaatatgtaagaaatacggacaaaacaaaagtgttaaagtgaactggggttcccaaaacatatttccttctcactgatcaaacctgagaccaatggtcttcgtaagaatgctctaagag

SEQ ID NO: 35715 - DNA, 863 bp, Bovine  19866881223622
  misc_feature (1)..(1): n is a, c, g, or t
nactgtgccaagaactctgtgaatgagaattaaatatgtatttttagaatttaatgaatgaaactgtttaagcacctaaaacaaaccgcaagaggaagtgctcagtagatttaactgatttagttatggcttgaccaggtaatcttgaaaactgccagtttatatcatcagcttctgtagtttgatagatacccagagtgtagttacagtctcttgcccttataattttggcttatttctctgaataagcttgactgtaatggcaaatgtggattgtaaattaactgtaataaaagtgacattgaccatatgtgcttagtgagaggttagtatttctagggtttggattcttttggagtaagtttagatttacaggaaaactgccaagacagcacagttcccaaatccctctgcatttccatgaatgccctcatgtaacatgaccgtggtacagatcacacatgccagaactaggtctgattctggatttccccagctttcatctatccaggctactatgacatttagttgccatgtctccttagtctcctcctatgaggcttctttccttggttttgttcacatattctaggttaggctgagtttttgaataccaccagaggtgaagtgccctccttcacatgtcagggggtacatgacatcactggctgatacaaacctcgatcacttggttattagggtagcatctgccaaggttctctgctctagagttactgtttcctgttttccacactctagaagacagtcattaaatccagaccacgttcaaaaagcaaagggaggattcagctccacttcctggaagggggagcatctacatgtactatttggaattctgtaaa

SEQ ID NO: 35716 - DNA, 877 bp, Bovine  19866881410686
  misc_feature (1)..(1): n is a, c, g, or t
naccacctatcatcagcaaagaagctggtattttatctcctaccagatctagtttttttcaaatgggttccaaattcctaaagcagaaagcagctttatttattggtctgctaaaattcaaatatgctgcagctattttcaagtgagactcctttattgtatcataatgggataatcatcaacatattcatgaaatgaaaaagcaaggtgcaaaagagtacaacgtaccagacacagacaaacacatgctatacatgcataaaatatctctggggagatgtggatgaaactagtgacatggatgtctcttgggaaaggaactggtttgacaacaggtggctgaggagacttacttttcactggcttttgtaccatgtgtatatattacctattcaaataaaaactttaaaaaggaaatgcaaaagagtaaaagaaaatggaaaagggaaaaataattcttagttttatacaagtactataaaagtgtaacatttattaaaagtatgatacatgacttcaaaagcttttttctttttgttctctatattctacactacagaacctgtaatatggctactttagtacaaacaacctgataaaagagataatttccttaatttacatgtcaaaatatctgtccaaagtaataaccaatttcagaatacttgttaataacaagtcgtatcaatttggaacaatttttattacgtgatataattaggatgacattaatacatcagtgatggacatcattaacagataggaactcagaagattcttaggaaaagagatctaatggttctatatgtataaatgccttgaaaacatacacatagcattgttgaatgaattttctaaggcttcaacaatgtgttag

SEQ ID NO: 35717 - DNA, 739 bp, Bovine  19866881428688
  misc_feature (1)..(1): n is a, c, g, or t
ncactcctacccacagctcatcacaacgtctgatttttcactctccatttcccaccctaccaccaactgttcagccaatattttcacctgtcctctcagtctcattcctatttctactacccagaattaaccatatcatttcacttcaactaatccaataatctaactgatctaccaggttttaggttttcttctttctctaacccattttataccctgctgtaagattaataagcataaattccattctgggtatgttaatcgactgttcaaaaaatcctaatggcctgttaaagaataaacttaaagcctagcgcacatggtccatcaagattatactccaaacctagagcctttgactaacgtaagtgataagtaagggctgatgtcctcggccatcacagcagtgggtgaagctgggggagagatccaatttccccagtgtgccatacagtatggctcttcctgtatgccacaacacaaagaagctgggaagcactgtctcgggtgactgacatccaagacatatccattatcaccgctcctgcactagcaggttcaggttcacttcagttcagttcggtcgctcagtcgtgtctgactctttgcgaccccatgaatcgcagcacgccaggcctccctgtccatcaccaactcccggagttcactcagactcacgtccattgagtcagtgatgccacccagccatctcatcctctgttgtccccttctcctcctg

SEQ ID NO: 35718 - DNA, 807 bp, Bovine  19866881601079
  misc_feature (1)..(1): n is a, c, g, or t
ntcgcgtccctgcccgaagctattggaagcggcggcggctgggcgcagggggcacaatgccgtgggtggggcgtggacgtgagggcagcgcgctggcgtcacaggggcggctatataagtgaatacaggcgccgcccctccgccccagtcactgagccgccgccgaggactcagcagcctcccccttgagccccctcgcttcccgacgctccgtcccccctgcccgccttctcccgccgccgccttccgcaggccgtttccaccgaggaaaaggaatcttatcgtatgtccgctatccagaacctccactctttcggtaagtcccagacagtcccgaggggaggaaggccccggtggggcgctccggtctcaaacagggccaagaaagctgctaaacgttgtaggtcttcgtaaacttgggcggaggggaactgtcttggcccgcgggctgtagggccacggcctgggccttagagttggcccctgagcgcgaccggaaggagcgggcgggaggtcagcccttgggcgggcttcgcgtctcgggtggcgcatttactaatggctcccgggcctcttcgggccacacccgcccctcctgccacccctgcgtcacgtccggtacgtcaccgccgttgtcacggtgtcgggagggagaggcggtgccagcctaagtgacacccgcgcgcgccaatggggcgagaagtgtggccccgccttagagctcgggttccggccggttgcatcagctgggtggggcgccgccggcctgcccggctcccccgacacggatcggcttcccagggcggg

SEQ ID NO: 35719 - DNA, 763 bp, Bovine  19866881621164
  misc_feature (1)..(1): n is a, c, g, or t
nacctatttcctttcctgcaactgaagacactcctaaaaacagggattatatatatttattactttgcttttagataaaataaaaattacagtcatgatccaaatgatcaagagcatgccattatgtctatgaagacttattttcaaaaaagattcaaatataaatcattaacataaaaaagggaaagtaatttaaagttctgcttcaatattaacaagtagtgcactagcttttaaagttttgctaggcaggctggggacaatgctcctctaagccaacttacaaactagcaaaaaatcaatattctcacctaaataggaaaaccacctggagactttagaagacagacacagatacaattttaaataaaacaatgagttctgacattctctacatttttgaaaaggataaaaggcaaagacttactaaaaaatatatacaagacagccaagaagctcaatgacactgcaattccaagatttaggtctactgtaaaagcaaacaataaaccaagccctccacaaaggagcagggtcagaaacaccacaagccatgaaaactgaaacagaggttcaatctgttgtcctgcaaaagttttcatttcatctgaaagagaaattaataagaaaacattatttaagaaataaaacatttgaaaatttcacattttcactataaacatttacctagctagaatgttgctacttaaccatgctaaccaatgttcactttgctaagtatctcattccttaggggcacatt

SEQ ID NO: 35720 - DNA, 799 bp, Bovine  19866881706500
  misc_feature (1)..(1): n is a, c, g, or t
naggctaccgatgccatggaggccttgccccgtagcagcagcttcaggcactccgcactgtcggtcaggcagcagtagtgcagggctgtgctgcccttccccgtctgtttgtccaggttcccgctggcaaggacggacgcagagagagagagagagaggaggacagggaagtctcaggtcagagggctggggtgctgcgcaggggactggggttcgtggctggcagggcctctcgtcctccggagcgccagcccagctggtggcaggaggtggcctggacttaaggccaacagggaataaacagcgatggcagagccggccaaaaaaagggggcgaggcacctgtacacccctgaccaggggctaggagagggacaggtgaactagggtctctcccactgcactgctaaggccccaccagtgtgtcccactgcaccgaaggctgggctgagctcttttcatcctactgacaacactcttaccaggaaggggaaaggccactttttctaaaattcagagtcaccaggctcctctgagctggcttgccctggaccaccctgaaaacaggctccgggggaatgagaggaccacatgggttctgccaacacagaacggactgggcaatcccaggacaagccactcagcccactggtggggcggccgtagtcacactgtgagcgggacagcagggctccgccctggacagacacgtggggacacggagggaccactgggagacgatgccccaggatcccgacaggaggaaaccagccacgttcactgttcctttttccaagcag

SEQ ID NO: 35721 - DNA, 617 bp, Bovine  19866881833210
  misc_feature (1)..(1): n is a, c, g, or t
ntcacagatggctggcattaaggatcatgaatctatcatctgtcattatttcagaaagccggggatatgatttcgctattatgtttgtgccctgagattattctccctgaaagtgctcaggaaaacactttgaggtcgctagaagctgatctgggagcccgtgttcccagctgatcaggatggagtgcctctgggctttggccagggagcattttgatctcagggagcccactgccctttgacctcaaagctggcccagcatcacgtatccccctacgcgggtaggggtgtaagcccccgagtgtcccttgcagggaggggcagctgccccctgggagccgagacccagggacaccctgccaggtgcctgtgtcgtgacttccagagaaagcctgccttctggtcgctgtttctgcagccctgagagaccctgttctcgctgcattttgatgaggaatgatgctgtcgtttcccattcccttccacccagatctgtttttgttttttgtttttgtctttcaacaggctaaccggcctcccgcaaagcttaacctgttaacctgccaagtgaaaaccaaccccgaggagaagaagtgttttgacctaatttcacgtaa

SEQ ID NO: 35722 - DNA, 1432 bp, Bovine  19866881836044
  misc_feature (1)..(1): n is a, c, g, or t
naggactttgcaatgaaaccccccgaatttctcattctttcccggggagggaggaggactaggaccagtctctaaatgataggcagtctctaaattcctaagggcagaatttgccatggggattggctgccatggggattggcttccctggtggctcagctgtaaagaatctgcctgccagcgtaggagactcaggtttgatccctgggttgggaagatcccctggaggagggcatggcaacccattccagtattcttgcctgggaaatcccatggacagaggagcctggcaggctacatacagtccatggggttgcaagacacaacttagcaataggtaacatgttttagagataggtttttcaaagaacagactcagaggcttttagaagagaaatacatgctttcactcacattggccgcagagctgagtgctccccttgggattctggaatgtttctgtttggtcttcaggagccggatgagactgccctccaccttgccgtcaggtccgtggaccggacttctctccacattgtagactttttagttcagaacaggtaggtgtccttaaatcagggccagtgtttgattttgctcctgggtgtttctggggaagggatcaggggttgcctcactgcttctgcggtgtggccaacgtgctggaatttcctcaggtgtgactaggattacgcgacagcgaaacggctgcaggtgtggggtgttcccgtgcagtcttaacccctcctggtgtcaacagcatccagcttccagtgtcgggggctcagggggacgccccgtgaataggtctgctgaattctaagcccctggaaagcagcctctggctgcagcccccttgactgtcaagtgggggagtagtcccccatgacgtcaggcagagcagccaccagcttgtcctgtgaggttggagtcccatgacatcaggcagggcagcccccagcttgtcctgtgaggtgggggtcccatgacatcaggcagggcagcccccagcttgtcctgtgaggtgggggtcccatgacatcaggcagggcagcccccagcttgtcctgtgaggtgggggttcccatgacgtcaggcagggcaccgtgagcaaagggagagggaagcaggaagcagggctccacctccaacgcgggctgaggcagggttgtgggcgttttgcttggtaggaaaagctgttattttcaattagagcatgcctgtggagaggacatgcatgggcagtttccttggccccagcgctcccatcaggttcgtcctgccttgcttggtgcagggctggcctgacggtcggagtctagtcgtgaagcccagtcgaggtgcatcgtgtctccctgagcgtgggtctgggtgggggtcagggcagggaaggccagaagccatagaaactcttcagcaagtgcaaagcgag

SEQ ID NO: 35723 - DNA, 988 bp, Bovine  19866881915901
  misc_feature (1)..(1): n is a, c, g, or t
nttcctgcaagagtctctgattgcaccccctttgacggattggtggagggtctgaccttggtgcagtgaggggggggaaatgggagggcggccggccaggggagaactggggtctcacctgctgtggtctcagggattcacattctcatcctctcaagcccgtcccgcgtcggagtttcttggccctggatcatgaatgagaaccagtgaagatgcagctgagcaaggaggaggtggggagtgagctcttctgagagggacagccttcacagtgctctaaataggagatgagagacccaggttgggctctttccagaaacttgattcccaagccatttattttaggttcctattttaaatttagttttggcaaaagaaaaataaagcagctcaatgactttctctagtaggaacatctcaaactttgggtgatgtggaccagtaggccagacagacaatacatcatgtgtgaagagtttaccgtcctgatggtgggcaccaggcccagctgtttcagggagacgcccgcatgggctgtggtcatttttcaggaagcttttcaagtgtgtttgcaagaagagaaattggtcttaaaaacctcacctcgatcagtgtgtgaagaggttcctgttgacctaagctgggacagttttgcacatcaaaagacagtgattgcagtggatcagaacgcttgaagtataaatacatgaggtgatggtgacagtgatggtccagaacgctcattaatcaccatcggggttgctgggatcagtgcattatttttgaaggttgaaaagggaaagaatttttatgaaaaaaagtgacctataccaggtggtcagttaaaaggcccagaaggaggaatgagaggaagtgcgtctgtccttcctggccttgctggctgtttgtcctctgtgccgggttggttgactacccctggagagaaggcagcatcctttctcccaaggttgtcccaggctgggggcag

SEQ ID NO: 35724 - DNA, 1209 bp, Bovine  19866881938876
  misc_feature (1)..(1): n is a, c, g, or t
ncatttttaaggacttggactgcatttatctcataagagacattcaatcagttctgttacaggcaaaagacccttccagaaccaaggaaggactaaatttcctctgaagaaaaaaaagcctgaagttatttctaccactcactagaatattgagtatgagaatgtaaaacatttcatagatgtgaaatgcatgaaagaaaaatacatgttcaagtgcatcctcatgcaaattcagactgacaaagctagtccaaggacttgcgtccagagacagtcccacggtgtgttaagaagcacgaacaagcaatcagatgttacagagcagctggggaaacactgtacaaacgggattccaagaagggagggagggagggaggcagggagggaggcagggcgggagggagaagaagaaaagaagggcagcaaggaagcaggctcaaaggggctgattttcaatagttattaagtgactccaaaaatttctaacagaattagaaccagtaaggttgctcagtcgtgtctgactctttgcgaccccatggactgtagcctgccaggctcctccatccacgggattctccaggcaagaatactagagtgggttgccatttccttctccaggggatcttcctgttccagggatcgaacccaggttttctgcattacaagcagacactttaccatctgatctaccagggaagcccagaattagaaaatgctttcaatatcggcatataatacaacaaattttattctcatatattcagaaattttacaaaagtcaatttaaaaaaaaggttatttttgtgacttacacatcactataaaagaccactttccaagaagaaaaatgttaaatttacaaaaagaattttaaacgagtttttcatttgaactactaaatggaactatattttgtctttcaaccaacatgttaggattaaataagcagacttctgaatcaaagttttcatcttaccctgaaaaatcagcagaatactgtccataatcaaagatatagactctagtgatttggcatactgtgaggtatcccaaagcaaacacgaaacagtacctggaaaacaaaaacaagctagattagcgaaataaaaagattcattttgttaaagaatacattttaaactaacatattaactatatgagatggttcaaaaattgtaaacatcatgagatctacgccgcaaatgg

SEQ ID NO: 35725 - DNA, 950 bp, Bovine  19866880430163
  misc_feature (1)..(1): n is a, c, g, or t
ntggaggagcctggcaggctgcagtccatggggtcactaagagtcggactcgactgagcaacttcactttgacttttcactttcatgcattggagaaggaaatggcaactcactccagtgttcttgcctggagaatcccagggacggggggagcctggtgggctgccgtctctggggtcgcacagagtcggacacgactgaagtgacttagcagcagcagcagcagggaggcttctggtgggtttaagcagagaagcaagagaactagattggcatccaacttggaccacgtgtggcgcagggtcctaagggccctccttttagccctgctcctctgtgcctctgcactgttacctctacttcctctctaattgttgtctctttccttttaaaacactgaaaaaaataaactgggcactgtttgtttccagaactgcttacagcactaccttcgtaggcaatttgtttttcctggtaaatccaattctccctttctgaattatggtttgggtgtttggttgctgtgacctgtaattcagcactgattttcagctttaaatcttcacagtggggtccagcagggcaggcacagactcttctggccttgtcagtgactggctttccttggaaagaagctgcccatgtgttcaagctgtggccctgttttgggtctttggtgtatccaaagcatacctagcttgtatctccgaggcatgtgaccaccctttctgactcacagatatctctgtccttggttcttccaatggttctccataccagaaatctgaatcagcctccgaaggtataaatcaaagtcttcagtctcctcttacacctgttgtatgcaccccagggcaaacacattgctttgctttgtttccttctactaaagcagtggctccaattattttgataccaggaactggtttcctctgactgcaggtgggggg

SEQ ID NO: 35726 - DNA, 3649 bp, Bovine  19866880517544
  misc_feature (1)..(1): n is a, c, g, or t
ncttttacaactaattcttgagtatagacactatccagagcaatccaaaagagattctacacaatatttagggatggaatcagctccactcctaatctcctctctgaatcatagctctgtatctttctttaagtggtccattgggtcctgactttgcatatacaaaatcgaatccattcatctttcccaaaaacgagctttcctttttgactttcttttcttataagcagtaaaaaaaaaaaaaaaataagtaaatttataacaatagttcacaacctttcctggttcatggcatccttagtattttgttcattttttcacagtgcccctggaccaaaagaaatacttaatagttccattaattaagtagctagatccaaataaatttgtaagtatgtatgtcctaacaatttaattatattttaaaagcaatacatttaaaaatatttaaaagtaatacaaaattttaaataatattttgttttttaaccacatttacttaatagcaggacatatgcacctgttgggaccacacaacttctgcaatcttggaaccaacttggacaccaccatactcacgtcctgctttacaatcattttcatgcagtgcttgcttttaatcacagaaaccaccaaaaatccactttgcaaagatacaacaacaccaaaaggagcttatcattatgatgttgacattgtgacctgcatcaagctagtagtttttgtgatgtccagcagtcttagaatatagttatgtttccctcaaaatggtgaactatcctgcaacagtccctgagaattcactgtggtgtcccaggccacctccctcacagtttagggactgcagggttagaatgacagcttggaacatgctttgatagatgaatgcagtaatgactcccatgagttatgcctccttgtacccctactctcaagccaacatgacttgctttgaccgagacattagtaaatgtgacataggcaaaggcttaaaaaatatatgtactttggggtttctcctctctcgctgctagaaaaccttctgctgccatgtgggtatacccaggctatcctcctgaaggataaaacacttggtgggcagagggtccagtcattccaaccatcccagacatgtgaccattcagctcaagccaagataacccagactgaaagagctgcccactgaccatagaaaatcataaaacttttttcattttaaactactatgtttggggcattttttttaggtgattaaactaaacgatacaatgttaaaataactgtattttatactttagtcaataggaaaatcaacaagagaactttcttaattgaattgaatagagttattaaataaacgaatgcatgatcatttaattatccctttaaaattcttttagaaatatcttatgatttctatagtctcagcaacagatcttgaagtttgataagcatttcattgacaacaagattagaaacttgacttcatttgtttgaaccacagttcctaaaattataatgtaagtgattattaatctataaggaagcctgattgtaaaggaaaactgtgaattttaatttcgttgtcaaaaaggtgactataaattttgttgcaaagtataagaatagccccttcaacaaggtcagaccactgaccactataactaagtggccgaaacccagctgcaaactcagaactaagtgaaaatggccttagagcaacagaaatgtttgccacaagatgctgaaccttgctactaatcagagccattcccaaccaaatgcttttttgacatagcatagtctcaaccacatcacacagatggtcagatggaacggctgtcagcagggaaagtaggccatgaccgtgaaggtacaacatggagctgctctttgggactacctgtttctgtggactcagagaacatcaccattccacagcacaataagacatgttcttcgtaagaatgagactgcatatcaggaaaatattgaaggcttgcggaaataaattgaaagcccttcagtaagatttccattaaaaatgatgaagaaaaatagtatacatttttgaggtagtaaatgctagttatctagaaacttaacttgtgtggaaaattccgtttcccaggagccattgagaatgatgatgatttgggcacctccatgaattagaggtctttatctgcaccagctcaccctgggcttgttagtatctacagttttattttcttgagtagaagaattctcccacccctcaatggccccaagatgtctgaggcactggctcttctcagacttcagcccatcttcccaggaaggagaccaaatggggcagcgggggaacaggatgaatatggtctcatttcggcctacgttcctttctgaccaggtgaggctctgcagaaaatggaaaggaatggagtcagtagccacagatcatgagggggctggttcctgtgtgagcgtccacgtaaggaggtgtccagatggaaagagatgacccaattccagatctcctccttgtggccaagaccctgctcatgccaccaagaaaatcaagacaaaagaagaagggaaagcacacactagccaccatgaacacagaaagcacagtggtgaaaacagcctgaaaaaactgaaaacattaattgctcagttatgtctgactctatgcgaccccatagtctgtagcccaccaggctcgtctgtccatgggattctccaggcaagaatactggggtgggtctctatgccctcctccaggggatcttcctgacccagggattgaacccaggtctcccacattgcaggtggattctttaccatctgagccaccagggaaacccaaaatactggagtgggtagccattcccttctcaagggaatcttccagacccagggaagcctatacagaagcaaacatgtaatgaacctattttatgtcattacagaaactttctaaaatagagatgagaaaagagagaggaaaagagcaaactgtatacatagatataataagtgtgtttatacatgaagtactatattagaatctatgtgtcaatatgggcaacaatggattgttttgaattgctacatcatatccaattttattgacacaccttttaaatccatcccatgttttttaatgtttgaattctattttgttgttattgtgatttcttgcaggcatcaggaagccccaattcaaggctatttgagcaataaagaggagactgacaggtggaaatcaagatatcaaccttagttttgatttaaattgcataaagaacatgggtcaggtatgcaaccctttgagattcctaaagcagaagctggaattaaacagaatttcccaaaaatgcacagacagggctgggaaacctcagccttcccagtggaggaacgccttcccataaaagcgccccctgcaggaagctgatgagagcatatgctctccacaggcagacattccaaagcctcctaaaagtgggattcctagtcaaagctgaaagcatttctgaaactttgcacacatactatccaactgcagagaaaggtggtacagacatactcccaacagcaatgatgaaagtgcttcctcttcacaccttttgttattgtgacaggttcaaatggtatcacgttg

SEQ ID NO: 35727 - DNA, 1714 bp, Bovine  19866880394742
  misc_feature (1)..(1): n is a, c, g, or t
nctcgatctctaactgtttttacaaatgcttgttgctctttatctggatctttttcgtctacataaaccccatgggaagtacaccaaaaggtaccttcttagtatatatcttttgagttcctctccctggatagatattttgatatcattcacctaagctctggcctccaaaagagcgacactactcaagtcgtactcctctagccacaaggtcagataactggagatgggagttgtattgttgggtgtgttgcctctcacataccgagacatctgggaacgactgggactgagacagcccttgggaactactgctggcgctgatgctatctcccagttcaatccttttcacactatgaacatgcaaaacagctaatactagtactacaagaaatatacctggacagcaaacccctaggctgatataaaacacacgtgtagacatggctggagctgcatgtacaggatcataaatgggttcttccgctagtcgttttgtccaaggctgaagttttccttccttaatttctggatggcaacttttcctttgtttcaactctaagatgtgaagctttttgaagttactgtcaagttgaggtgcatttagtgtcgtaacttcagaatctactttgccaggacaggacagctcgagcccaaacactgatacagtgggtgggagttctggggccaaggggcgctggggcggcaggcagcctagcggacccaagcggtactggcggcagcctgccggatccccatcccagggagaccaccctgcacatccatcctgctgtgagtgcctgcctctaccacccaggagaagccaggccacctgatgctgcccacctggcctgagcccttgaaaggtgaatagctcctaccccggccaccctgctggtgttaactgatccatgataaagagcgctggtccttcaagggcctagagcagtagagaagggacctattccttcagcagtagtaagaagggatcagagagcagtagggaagggacctacttcccttcagcagtagtaagaatgttccagagagcagtagggaagggacctacttcccttcagcagtagtaagaatgttccagagagctgtagggaagggacctacttccctaagtagtaagacaggaccagagggcagtgggaagggacctgctggtctttcaagggccgagaggagtatggaagaggcctacttcccttttgaagtagtaaaaagggaccagagagcaatagggaagggacctgctggtccttcaagggccgagagcagcaggaaaggggcctacttccctcagcagtagtaagaaggaaccagagagctataaggaagggaacctgctggtacttcaagggccgagaggtgtagggaagggacctacttccctcagcaggagtaaggagggaccagagagcagtgggaagggacctgctggtccttcaagggccaagagcagcagggaaggggcctacttcccttcagcagtagtaagaaaggaccagagaacagtagggaaattacctacttccctttagccccagtaagaagggaccaaagagtcataagggaggacctgccactccttcttttgccaagaacagtatgtaagggggctactcccctcagcagtagtaaggagggaccagagagcagttcagaagggacctgctatccttcaggctagaacagtagagaaggg

SEQ ID NO: 35728 - DNA, 1350 bp, Bovine  19866880459231
  misc_feature (1)..(1): n is a, c, g, or t
natgcgaagagttgacttattggaaaagactctgatcctgggagggactgggggcaagaggagaaggggacgacagaggatgaaatggctggatggcatcactgactcgatggacgtgagtctgagtgaactccgggagttggtgatggacagggaggcctggcgtgctgcaattcatggggtcgcagagtcggacatgactgagcgactgaactgaactgaaatgaaaataaaaaagtcagaatgtaacaagtgttgacaagaatgtaaagaaaagaactttcaaagactgctggcaggaatgtaaaaccgtgcaggcactttgaaaggcagtctggcagtacttcaaaaagttaaacatagaggtaccatttcacttagcaattccactccactcctagatatagaccaagagaaatgaaaacaaatgtttatgtacaaaattatatgtgaatgttgataatagcattatttttattggaaaaaaattatattttggaagaactcaccaataaagtgacagaattccaaaatcaaattgcatgaaaatatacgttgcaatttctttgtacaataggtgagaaaactctgcagtatcagaagaatagaggcaaagaaatgtgaagggctaaggagaagggatgaggataaatagcatttttaatagcaaacccagaagttaagtagaaagcctgtcgctatgcctgctttattcatccatccttcacattaggtaactgagggcaaaaataaaaccaaatcagagttttgtgttgggagtaaattgcaatcattttaaatctgaattgaatccagaactaactctttttagttcctagggataatgactgaattcaagagctctcaacgacaagaaaatgttattgctgtatccaatctgagagatgggtgcaggtacaatacaaaagggacaaagcacctagtgatgaccgctcctctgaagtcatcattaaaaatcaagtagttgcttattgagtacttcggtatttgaactaaatgatttgaaaacttcctggcagacacaagagataaaagtaaaggggagtgtgtcaaaacaaagaagatacaaaagtttagtaagtggaaagagtttaatgaagcctcaatggtttaaaggaaattaaatggaaacttttaatcctaattgctttttatctgacatgctttaaggagtcttttaaaactgataagaaacaatgaatagggaaagaaaacctgctaaaattttttagaatttacacgattcttattctactacaagaaagcattatttggtacaaggtgtatttgtggatgtacatgaacagtatatatattatccggatcatg

SEQ ID NO: 35729 - DNA, 1862 bp, Bovine  19866880461471
  misc_feature (1)..(1): n is a, c, g, or t
ntaagcccttgctgttactctaccccaaatcctttgtcttatttcagatatctcttctctttttagaagactttttgtctctttttgattgtattgtgcccttctttgtgcccctccaaattcctgtgctaatgttggaccatttaatacatattgtaatcgcctttttacttctgtgagaatcaggagctaatagtcaagtgccaggggatgcactacagactacaagtatgattaataggaatttagcagaagacaagattatttggtaaattgtttagggaaggcctcatggaggaggaatatggtacttgaattggaccttgaagggagcattcataaaaagtatgataatggttggcctctataggtagattaaatctgttaaatgtccatggatctaggctatgaggagccatgctgggggcaaaaaccatgacaaaaccgatatgcatggacatctttcagcattacttttgtattacttaatgaaacaagcagtaggcacagtcactcctgtagaagagaagaatgcaaagaacatgtaaaagacttttctagaacttgtgtattgatgaaatatataatgagaagcaataatatactttatggaaagtagaaggaagttttcaagggtagttttgaccatatatgctaatttaacaatctatccacctatgtttataaaattccactggacttctaatgcaagattcaataactaggtgatttctggacaaattataaaatctctgcaagactcttacagctattgttggagaaagtggtctgagtaatatactagtgtttgtccagagaaaggttagaaatgagataactcagtgtagaaatttcctgtccagatagtgattgtgctctagtcgcccctcagttgacagtaaaaatgggacttgcagatcttttccggaatgtctgcagcatattttgcattcataaacaaaataaccagattgaaatacaacttctttgcattttcagtatttaaagaatgtcttagaatggctgtttaaaagtaaaactgcatttcttatattttgcaacacggtactgatttaaaactatttataaaagtctgctttgccagttaggcaaaaatattagacttagaaattaaaaaaaagaatttccttcaaattttgagaaaagaagccattcatgtttaaatgtaaataaactttcacttttggctctctctgggtttcactggcatgttggggtgttaaatcttagttgttgaaataaacacctctgattcctcaaaaaattaaatattttcttcttagttaataacacactttgttcagttttttatggcactctgagttgtgttgcacttacttatcatgagaccaagcttcttgaggaggatggcaggaattatgtgagaattagaaacctgttcagccacctagcaacttctctctcagttgctctcttgggtgctttgtcccctcttctcagtttgagccaaccagtgcctcttgttggtgattcatatatttatacacaacacacacacactcaatcatgacagtggtgatgacttcacagctgtgtatatatatcaatgtgtaagaaattatataatttaaatgcctacaatttactgaatgtcaattatatcttgttaaagcttttttaaaaatcctaacatgatgcccaccatcgatgggtcattactttattaagccccgtgtctccaggaactgttcagactttgctctctttctcacctgctcctctcaggggccctcatggcctgcgtccccctacctcactagttctctgcctttgttcttatccccagcccccatcattctctatccatgctagagcactgt

SEQ ID NO: 35730 - DNA, 1668 bp, Bovine  19866880504528
  misc_feature (1)..(1): n is a, c, g, or t
ntcacctggaaagccctgaactgctttctttcacacccaaagtaaatatgtcaggaaaatggagataagaggagaggattaaatctgtaaagaatacttcacatagtaccagggactctggtagtggtgggaagggtggtttttatattaataaggaaagattaataatagtcatctccatactcctggtgggtatccttcttgacacaagcagatgagtcattgctgttttgtctgcttactttctgcagttgttacatttactttagtttctccaccactttgttagcttgttgcttcttcgctcttttcacgtaaggaataatgattattaaataaatgttttggccactaagtgactggtcatgtcttctgtttctagttattttggacacctggaaggctgtggtgcagatctacataaagaaattcgagacacttactatcagtttgttctgtttttggtcaaagcagtcaaaggattcaatagcaaaaatgacaggtatgagagagtttaatgtgatttctagagaaaaataattgccgttttttctgacttttaaagaaatgcatgtctaatgttaaaaatacagaaaagcacaaagcgtaaaataaaaataacccctaatcttgctatctagagctagttgctactgttaacttatcagtatattttctcctagccttttttctctatggtatatgcagttttttaaagcagatgggtcttggttcatctaagaatctgtaacccgttatctcagttttaaaaacttgaaagccattcgccagtctcctccatagtaagtggtgtagacataaaccttaaatcaaatggttcttctctgtacctgagcggcatgacccgggctcgttgtggttggccctgatcttgccgttgatcagagctgagcagtgttactcagtcctttcctgtaaaatttctcctgtggtagtcttggcggggtggaaaccttgctacttgatgctttcagaactcttttgcttaagatgttctttgaagagggtttgtatggagtctgggaaatttgaaaagatatcgtaaggaacccaaaccagcagtgtggggttcccttccgctttccgctgacagacataccccgtctctgactcccactgtttctgtcatccccgtgggtgatgggcagctttggtaactttcaccttcatggcctcttcaggtccttgctgcctgccctgtcctgcatccagacggccctgctgcaccttttggacatgggctgggaacccagtgatctcaccttctttgttgacattcagttaccagatctcctcatgaaaatgtcacaggaaaacataagtgcccatgacagtgtgatcaggtaaggatacaatctccagtctgcagtttcttcaggaacttgtgaagttcaggggtcgtagcaatagcacagggctttagagctcaggcctggagccaggctctctggggggtatcccggcattgccacgtcctcactggatgacctcggacaactttttaaactccttttacctcagtttcctcatctttagaactggaggtgatgacagcatgtcccttagaggatggctgtgaagagtgactgtgttctcctcagcgttcagcgtggcgtctggggcacggtggtgtgtatgagttggtag

SEQ ID NO: 35731 - DNA, 786 bp, Bovine  19866880537414
  misc_feature (1)..(1): n is a, c, g, or t
ntcttcttcagggcacatgagggctaaataaaagcagtgacaagtgataaactgccattttagtcagttcctgcctgttgccactcagaatgtgtttgagtctaacagagaagtgtgggaagaaaaaaaatgtcaaagttgtggaggataggtaggtgaaagtaggcgtacctatggcagaaactgctgtttcaaaaacacgagtatatacacgttcattgagtcagcgttttttttttatatcttttcctttcattgattcttgtatttttggctactgaataaattgtaacatataatcaaatccattttcatcctttgatccttggtcacggctttggaaaattgtttgccagggtagaaaaagactgtggcagaaatgtggaatttcctgtggattctaatcacctcctgctgtgagtggtcctgaactgggcatgtccagaattgacacctcttctttttcatcccataggactcccttacacttgtccatcatggccaggaatgaatacgtgttcaatcagctgctgcagtgtaaacagtacgtagggagccctggagcaatgaaaggagctgttgggagggtgggattgtgagtaaaagataatgctcataaaatgtcttttagcactatcaattttaagaagtaaaagtaagattaaaaaaatgtccttcagaatgagactgttgacagtacaaagcatctgaagacagttgtactcggtgttcacattgcttcctcatttcaggttagatttagagcgaaagaccacgagggcagca

SEQ ID NO: 35732 - DNA, 1212 bp, Bovine  19866880601168
  misc_feature (1)..(1): n is a, c, g, or t
nccccacccatgtccctcccttccccctccccttttcatccccagcgaggcagccagcgtgtgtcctggctggccatcagcttcctggtgctctcctggctcttcacactcatcgccctgatcatggctgcggtcggggcaaccacatggctgcagtttctcttctgtttctcctacatcaagctggcagtgacgctggtcaagtattttccacaggtaccttcaaggtctgcccgccttttcccgtggctgttagcatgagagggacacggatcccttgggggcagcttctgactggggcaagatgtgggttggaaagctaccaggaggccagcgagcccagcaggagtgggacatcacaccaagccagccgtgacctctgcctgctcttccctgggcccagaaatcccatggggaagttggtagcatttctctgactcgcgctcagctctgagagtcggggtcatgtagatcactctcgtctctctcctttgccacctttctaatgacttcagtcttgcccgccaccctaccaccgctgcccatgaccaccaactgatgtccctgacaagccacggcaggatactggggagatgagctgggaggaggcagcccaccagcacccagggtcctccttgtgggccctcaaaccctcccttgagtgctcaagacagtcctactcagagtcggggactgagagtcacacagcttccgccacagccagaatggcctaggaccagtccaggtatgaaagaactgacaaccacaggctctactcatgaatctgggacctcatttaactcgcttccccagcacagggaaccttttgttccagggactcaggaaggagaaccttttggccagagtcagggccagtcccctggagggcgtggaaacagagctatgcccttaaggatcagcagcactcagtcccatggaccagggaggaggggccactccaggccagtgctttcttcacaaaggtgctgtcggaggaggccttgctggtggagcagtgtgaagctaggaaggtgggatcggggtccagggggcttgggaaggaggcttcagagtaggggaagggtctgggggaagtagggcctcagtcctgagtgtgggaaggctcgggcctgggaaacctgggaggcaggagcctcagttagagatgtactaggaccatccaggacggagaggggcagcaagcacgaaaga

SEQ ID NO: 35733 - DNA, 726 bp, Bovine  19866880601799
  misc_feature (1)..(1): n is a, c, g, or t
nctttcaccgtgggcgccggtctggcctcctccattcgagcggaaggagagcagccggagtcgcccccgggtgaagggaggccgccgggtgggagtggaaggtgacgagggctcctctgctgggacggaggacacttccaaaggcaggagcgccactgctggggggcagcgtgggctgcacgtccgggccggggctccggtctcctgcagtagggggtgctgcttcggtgggcgatgcggaggcttggaaatgctcttccaccacagagcttgtcctctggcgcttgtccagtggctgcaggtgatctgtgtcatccacggccaccgacctgtcacagctttcttttgaacctccacccgtgggcaaaaatttcaatagtagaagactcttctgataacactctttcgctgaacgcgaaaaaaagcaagaaggagaatgaagaaaaaaaagtccaaatgaaacttgttgcctactttggaactgaaaataatctacttaaagtctacaatttaggacaggaaataccttcaatacagggatgtacacatctaccgagagaagagaatcgtattttctctcattatacacataaaaatctaacactatcagcacacttcaagttttattgtgcacattttcacacatattaatataatatagacagaacagtataaggagtcctccatgtacccctcacccagatttaacagctatcaatccaagga

SEQ ID NO: 35734 - DNA, 3202 bp, Bovine  19866880630537
  misc_feature (1)..(1): n is a, c, g, or t
nttgcacaggggtccccaagccccaaagaccaaaataacagaacttggggttagggaagggagccgacaagagggtctcccactctgcacagctggggatcagtctttctggcccacctgcaaggggtctgtccaagtgggcgggatggggctgagacagtggacttgaaatccttgctcagcagcagcatcttagggagcctgggacacctgcccgctggaccccagtgaccccggaagaggaagtgaggttcccaggtctctagggctgtttgcattcaagtcaaacccatttacaaaccaaagtggggcagctacagggcaaccccagcccctctgtcttctctaaagaccacgcccctgccctagctgctccactgctggcacgaatgcgacagacaggaggactcgggccccgagacgggcaggcacctacaaggccttgtggccaagccagctttgcatggcatttccttaggcttctctggtggctcagatggtaaagaacctgcctgcaatgcaggagtgtgatccctgatcaggaatatcccctgcaggaggaaatggcagctcattccactcttcttgcctggagaattccacggacagaggagcctggtgggctacagtcccagagccagacgctttcactttttcccttggcctgaaacacctttccctctcctgttccttcagatttcagcagaagcgtgccttcccccagggagacctcctctgatctccctgtcctccccaccatatcttcaaggcatccctggaacccaccgcctgtctctatgtgtggttatttgggatgaatgacttgttcccttctccaggtgaactcaggggaacagggaccctttccccaaggtctggcactgttcctggtggatgctgggtccttgataaatatttgggaaggaaggaagggaagaagaaaaaagaaaaaggaagggagggagagagagaatgagagcgaggaggggaagctgggacaacaagagggtgggaatccagtcctcctgcctccaactctcccaaactctggcctggcacctgtcccctgaactagagctcgagaccctcccagcttcaaagtggagcccccattgaccaggctgtcccatgctcactcccgggccttgaaggaggtcttcccagctcagcagctgaacgcagttgaggaaagccatccgcacaggaagaacaggactcacagtctgggagtttcagccaaagctccgacttggcttccttgggtcatgtgcctgtttgagtcccaacctctgcctgggcctcagtttccccttgtgcacaatggggagataagccttgatctacggggcctccttcagagccagaagcatgcagggaagagcatgaatacacaagggtggggaagccaaggaactgagtttccaaagttgggaaacactttagggaacagagctggagagcacgtgaggccggagaacagcctggacaaatggctaaaactagaatgtgaaaggccggtttgtagagttgtggagagaccggtccgctgggatatgtgtgggagccagatgggaaagaaagggctgtgacttctgggttgaagggtctgggttttatcctactggtcatgggtcacagggagcgaaggaaggttcttgagcagagggatgaagtcaagaaatcaccagctcaggctgatgataaacagagagaagtgtggaggcagggaggccagggaggaggctgttgcaaggcttgagagagaaggtggggccttctctgagcaggggcagagacacatgaagcgcggcaggaagagggaagctgctggagaacgcctattccactttcacctgcaggcccgcaggaccctcacactcctgtggccccagatgcactcctagcctcctatccccagccgctcctccgcgacctcagggctaaacctcttacccaccaggagttagctgtcattccttactttctctcatcctggaatctaatccacaaccaggtccttttccatcacagcccactctgacttttggtctgacttttgacttttggaggtgaagtgtcagttgctcagtcgtgtctgactcttttcgaccccatggactgtatcccgccaggctcctctgtccgggcaagaatcctggagtgggttgccgttcccttctccaggagatcttcccaacccagggatcgaacccatgtctcctgcatggcaggcagattcgttaccgctgagccacctgggaagcccatacctcctcctttttcttcagaatatatgcggggtcctttcagcctctgttctcccctttagtcctgccctcttaacagcttctaggagggacgccattcttaaaggcaaatgtgacctggaaccctcactgcttaaaaagtcaggccattaagtgatccatcaaggttctcagcgtcctagccctgcctctctgatctactctcctgaccctcgtcctcgtgcttcttatgatccctccaggcagagggactgagccactgtctctagcacacgactgagatttcccaccttctacgtagggtgttttttttctgtctgcaacagcttcttcctgtgtccagatccagcagcaaagacttacctttcccccatgctccaccttcccctgcttcaggtgagtttggcaggcatgcctcctgccacagaggtggtaagctctgccatcgtctgtcctgtgggggatttagacagcactgggactgggtgcgaggcttggagctctcagtacctggcagctgggaggtggggaggacagaccagccctttggacagcgtacctgtgcccacgtccccctggccaccagctggttgtctaggtgaagacagagggtataatggggcacacagcaactgggcaagaagctggggtgtgagatgactgtgtgtgagtctgtgacagattctgcggaggggtgcccagaagttgtcatgagggcagcagagcaggtgggcatgctgacgggtgtgtgaacctgccaggtgggggggccagagttgctggcagttgctggccctgcctggggtggcttcagaggcagggtggggtggggtgggctggagaaacggaacatgggccaggctgccagagcaaacagacaagccttctggcgcttccttccagcaaacaccaactgacagctgagggcggggtgg

SEQ ID NO: 35735 - DNA, 1719 bp, Bovine  19866880661996
  misc_feature (1)..(1): n is a, c, g, or t
ncacatcccacctcaaattacagttgcacgcacccctgtcttaaaccctcccaggccacaggcctcatgagggcaggagctatgtgtccatttgtctgacctggtccctgcttcatccccagagtctagcacagtgcttggcacacagaaggcactcagtaaatcagggaataaacaagataggaaattagataaacaagatgaaggaaggatgactttcaaagtagtatcagtactatctgaggcagaactgagaaaccacgcacccccgggtgctaaccagttataaattgtgtgcaagagataattcagagatgggtatgtgtgcattttaaaatgaaagagatcaaggtaattgtcaaagagtttttaccttggaagtcctgtaggtgtgcaggcatctgcaggtgagtctgaaatttgaggtgggcaggaaggatccttccttaatgatacaccttcactggccttacttctctgcttgcaatctaaaggtctgacttccttaggaccatctctcttcccctaaaaacaaattggagagtgagtaaacttttatgtgaaagaaatttttttacattcagacaatttaaaaaatcactagccaaggacttccctggtagtccagtggttaagaatcgccttccaggggcttccctggcagtgcagtggttaagactccacactcccacattcccagggcaggaggcgtgggtttgatccttggtcagagaagcaggattccactcccatgcagcagagccaaaaaaaaaaaaaagactctgccttccaaggcaggagatgcagaaaccgcaatttgccacaaagaagactaagagagcgagccagggcagggtacgctgcatgcacacagctactggtaagaggacccaaaaggtatggatacctcaggaatcaaaagaatgccctgggggttccttagaaaaaggatgagtccagtccctaggcagggaaagcctaagataagcctgaaacctctttctgtatcaaaaattaaagaagtgatcaaataatcatcaagacatagccaaggacacaaaagccagctggaaggagcttccactggccaaacatgggacaacctgagcatcaaaatcaataataaagactaagcttttaatccactaaataaaaaaattcaagtccattttgataaaaataagtgaacaagtagatacataaggagtgctgtgctgattggtagcacattataagctgctgggggctcaaaagaagatatgattactctcgggctcaaaggcgaagagaagattgctgattcaccctgcctctgctgataatgttttccctgtcccaccacaatccatatgggaacagtgctgcctggagaagggttctgcggtcaaaacaggcttgaaggttatcacatcgcctgtccttgtgctggctctctggctgaatgaagctaatggaattttcaagcttttgccatctctgcttttgtcctcctctaaaagacgacaggatcccagggaacgataagtaccaacggggatccttcatgacagagacaggggacagaaacagcagcagctcctgaggcaaagccgaggcgctgagagcaccaactcaggctctgaaggcagcatcacggatgctctgcctgttcttgcacaaaacgatcttcagtgtcactgtcacgggttccgtctggacccaggaaggcttttcttctac

SEQ ID NO: 35736 - DNA, 3595 bp, Bovine  19866880680977
  misc_feature (1)..(1): n is a, c, g, or t
ncagcctcacctgcaagcaggacaggcactgactgttggctcctttcccctcctgcctgttgttctgcgtacaggagggcctgagtctttctctgattcatccatcaggtagaaaccttgctgcaagaagtatgcccggccacacacaaccgcacttccaaccaacacctacgcatgcatcccatcagtcagcctccatccactgaccctaccgggtggccagcccagtgctgggggcacagaaaggaccaagaccccatcagagacagaatccaggggctggctggggcaaggggaaccacaggagggcccagagtgcagaagacagcattgtggaggaggtgacagatgagctgggcctggaagtgaaacgaggctgggctgggactaggggagagggtgaggagccacagagtaagtgatgaagaagaagtcagcggggtcagaaccagatggctgtcggccttgaatgccaaggtgcaggatgtggacgttatcgctcagatggcaggaagccatgagaagcttcagaagcagggacacaaggcactatctgtgctcccaggagacaacttcccatcgagacctgttcgtagtatgggggagcctattggcaattaaagggcacaggaggctaatgagaataagagcagttgatgatttgagtgcatgctctgcaaaggaaagcactactctaacccttcacacgcactcactcactttattctcacatctctaagaggtaaatgctttacagatgagggaactgaggcacagagcaattatatgactcacccgaggtacccacagttaggaaaatgtggaacctggatttgatccctggccccagagcctctccagcactctaccacccttcccaaaggctcaggacgctttctcagacatttaactcagccccagacctcacactaagacccagaggccaatcaaacctggtcctcccagccctggggccaggcaggtgggaacaatgctcttccactcagcagccccaattctgtagcaccctcctcctcaaaacaagcatcctacaaagctgaaaacctcaaaacaatacaaataaggctcaggccatatgccaggcctgggtctcccaggaatgtttccccttggacaaggctggctatagaaccaggaatagacctgcttcccaactagcagctttaacagctctttaacgagagcactcgttagcaggagccaccacaaacctttcaatgatgttcttttatacacctttgcctgtttctctgactggtccagatctaaccaaatgtagtaagcgtgaagcagcccacacagtgcttccagtcagtcagtcaacagactctgaatctgccctgcaggtactccacctgattccctactggaaaccaaccttctccctagacagagggcaggacaggaactaaaaggtcaattgctctagactaggagggtgaataggcttctctggtggctcagatggtaaataatccacctaccattcaggagacatggatttgatccctgggtcaagaagatccccttgaataggaaatggcaacccactatagtattcttgcctggagaatcccatggacagaagagcctggcaggctacagtccatggggtcacaaagagtcagacatgactgagtggctaacacaacacttaagaaagtgaacagggacaaaatactttgcactgccaggactggggtgtgcccagcacggatccccagagccatgcacctgtcagagtcaaacatgctacagagatgggggaatttccatatttaagggtgtttgatggagatggtggttctgtttaacacaagattcacaaactcaccaatcaggactgaagagtggtcttgagaaaatgaccctcccagcaaagatctggtttggcttcagggtctttctcaactccagagccaggaaggacactgcccaccagctgggacaagcctcccttcctctctacccagtctaggtgagacatcctgggatacaggtctccccgtcacctctctgcccaaagcatccctctgcatctggcctccctgcaggctcttgggagccggtccagggcccaaccctgatcatgctcatcccagcatactacctaggcatttcctaagaaggaatgcagggctgaggactttgcacccatggatgaagagccagaggaacccaaccaaaaacaggttagacaagaatccaggactccttcctcctggcccagaattccttcacttcagagaggactacacactgaattctccagccacaaaccaactgccagcctctgctgcagccaaagcctcttggccccaggatgcccctggcacagacaatagcagcctccattgtcacttaccaagtgttcacgactaggcaagccaagtgccctactgtgccacggcctttgaggaagccactgttattacccccaattttcagatgaggtgccgagaggctcattgaatgacccatagtcacacaactagaaaaggcacagcccagctttagacagctcactgtgccatttctgaaagcaaacgtctgcattggccatcccactacaaaagggactcaccagctggacgcaggcacaccccagaccctgcgggtgcagcgagcttgaaggctgttgtgctccaagggagagctgagctggtgtggcgagaagagccgcccctgccctgcctccgtgagggtccttggcccctccccaggccacggctgctctgactggcagggacgggctgtgggtacgctctggcaatcaaagaaaatgtttccagcaacagcagcagctgcagttgccgaggctccgattcccagaggaccccaaagcctttcccatcatttttgccctttgttcagaaaccacttagctgctgcccctcctccagccgtgccagggccacagtgcactcagccacacacagcccagaaccagctagagctggtgacttcagctctcaaggaaggagggaggtgctcaggcctcccagatctactagcctggcagacagggtggtctggggtaacagctcaacaaacagcatgaccagagatctcaaagccagggctctaacactgctccatttcccaaatgcggaaggaaaggaaagggtcgtgtcacccatcacacaatcctgacctggcaatcagggatctcctggttttgggtgctgcctttgctaccaacactgagtgacccagagccagtccctgcctctcaaggacctctcattccccgtgtgtccaaatctgaggtaggaacggcagcgggaacacttttgggtccagcctttctttctcgactggagttcctcccggaaccacggaacacagaaaacgatgagggtttattttctgtttcctagtatgaccctaaaggaacaggaaaaaattcatcaggtccaatagggcttaattcccttccagaaactgcctgaggaaaacctcaaagtttttcccagtgtgcataccttataaggttgtataaggttcactagggcttcccaggtggctcagtggtaaagaatctgcctgccaacgcaggagacgtgggttcagt

SEQ ID NO: 35737 - DNA, 1524 bp, Bovine  19866880743459
  misc_feature (1)..(1): n is a, c, g, or t
nccccccggaggtgggcagcgtgcgcccctcctcgagcgtgcggccgctgagccacgcccacctggcctctgcaggcttcccgctcgccttccttgtttcctgcctcctgcccctgggccttgccaaccggccgggctgggtttctaaggcatcacgggcaccgagcttccccaaaggatgagtcccgccagggagagccaggacgaagagaaaggccttgtgggagccctacccaccccctacaccccaggtgacacacattccgatcctgtccctggacacgtgcgcgcggaggtcatgcagacgggggaggagggccgggagaggggccacagtccttagccccctgccggcagggtcggctgttggcatgagggcggtgggcctttggaggcgcgggatgagcgtgctgccgggcggccctgggcgcatgcggggggctcaggacgcagcctcgtcttcttggacaccgggcagctctgggcttttgcctccttcgccaaacccgtctttcctgttcaggggacaccaggggcagagggacctcagaggtcagaacatgcatgcaggaggacacgctcatatacactcataggcatttttatccacatctctcaaatcccccaagctcagctcagtctcgccaccctgcactgtggtcccttgctggttccccacccatagtctcagcccaccaccctccatggctccctattgcttggaaaggaagtctagacttcccaccctgacttctggagccttgccagatctgaccagacatggcctggctcaggccccatggtccagggtaggagggctttggttttgctttttctttgttcacaggacagattctacccatcagtcttgggattctgtcccatattcagtagattcccattatcatcctgatatcacccccccccccacaaccccgtgccagggcctttaaaaaaaaagattaataaatgggttttggtatctttaaaaaggatccatcccatttacttctactatagagttatcctaaagcataaagaacagagtcaatcaaggataaatgttgggactctgatggggtaaaacctacttttcaaaactaaacctgtgacatgtgtgcatgctaagctgtttcagtcatgtccaactctgtgaccctatgcaccatagcccaccaggctcctctgtccatgggcttatccaggcaagaatactggaatggcttgccatgtcctccaggggatcttcccagcccagggattgaacctgtgtctcctgcagctcctgcattgcaggcagattctttactaagccactggggaagcctgtgtcacagaattagaatttttatatctaggaaatgttaagccccatcctttcacagtccagatgaaggaactgacctgtctccccactaacgtgtccataaaagaacaatggctgccttgctcagttgtacccttggcgttcagccctgtgcccgtcattgacctgggctgcatgtgtccttagcctgtgactgg

SEQ ID NO: 35738 - DNA, 906 bp, Bovine  19866880828660
  misc_feature (1)..(1): n is a, c, g, or t
nctacatggactgtagcccacgaggctcctgtccaagggtttctccaggtaagaatactggagtgggttgtcacgccctcctccaggaaaaagaaattcagagagctataatttgttttttttttaaatccatgtgcaggggcaagaacaaagatattttaactgattttagcatatacagaaaatttgctctgattcttagataaaataattatgcttgggacctgttttcctcttccgggttttgacatcgacgatcacagccctgttcttttcagtaaagtgcttcaagatgatcacattatgtggttcattggcattatccatatacacacagcgggtccccacacagaggacctaaacacgacagagaaagaaagggaaactcagaagtacatagaacacagtctcttttgcttgtgctgctgacttcaacaggcagtcagggtcaggattcttcccatctgtaagccgagggttggcacaggcctggcacagaactggtttaagtgcttgctgaatgaagccatgttttcacagtcttcattgttccaactagttgaaaattacaaatgagatcaagctgaaggccaaagtgaagaacaatcatactttgaagttctctgtaacttattaataggggggttagttacctattattcaaagccaactactggctaataaaatgagtcaaatggctaaactgttaaaaatgtacgttgaacaaaccatccccaaatcttgagaatataccagtaccgtaaaagcaaattatgtaagggaaaaaaagactcccaaggatatatgctatagggactttgatatgcctgatgaagacaggaagaggataccaggccttcagacaggtgtacctgggggaagccgaccagcaccagcagtgtgaag

SEQ ID NO: 35739 - DNA, 1021 bp, Bovine  19866880924835
  misc_feature (1)..(1): n is a, c, g, or t
naccccactggaaaccctgaccttttctgactcaaacccctcacatgccatagaactgacactgaaaacttgctgggttctcttttgaggtagaaagcatgaaaatccccttcctgacacgaggtgtcatgactgctttgtgtccttccagtgataaggatcctggcggccttctgctgttacctgagaaaggcgacctggctgacatggacatcagcgaagtgctagcggtcatgaacaccctgctgtctgttgccgctcgagaggtaaccagtgctgctccatttccttggcttctttaggagacagggaggagcagtcatggctccttccgctttagccctcgtttttggtgtgactgtaactccatgcctttgagcacagagcttccctgcctgcctttgctccacgtcaagtaaggggacgttttgccccgaacaagtgaggggacgcttccctgcctcgtggtagtcggccagcagtaaagacccgaacgtgcccatgaagactgcctttgaagaagaggaatgggtacttaccgatgccctggtgtcagtccagtgaacccagcactgagtcatgtatttgtgctgtgaattctgtgggaaatcacttacaactgtttttaaaatttatgattactttgcaaatcttcaggctgatcaaatctgaaaggatgatctcttttctgtgctaatgatttttaaaatatttttttccttttttttcaacatgaagggggaaagcttgagaaaggctttttggaggaggtggtactggagctcctcatgagcccactagtagcgtctgaccaggcagagagggaggggtgttcttgctagaacagcatgtgtaaccggtgacaagatggggaggagccggaatttgaagaggagagtgataacagctagactttgagcatgttgggtttctggtctggcaggacttcatgtgacaaagtctggttgaacacttaagctgagtcagtgctgggaaggagatttgccatcataaccaacca

SEQ ID NO: 35740 - DNA, 1239 bp, Bovine  19866880959745
  misc_feature (1)..(1): n is a, c, g, or t
ntcactttcactttcccctttcatgcatggagaaggaaatggcaacccacttccagtattcttgcctggagaatcccagggacgggggagcctggtgggctgccgtctatggggtcgcacagagtcggacacgactgaagcgacttagcagcagcagcagactctgaagtagtaaagtcattcacaatactgagtatgttgctagcatactgagtcatactgactgtgcaagtccactgaaataattaaaataacctttgttaacatcaacagtaacaatgaaaatgctggtatctcagctgcaattttttttaaaaaggggtggggggagaacctacttctaaacaacagacacttgaaagtgaacaagtcttgtacattttcttaataagtcacagtgactcatgctcgagtaatcacaatttgcacatattcccaattttcactgtttccttcaaccccaaatggagatcaaggggcacactgttgatcaccttcacttcttcagaataaaacaatgagcaagttagcattcccgaaacattcacgcagcaggtcttcactgtggcacatgcagacgacagagcctgtcagtcatgatctccttcttcagtgaatctttttctagtctacattacaactcactgacggaagaaaaacatcttcaacagattttcaatgattaacaagaaaaatcctcgaacacttttccctcacacacacaaaagcacacatggtaaaacagatttctactgagcacaaaagaagcttatccaaccccaaaaagaaacgtctttgagcctgcaaatgaataatgctttttccatatttcatgccattaataaagctcatttaacagcatgtcttgataaaacaatttcactaatcacttgttttttgtgttgagaataaattttgatgttagccgctttgcaactggttttacccatccatcttctcaaaaaacaatgtggttttacttacttttaccacaagtaaaggcttttttaaagagggaaataaacgagacaagttgcaagggtagctcacagacataaataaaactgaatcaagtacacaagccactggcacaatgaaaactccgtcgtataaaggaagtagcagacctgatattgataaaaacaaatttatgaaatgaaagataatctcaagaaaatttcctagaacacagcagaagagaacaaaggaagcatttagaaaaatatacaaaagacagga

SEQ ID NO: 35741 - DNA, 1260 bp, Bovine  19866881074012
  misc_feature (1)..(1): n is a, c, g, or t
nttaccagctgagccacaggggaaacccaaaatatagtggcgtgggtagcctatcccttctccagtggatcttccccaacctaggaatcgaactgggatctcctgcattgcaggcggattctttaccaactgagttaccagggaagcccttttacaagtttaagtttacaaattatgaacatggcatttctaagtggtctcctgttatacccaagagatggttcacattctgttttcggtttgcttcatggcttagttatttcagagggatctcgcctgaacctgtcatacggaatggcagcatttggggactgcctgatggttgcagctcaccagggtgtgtgtttatgaagggtcacagttaggttctgctaagtgtggggaattccctgcaagtcttagtggccaggtttttttgtgtgtttgtttttttttaagcctttccttcatcagttcaaagattctcagtatattaagggaaaaatagaactctcataagcctccttcttctctttgcagagttaggcagtaacatggcagtacctcaggcaaaaatggcattagtcctaaactcccccttgtggaaacctgtcttcaggcaccaaatacatccagagttgggattagaagcaagctggcccactcacccaccccaggataataaggaggtatttacttttcgcttatctgtgtatttggaatgagaaatgtttactgatgtttgttactttaaattataaacatttgtgtatgtatcttatcaccccccacgaagctattagctcctcgagggcagaaactagggtcctcacaggggccagtgtaacgggtgttcaaaagcatcaactgacagactctgcagtggtaatatagtaggtgctcagtaaatctctcttgatggccttgtttaaatgagttgagtttatttcctgtgcctgctgagtcacacttaagaacagatggtgtatgctatgcttatttgttctccacgggacagtagcacattatttaggcttataatattataaactaaacaagcttttccactatgtctttttcatctctgtccccctctctcagttctactacttttctcccttcttcccactttcccccaccccagttcttcagtaattagtggctggatccagggactcttcttaacttctctgctccttcagaccctttcttcttgtattccatggcagtccactgtcttctcttacatgtctccactccccctgcctcctttattgacct

SEQ ID NO: 35742 - DNA, 1511 bp, Bovine  19866881088275
  misc_feature (1)..(1): n is a, c, g, or t
ngacggaggagcctggaaggctacagtcctggggttgctagagtcggacacaactgagcgacttcactttccttttcactttcatgcattggagaaggaaatggcaacccactccaatgtcctgcctggagaatcccagggatggggaagcctggtagtctgctgtctatggggtcgcacagagttggacacgactgaagcgacttagcagcagcagcagcattgattttaagattgctttctcaattactatacaatatttaattaagatggttgtaaatatatataaataatactacctactcatctccacacctaagaaataaaaagaattctcctttacttatcatttccatgcacttgtgtaattttactgcatatttatgtacatgacagagagatctggctagtgtttaagttttatttgaggaataccatacctacgccttctacagcttgctatgttttgctcatcgtcacacttgtgagcgccgtccatgctgataacggcagctctactccgtctactctcaccgtagtatgggactatatggtaatacaatatccctacgaatgggcgtctcgctctcccaagttcactgctgtcacaaagaatgccgcagaatcacttctccaaaatgcagaaggccctctcctttgagaaaggcctcctctctgccgaaaaccatcatcagttgcccagaatctaccgcaatgcttcttctcctagtctaccaggttaggttccaccaagcagcctttggggtacagaagaaggcaagtaaggggggctcaactgactcctgtgtactctgacaatctaacttcaccaaattatgatttcaaggctcctaaattattttttatcctttatccatgtgcatcactgaactttagttctgaaaaacattcctaaagttatattcttgagaagagagctacttaccttaattcaaagatatggtagaaaaactcaaaatatataaaaatcgcaaaagaacatcttaccatccatattcgaatcccatcagccaaggaatacacctgtgcaaactcctcactcaaggctgtcttgcccccgctgtttactggggaaaggagaggttacactcagttaacacaattcactactgcaacattaagcccaaagtcacttcccaatctctgcacaggaaacctcttcccctgacacttgcacattgtctgtagtaagagaggactggggggaaaaccatcagtaaactacaaacacctgtaatgggttcctatgttacttgaaactgtttttcaaatgaacagcatctgaaatggatgtactattaaggtaaaatataaaaaatagtaaaagcaaaataaaaattattaacatgatagaaattcagggtatatattaagtgaaaaaggttggttatgaaacagtatatacaaaattatattatttaaaaagagtatacgggacttccctggtggtgcagtggataagaatctgtctgcaaatcaggggacatggg

SEQ ID NO: 35743 - DNA, 902 bp, Bovine  19866881097221
  misc_feature (1)..(1): n is a, c, g, or t
nttagaaaggctgcaggcagaaggagtgattgggtggcaaaatagcaccattgatgtttaaggcagagaatgatacgactggatccccggcttattgttggattagatgggatttgtctagttaataatcatttattggatggacgaggatgaggccggaggcagagtaaggaggcttccataaccaagccgagatgcaggaagggaatccagcctaacaggaagacttgtttctaaccgggaattcattacagcccctaaagccctgagccatgtggttccaaaactgctctcatagttaccttctgtatcctcttaaactgcaggtttctggggaaattcacagccatgctggtcatgtaggaatcttccccagagttagtcaggctaatgttcatggtcagctcctttgtgaggcccaccaccaattcctgcctgcacagggtaggcaaagagataaatgttaccagtttatttaatctgtgaaaacctcagtgcgatgcaacgatgcaacagcaccttcttaacttcttagatactattgcctaaaggatacatttagcctagatcttcttccccacaacagaagcaagcacctggactaccatccccacctcagttgctgtgtgacatgaccatttatttagtgtttaccatgtgttggggactgtgttaaatgtttcacactctctgctaatcctggtgataactctgtgaaattgtatggttactctctgtgctgcagtgaagggaacagaagccaggggaggctcgctcacttgcctgaggtcccacagccccgaaagagagttgggagaatcagacctaaatcctctttctatcaccaactcactgtgaccccaggcaacgtactttgagacacagattcatccatttcacgt

SEQ ID NO: 35744 - DNA, 1218 bp, Bovine  19866881136174
  misc_feature (1)..(1): n is a, c, g, or t
nccgggagagagtctgcaggtctgtgtaaaaacattcatcttctcaccaggcatgtcagggccgtctccgtggcctctcccaccttctcatacacacccttggcctagaggggcccaggtacagggagtcagggtcggggcagcccccggtctcacctcccattcaccgcctgagccttggagctcccaggcgctcctgcttccctccctcttctctccctgaggcctcatatgcccctgcctccagcactcttcataggctcacaacagccagtgcccacccaggccactgctacctccctcttgagccccatgcccactcatgcagttgctgcccgttgggcttgattcccttccgaccctcagtctacctccatctctctgtatgtgccactccagtgactgttccggccaaaatggcagctagaagctacctgagctcctccctctttcacctaactggtcaccaagtcccaggattttggctccaaactctctccaacccatgcctactcccctcttcctgaagctccagccaggactcagctgacatttctcgggcccagatgaccacacagggctccctggccctggtcttgcccagtctgttctgtcctccacactgagacttaggtgatcttctgtgaatgcagatctgaccatatcactcccctgctctataccctttgctatctgtctgctgccctcagctgggcatcagactgacttggtctggccaagtgcccccattcaggggcaaaaagcctcccgtgtgcaccatgcttctgctccagccacaaggaagagttcactgcctagatcacatcaggttatagtggcctgtggaccgtttctgggctgtgccttttgctttaaacacttcctagtgtttgtcccctacacctcttctcccaggcatccctggcctttctgccttttacattacagtcccccacagcccaagagccccagagcaaggttctaaagccaaaccgaggaagaagcggggagcagtgtggatggcagtgctcctggggtgtggcactcccaagcggcagggacttccaatcctgggagcttggatactctgggagaaaggtctgttctgagcacctggatactagggaagtcactgaaagtgggtagggacccacctcgttgtagtccagtgctgaatcattgcacagggcacagatggtcgccagctccaccagccca

SEQ ID NO: 35745 - DNA, 1481 bp, Bovine  19866881281277
  misc_feature (1)..(1): n is a, c, g, or t
ncagcctctgggactcccactggctctgtctttgcctcttaaatctaaagtgaacctaagtaccgagcaatctacagattttagaagctgaggtttttatgcctgagccagggctctggtctctggtcccaaggctgtcctcatttttcttgtctacacagtctcctcattcagcttcttctagaaacacttgctcgtggatttcttacatcagggtctcccagcccccagtatccaggtggaaatgagtgcatttttccaccacttctcagggaacaaagcataggcaaggttcaccattcacatattcaaacatcatccaagtcttctggtcgctttcagtatcgcttttggtgttggcgccacctcagttccccatctaaacctgaaatgttgaggaggcccagggctgggggtgaggggcctggggccaggactgggccctggaagtgcacgtggagtgctgcttctggatcaagctctgcctcatggcccctctctttcccccaccaggactgcgtacagctgaaccagtacaagctgcagagtgagattggcaaggtaggcctgggggcaggccaggagcagggggaacttgtcttgggggtttgcagagccacgctgtctggatcctccacaatcccctctcctcctctggggaatgtgaggctgagccaagaaggtcctaccctggatatgcgggaagttttgtcctctacaggggatgggagataattcttgattcctgactccctggagttttatatgtttatttatttattgcctgtcctgggtcttccttgctgcatgggctttctctggtcgcgttgagcaggggctactctttgttgcagggcatgggtttctcattgtggtggcttttcttgatatcgagtgtggatctaggctcacgggcttcagtagctgcggctcacaggctccagagtgtgggcccagtagttgcggtgcctgggcttagttgccccatggcatgtgaaatcttcctagaccaaggatcgaacccttgtcccctgcattggcaggtagattcttaaccactgaaccactggggaagttctccccagattttttgatggacgggactggggaaggcatagagctgtgctgagcccagcaggggcagtgaccggggcatggagccctctccttgcctgcctgaaatttatgcccactggaggccagggtggagatgggatgtgggaggagatgggggggcaggagcagctcaggctccccttctcttctccccctagtcctgggggaggctgccctgtccagcaggggctgacctctgcctctttgcagggtgcctacggcgtggtgaggctggcctacaacgaaagtgaagacaggcactatgtaagtctggggaaaggaaggaggtgtcgcctacactgggccctagatgacttgggggtgggcagaagctgtgccaagacggtggacaaggctgcctgtga

SEQ ID NO: 35746 - DNA, 3099 bp, Bovine  19866881284876
  misc_feature (1)..(1): n is a, c, g, or t
natgatggagaaacgtcttggttcaagagttcccagaccatcagggacacaggagcccttagaggtccatgaggaagccccatgcccccaatattatatagaaggggaatcgttggcaggaatccaagcctcatttcacgaatgctgtattcaaccatcaccctaactcctgacgttggcaatttccccagccagtcctggccaggtgggcctcaagggaatggagagccggggtggggctcaggcctctaagcttgtgctccctgcttggccaaccccaggaggatgggagtttcccaggctcctctgctcccctcctggggacacctgcttgatctcaagggatgatgggagtagaaaaacccgcagggccccaaggaaagatgcgctggtgggggcccggcaggcacctgaagttgaagccttgagacagttttttctcctcgtacagcccgtggaactcgtagatgggtttgcagtgccgcacgtgccagtccaggtcacagtgccagtcgatggtgatgcccaccaccccgccctgccagggacacaggagctcaagatccagggtgtaggatcaggaactcctgcctgataactgttgccagcagtctcttgaagagggaatgtttttgtttagctgtttgtttgagaagagaccctgagaagctgcttgagggtttgaggtcctgtcaccctctctggccccagctcccacccatcaccctccagtttctagaatacaccaaattcttcccacctcagggcctttgcacatgcagtcacccctcccccagctcccattcctacaaggctgcctctttctcatcctttggtcacttctcctgagagtcctcccctaaccaccacccttagtctcaaatgtgcccctgtgagtccttctaaagtgttttcttctaaaacatgttttactttatagccatatatttattttctgtggttattcacccatgaccataaactccacaagggtgggactgtctcatttgcaccaattcctgagtcctagcatgggaggcaaggaaatcgctgttgaattaaagagtgagtctgtagggacttccctggtggctaagaccctgtgctcccaatgcagggggcccaggttcgatccctgatcagggaacatgccaaaactcagagttcgcatattgcaactaaagaaaccgctcaccgcaaggaagatcgacgatcctgtgtgacacagtatgacccggcatagtcagataaataaataacacatactttttaaaagtaagtctgtaaagacatgggctgggaagaaagaacctgagaccgtgaagctcctctgggcgagacaagaaccagggacaggtcggggtgggctgagcaagaggagagttgtgtcaggtcagagcaggcgtggagctaggcaggtaagtgggaggctagatgcttgcagacaatggtgatgggtgagaagttcccagtgtgggtggcagggagatttttaggaaaagggaaaactataacattcagctttctggtcctgtgtgttgctacagagtaaaccccctccgggggttggcaaactgaggattgagggccaaatgtggtttacctattgtctgtggttgcctttgccctgggttgttggaacagaaaccatgtgacctgtggctcatgcttattctccggccccttaaagaaagtttgttgacccccatactagttaaaggtatagtgaatgagggcttgccaggtggctcagtggtaaagaatctgtctgccaagcaggagacgtgggttcgatccctgggtcgggaagatcccctggagaaagaaatggcaacccactccagtattcttgcctggcgggctacagtccatggagttgcagaagagtcagacaagactgagcgaccaaacaaccacaaggggtgagcgagttgttttggcaggtgatgtcacagaaagggactgatttccatctctgagtcctgcaggagcctgatgatacgaatcatgggggaacatgtaccttggatgcctcgggccaggcagtgctgaagtgccatcctgtgtgtgaactcacttgacctcaggacaaccccgcaaagacttgtacttttatttctcccacttcacatgagtacaagctcagaaacacggaaggtagggaatttgtctgaggtcatgtggcttgttcaggccagagccaggatctgaacccagtcaggctggtctgtgctccttataaggttcccctcctctcggaaccccacgcgactgcacatctgagaattcctccagaatccccagtaaccccaggcaggcacaggacttgtcaagggcatggaccatggggtttaagttgcttttatctaatacttaaaaggcaggacttccctggtagttcagtggttaagaatccacctgccaatgcagggggacatgggtttgatccccagtctgggaagatcctacttgctgtgggacaactacgcctgtgtgctgcaacttctgaagcctttatgccctagagcccgtgctccccaacaagagaagccaccacagcgagaagcctgctcactgcaactacagtgtagtcaccactcgctgcaactagagtagcctaagctcgcatgcagcaacgaagactcaacgcatccaaaaattaattaataaacgaaaaagaaaaacagcaggccctcagaagatatccaggtcgtatctgcctatggccattcattctgggcacctcctcggtgccaggtccatgccagggcctgccaaggacacaggcctgcatctcaggggccccaatattaagggacaggtctgtatatatggtcaaccagaaccagggacttggagggatggggtggttaattgggcctgttaacccaggtcaaaaaataaggcccagtgatctggggtccaggcctccccacgcacccggcattataccttctcggccaaggtgctgaaattctggcctgactcctgtaccacgtagccgagcttgaagactggacacagagggtgcagggtcttgtgaaagaggcaggtcttcatgtagcgggcatccacctcctccaccaggttgcgcctgcg

SEQ ID NO: 35747 - DNA, 1058 bp, Bovine  19866881287737
  misc_feature (1)..(1): n is a, c, g, or t
ncctccccaagtcccacccccatgtctgctccttctcaccaggtcttggatgacccagctgaggacaatctctatttgggtgagtgacccagctcatccccaaagtagcttacccgggtgggtccaaaggctccccagggacacacttgaccttcagatgggccttgtgaaatgcactgacctcctggggacagggaggaaagacatgttctcaagccccagattctctccccagccctactgagccagactcaggatatccaattagagtcaactagtattcccaaacccccacgccactgatcggagagacagtggatcaggcagatgcaagaagtaggccatgtgatgtgggttcccaggccctgtctgataactctgtgcctcagtttcctcacctgtaaaatgggggtagtaatggtatctacatcatagggttgatgtgagaagtaaatgagttattacgtgcaagacacattagctattattgttagtaatagtaatactgatgctgttacttaagtccctggtgcctgattcagggttgggcttagaggctttcagggaatgggccagaagcaacagaggcttaggaattagaggccaaggctttagcctccactccctctcatacctgccccttctctgagactcagtttccctgttaaaggggttcttgatgatgctcctcactcggcacctaaagttccagtgaggcaagttcacagtagacccattctcagccatttatcttctctgataccctgggacccctctcctgtctctccctggatgcctggatgcctgccccctctcccaccctccagaaggggcagagatcttggcatcagctgtgttttcagcctggctgcaacttacctactcttcttttcttctcttttctttcagtgtttgacctcctgagaaaggggtgagttccccatcgcgttcaggcaggacaggtcttcctttccctccccgtatccctaatcctagggtcagctactctagtgaaagaaagaggcccgggctctgtccttaggggagctgtggtctgg

SEQ ID NO: 35748 - DNA, 1417 bp, Bovine  19866881296878
  misc_feature (1)..(1): n is a, c, g, or t
ncttgtgggcattgatgtgcctgctcccaacctttatcttcaagtcactgaggaagaaaaatacccacaggtataaaaagaaaaaatatcattataactaggtatagctggaattcacagccaatcagtatgtgagtactgactgaccaacatacttctgtgaaagaaaaaaaaaaaatcacagcaaaagtatatctctatgctagcactgatgggtcatatttataatgcattgctagacatgtttcctatttctaacttctagcttttagttcacatgggatgctctgctttcaaagacattccctaacatcacccccatgatggtgcagcctacaagttacaaaggatgactaatattcatataaagagtagaagaggttttatgtagcaaaaatcaagataaatcatcagggagaaatagactgaaagactaaagactgtgataagagctctcagcctaccatgctatgatgctccacaccgtattaatgcttaagcaaggttaatccaagaactataaataaattactttgataaaacaatcaagaatatgaaatatgaaacccaatatctggactcctgttctcatcagaaacactcagacctactattggccattttttaactcaaccatttataaagaaaaggggtgaggtatcttttcttcaaacatgtttccatatatatgacataccattatatgaaaagagctttccaaatagttattcatacttaactctgaaatgtcagatatcaaggtaggacagcatctgggcagttaacaaacacctaaggatgacccactaggctggcagaagcatgtgccatatggctaactggcagcaacccacagtcacacatcgtcatctccttgcttgtatttgtggggctttttacttgcatatttcccttgaaaataacttgttaggtcggaaagcctttagaaactaaatacttaaaaactattatgtacaagaaaaggaagaagaaaaaaaattttacatggattaactcatgcacttaaaaggagacaaacaagaatacggtttcaatacgatgcttgatgcagacacatttcgccccacaaaagcaatctctagaacatacattataattatgtgagcatatcaacaattccagttctattaaagaactaaccaagctgcaacgaattatcttagattaaaagaacagggtatttattaatactgttaacacagaacattattcacaaagaacagaattgacattctatttaaagcagaacgtaaaactgtctcatatcatatcctgtgataaagttaaaaaaatataatgaaaacaaagcacgaataacttttaaactctgaatgtatttacaaagtattacattctaagaacataaagaacagtcactgcttactatttctactat

SEQ ID NO: 35749 - DNA, 1429 bp, Bovine  19866881316891
  misc_feature (1)..(1): n is a, c, g, or t
naatggacatgaatctgagcaaactccaggagacggtgaaggacagggaagcctggcgtgctgcagcccatggggtcaaaaagagtcagatacgacttagcgactggacagcaacaacaggtcaaaggaactaaaatctaatagagggatttcataacacccccacccccacccagccctctttctctgtccccgcccccactgaagccaacaaagagtgaccagagcactggaaagatcagctaggctgcctgttacctgattcggcagctagggttgtggagttgatttcaaaacacaaacacacattcacgctgctgctgaagccaatgggcagcgccttgggagtgaagttcatggacaccttcagatgaaccacaggtcttgagctaaagtgaaagtgaaagtgaagtcgtgtccgacccttagcaaccccatggactgcagcctaccaggcttctgcgtccatgggattttccaggcaagagtactggtcttgagctaagtaagacagcaaaggggcatatgagaagtgaccacaggacttctggattagtgtctggctctctcattcattcagtgaatatttactgaacatctctcatatgccaagtgctccttctgagtcctcagaatatagcagagaaagagacaagccttgctctagtgggaaaacagacaactatcaaataaacatgaaaaaacaggaaaatcctctgtgccggaaaaggtatgttaaaaataaaataggataaggtaatagagactaggggctactgtgaagtaggtgcattgttattcacatttatagatgagaaaactggaacttagagattctgcccaaggacacacttaagttcaagcttagattcaaacccagttcaacagaaccaatgctcttaaacagggcactccctccctcccatcagtgcctggtgtcctcttggggtcatttagggtagggcaagggggtgaagctgctcagaaggcagggcagagccctacccggagtacagccgcccggcccagcgcacccacggtgatgtcagcaaggccatcgccgttgaaatctaagccaccggccaccgaggtgccgaagtactggagtcctggggccaccgccgaggctctgatcctctgtgggggagaaacacaggatgtcggagagggaaggggtttcctttcagttctattcagtcaacagattggtccactccagggacactgaggcactggaaagaaaaagtaaggttctcccaggggaaatggcattggaacagaggcttgaagggggtggggcttgaccgagaaggtaaggagaacagggggtggggaaacagtcaggggtcagtgcagtgggaaaggggagactgggtgccggaggcctgatgtggggccggggtgttctacagaatacacttcagaaccc

SEQ ID NO: 35750 - DNA, 1232 bp, Bovine  19866881336311
  misc_feature (1)..(1): n is a, c, g, or t
ngccggtcatggaagtaccctgcgacaagcccttccccgaggagcaagctcgcctctacctgagggacatcattcctgggccttgagtactgtgagtgaggggctgcctgccccccctgggctggggacccgagaaggggacacgagaagggttggaacccaggctgagccggctctgagccgtacctgtcagtcagtgtcgatctgccaatcatctttagctgggggcgggtcaatgggcctgtgggtggggccgaaaacctcctgaacaggtagggtagcggcagatttcactgggcatgcgccaagtcctcctgggagcctgcttattaccgcataggtggatgttcttcctgtatctcaagcttagcctctcacagggcatcaggagctgtgagaaggagtttgtgtccagctggtcgaggaagagtcagtcctggcatggaatcggtgggtggcagcagagtgggtttattgtgaggccccctaaggtgatggagagctcagcctccaggttgagcatcacctccgggctcagcatcacctcctctccaggtgatgttagcttagcctctgtctcgaattcatttattcattcatttgtccatttatgggtacctagtaagtgccagttgggggcatgtagatgtcaaagacccagaagagatctccaggatctcacagcctagtgggagagacaggaacctaagcagtgcttgccaaggctggggaggcacaggagctgtcagagaactaagggaccaagggaggcttcctagaggagaccacttataagcagggttctgaagggtgaataggagttcactggccagtttgaggcatggtgggagggtgtaccatatggcagcagcatagaggggagtaggcatgtactgtctgagaagggagagttcagtttgtttgactctaaccagggagccggggatggggaaagatgatggaagcaactgtccaggccacaccttgagggctgggaatgtctctgcaaaggactttcatgatttcatcctgtcagccttgtgagacccagagggcttcgagcaggggagaggagtgatcggatttgtgtcttagaaagctctgtctggcagctgtgtggcggctggatggagggcaagaggtggccaactggttagggaggaggctggttttgcagcccaagtgacagatggtgagtcctggattagggctgcggcagtgggaagcagatg

SEQ ID NO: 35751 - DNA, 805 bp, Bovine  19866881414244
  misc_feature (1)..(1): n is a, c, g, or t
naagagctggggaggaaatcctcttacagcacgagcccagatgcacacacagagcatctcaactcttctcggcctcacaaatctcccactgaatgggacccagtcagagcagccacgatccgctcacagagccgccaccattcgctcacagagccctcctttccagtcttcactgcccccaagaataattctaaatgcaacctcctaagatttgctttgtgcctctgcagttatccaaaggtgagatttaacggtttcacaagaagccattcgggtttctagggtcaccattcacatcaggaggctgcccaggtctccatcaaggagcaggctgcatgcccagctcagagcatttcctgtcacagcccggcccctgtaagagccaacctccaggacggggaacagacccaatggtgcgtgctgccctgccaccccagaaggaagggaatgcttgaggcccttggcaccgcacacagggaacgcctgggaattaccgttatttccattctcatccacagcagcaaagtccactccattctccaagaggactgagcagatggtgggaaggtcctgctgggcagcaaggtggagggcggtctggcggtgcttggttaattcattcactttggcacctgcaagaagctggatgacgttgattacatgagcagctgctctaccaccaccaaccaaggtctggcataagggggcaagcctgccaatctcctgcccgccagggtttgccctcctggctaagcggggagctaactcctggggagcctcaggaccacaaaatctgtcccaaggg

SEQ ID NO: 35752 - DNA, 1340 bp, Bovine  19866881417793
  misc_feature (1)..(1): n is a, c, g, or t
ncaaagacgactaaactaacactcaatgcaaacagtattcgctcctctctacattagaaatcacttgtggctcacttgttagagagtgccttgaaaaattctgccagtttataagctcttgaagagcaggagtgtgccttactcatcatcatttccacagctcctagtggtgccttgaacacagtggacattcaggtaaatttgttgaatgaatgaatgtgttaatgaatgcctttcacagatatcatactttatgtatgtagcctattcaaagaagtgcatttcttatttctctatagctttatataccttatactttgatagtttaacgttcttagtaaacagccttagaattgaaattttaacattgaaacagtccatgggattgcagggttggacacaactgagcgactcagtacagcgcagcacagatactgtatacaaaaaactattaacttgagcatagagttaaatactgtatgcttttaagtaatatagaaatactcctagaaactaatagcacaggctcactattttaaattttttcacgtttgaattaatgctaaagtattaaagtcaatcagcagcagttgtgatatctgtagattttaaaatgctcttatgacgatgaaatgtgaatgagaaatgagggctgattgtaaaggtgacattatgaataaatcaagaaactctgaatggtcctttgtccactgagagtcacccacacaaagcatcacaaagcttcgcgctccggtacgcccacttgttctgcgctgaccccaggaagccaggagcctccttcagacctctcacacgcccccccagaagctcatgttctttcccaacttggaaggcatgtccttcccagctgtcccttctactctgaaagaactcatttgtccttcttcctgaccaatgtataagaaagtctctgggctccagccgtgtaggtggtaaagacagagctgagggcagtggacgctagtagaaatgtgacccaaatccgtctctggttcacaaatgcattcttttaagacattccctcctgtcctaaatgcccaaatcccccactctcaagatccttcttaaaggtccttggtctaattttacacctccctccctctccaatccttgcaagagcctctcctcccctctctcttaggccatggcagccaagtaaagaacattttatcccatgatttggaccccaaggaaacccatgtttacagtttcaaatatatttacaaaatcatactaatattgtcattatctgtaacatgtatatgtctatatatataatttcattcttgcaaaacaaatcccattagccaatttcattc

SEQ ID NO: 35753 - DNA, 1107 bp, Bovine  19866881455392
  misc_feature (1)..(1): n is a, c, g, or t
ntcagtttttttattattttgaataatgcttcgattttatttactggttcacatgctttttgtggacttatgctgtgtttctgtggacatattttcagaaatgggtatactcagtcagaggatatgaacatttttaattggatagaaactgtcaaaccacctccaaggaattcttctcaagtaaactccttccaaaattaaacgagagtggtcatttctttttgatattctcaatgctgactattttgccttcagaatatttgttgttattgttcaatcactcagttgtgtccgactctgcgaccccaaggacttacagtccatgggattctccaggtcagaatactggagtgggtagcctttcccttctccaggggatcttcccaacccagggatcgaacccaggtctccaacccaggtctcccacattgcaggcggattctttaccagctgagccacaagggaagcccctcagaatatttatctctttaaataactagttctttcccaaagtttctagaaaaggagtctgtagggatgtggactacattgcaaggcatctttaaaaaaccacttaaaaaaccttaaaccttctctgtttctctgatttcttctccacccacagggttgctgctggtcactctcccctgccccctgccctctccacaagattcatttcctcctcagctgcttgttccccttccattttcccaaaatttagaagtagactctattttagacattcaggcaatacagaaatgaatttggcttattgctctatccctatccccttgaataaacatcttgtcccgttggcttcagatctaatttttaatgtaacaagaaataagacattgcgggattaaacgttgctcggattttggaaagctataaaaaggagggggacgggagagtggagttctgtaatcattattattgagatgccagtgagtccagacctgccctcacacctcttgggggtgcagccctccatcggagccccctttttagggcgcccttgacttctttgttgcgcaggctgtagatgaaagggttcagggtcggggtaaccaccgcatagaccacgcggccaggcggtcgtagcgg

SEQ ID NO: 35754 - DNA, 934 bp, Bovine  19866881471226
  misc_feature (1)..(1): n is a, c, g, or t
natcatcactccagaacccacaaagcagcagggccacacagttgcctgccattccccaaatatggcctggcctcccagcctctgagcctttgtacactgctcccccacatctgccctgtaatgccttctccccagagtcctcatgccaacccccaccctaccacagttggtaacatctctaccttccagccttcctaacctccccccatccccaaataaaagtcacctgtcttctgaacatgggtctgaccccaacatcaggcccttttcacagtctatcttacagtcttgatatctgtgtccatctcaaattcctaccagactatgacctcaaagagggcagactccctcatccctattagctccccccagggccccacaggttgaaggtgttcagaatacacctgctgattcatcacctggatggatgaatggatcaactgacaaacagatggaaagacagttggatgaaggactgaaggacaataagtgggtgtctgaatggatggatgagcagttgggtggatgagagatggcaggtgattgggtggatggatggaggggaggggaagacaggagggacactgagtggctgggagtgtagataaatggcagagagatggacagatggatggagggatggatacatgaagtaggtaggataagcctgcttatttatgtaaatctaaaattaaacaggaaacgggtcccacagtcccccagcagcagtagcagacagagcttgctgccccccgcctgcctcgcaggccagaccaggagggttcagtgacccactcacctctttcacagaaatgaacatggcccagatgagcacaaacatccttcctaagagctgcagccaccccatcttgtgcgtgagggccaaggggtgggcagggcctacggaggaagggagaggaaggataggtgcggg

SEQ ID NO: 35755 - DNA, 915 bp, Bovine  19866881552909
  misc_feature (1)..(1): n is a, c, g, or t
ntgcttcactgcaccgtaggggttacacagctagagggaggaccattcaagcagcctgctggtccagacctgtgaccctctgctgctgctcaggccaagggcgtggtcattcagaaagtgggtatgaagagtccctggggctgaagggggcctgaaaggcagatcttactgggaggagtgggcctcacctctctttgcttcccttagaatcgccatgacatgctcttggtggagccgctgaaccgcctcctgcaggacaagtgggacagatttgtcaagcgcatcttctacttcaacttcttcgtctactgcttgtatatgatcatcttcaccacggtcgcctactacagacctgcgggaggccgggtgcgcctgaggcttgggcctcaagggggaagagggcaggggatgggcgttcctagaagaccccaagaccctggacccaggcggggcccaggagacatggaagggtcgcctggagatcttacattcctgttctcagtcttccttctcctggttgtcctgcacctgcttcgtgttctcagccccttcttcggcctcctggttctgagaggctgagcctgtggtcgctgaggtacctgattgtaggggcgggggtggggggggactaatgttggaaaggatgcaggaattagggggctggaagcagctctctgctatgctgggtgtcttcagggtcgtgggtggtgcaagccctgagcacattgccaactctctcttctgcccgcttttgttcactcattcacacatgattcattccctggacacagactttgagtactgcaaggccctggaccatgcatcagatcaacctaagatcagatttttcctgctatcagaagccataggctacctcaagtttcttaactgagtccttcattcaatatcccagca

SEQ ID NO: 35756 - DNA, 783 bp, Bovine  19866881702328
  misc_feature (1)..(1): n is a, c, g, or t
nccccagcaatgtcactggctatgtgacactgctggaaaatgccaacatcagtcagctctgtgagtcaaccaagaggcatcttgcccttctaactaagaggactggaggggaggaagaaaggtcctgttttttggcaggaagatctctgaagtagaaagcctgtttgtttttcttggagatctgatttgcgtctcattgtgcacataaaagtggttgttacttcacctattcggtgttttgaaaagttatagaaaagcagtaaaatctttttaaattaaaaaattttttttcttattagaaaattagaaatattgacacaaacaaaaaattattcaaagtcccactactcggggattgtaactgtgaattcattggtatggatccttccagtccttttcttattttgtgtatgtatataaatacacacacagacaatatatatatatttttaagaatacttaaaaataggtttgcatatatatatgtatatctttatgtatctttttacaaaagtggtgatatttcattcatgctcttttgtaactttgtaacgtgttgtctcaccatacattcatgcacacctttacttagtgttgttaagactgtgccttaattttaagaagctttttcttcttaaatttcagttgtttccatttttatactattacaaccttgcttcacacatagcattttggaaataatcacgattctgtgatttctttccaggcttatttcattcagggagccggaatgcttcatgttttgtctcatttctcctaatg

SEQ ID NO: 35757 - DNA, 1340 bp, Bovine  19866881724104
  misc_feature (1)..(1): n is a, c, g, or t
ncatttgcattactgtcatattgtacaatttatagaattatcaagtagcttagagacaatgaaaggtggcgagaactcaaaagagtgggttaaataaacactttggggaggcttcccaggtggctcagtggtaaaggatctgcctgccaatgcaggagacgagggttcaatctctgggtcgggaagatcccctggaggaggacatggccatccattccagtattcttgccaggagaatcccatgcacagaggagcctggtgggctatagtccatgggatcgtagagagtcagacatgactgaggacacatgcaaacacacacattcttttcttgcccattttgaagactcacaatctttcctgacagtatttgagaaactaattcctctctcaggctttaagtctgcttgcctctaacagcccagccaaacatcagtcgtggttttaggaatggttcagaaagatgattaactgtctagtcttttgtctctttgaattaaagtcacaatctttatcaactttttatttcttttttttttttgtgtgtgtgtgtaataaagttttattaaagtataaaggagatagagaaagcttctgacataggcatcagaagggggcagaaagagtaccccaactttttatttctttattgttgcctcagagcagggttgcctgtatagttgaaaaggttatgctctgacgaagttatacctggcccattatctgttacctggtggttgatcagcggggttgcatctgcctggagaggaattctttttctaatttttatgagaggaccagatgggctagatgcctctgcctcaaagggtatgccttggttttgttggtctgagttcttagggttattacagatgtatcagtcatcctaatgttaatttttattttttgtaggttttcttacagagactggaaaaaccagagcaagtactattttttctacaggaactgaatctgccttccaagttactcagatcagaattatggtaattcttctgctgccttctttcagaaatgttactactagttttaaaaatagggttgcattgcagaagtccatgtcactggcttttcattgattttagtgatttttctgtgtcaggcctgtagcagacacaggggcaaaaagatgaatatattttaagtctgtgaatggtgtgagtataaggatcaaaaacggtgaggaatcctttcttgggaagcaactttcttacttttccaggatttcatgtatttgagatctctctctgttggtttcatttttgctttaagctcttgaatcgaccacatactgggaacagaaggccacacaattccggccc

SEQ ID NO: 35758 - DNA, 983 bp, Bovine  19866881970217
  misc_feature (1)..(1): n is a, c, g, or t
nctacacttggttaccgtttggggtcgagatgtcctacgtcccgggccagccggtcaccgccgtggtggtgagtgcgctcgcgcgggctcctcctcgtcttggctagcccccactttgcagataggtaaactgacaccccaaacaggttgacacagcgtcgagcggggctcttgcaaacttggagccagagctccgattcccgctctgcctgagccgggccgcggtcttccccatccatgcaacagaagagtctgggacccagaaacctcctgaagagccaggatccaggccagaccccgcgtattaccgccgccgctttggacttctctcagccagccgggagcagcgaagattgaggagaaaggctccggctgtgggagtctgggaaagcgcccctttcctggatctgtgtccccagctgggcagccgcgaggggcgggcgccggccccgacgtctatgagtcgcagcctctggaatgaggaagtgcttcctccgctctagccggcgccgccgcccagagggaggcttgcggggtggaaggtggccggggccagcgtagcagccagaccctcacccctcctgtgcagcctttccgtctcggacccaccgccgcccgggccagggtgaaggttcatgcaacgggctcgatcctgatcgaactttccatggattcccagcccttggggcaaagtccaggccccctagctggactttggggccctgaggagaccttttggggtccgctcaggccctactctcctcccttgggtcgtctcgggtgccaagtactattagaataggtaaaggcagacggggacattagagccagatgttaatgccacagctggatgggacctgcaggccccattctgtggctgaggtggggaaacagacctagagagaagtctgctgctgctgctgctaagtcgcttcagtcgtgtccgattctgtgtgaccccgtagacggcagcccaccaggct

SEQ ID NO: 35759 - DNA, 1380 bp, Bovine  19866882015047
  misc_feature (1)..(1): n is a, c, g, or t
nccgaggagacccagggtgaggtggtaggtttcattcaggtggcctgcgtttgagatgacgacctggaacatgagcgggagcacatgctccaggtctatcagggggactgtgggatcctgttaagagaggagaaaaatttgttcaataagacatctaggtaaccacaccaactaaacactccattgtcttcatgtattatttaccactggcctggtgccaggggaattatgcagtgtctttcacaaatggcttaggtacaattgactgtaaaataaacattctcaggcatcatcttacaatcttactttcaattcatattcttaccccagggatatacagatgattgcaattaacatttcagtatatggctttccaaaaattttttctatgcataacactaccctctcatgcactctttctctctttttatttactttctctctctcttttttaaatgccattttgtctcttaccgagtttaagggaggtaacatggctgctagtaatcccaaaatcctcttctgggaacactccgcaaacacctgctcagggcttggaataactgccttttcctcaatgggcttctgagaggacgcttctgaattttcagcatctgagttgtaaaatagcaagctatcagattttgccaggttccatgcatgtatgaagacgcaggtagatcactgtactgccccgtgccactacagcatcgatactttaaaaacctattactgaacacgtcttactcaaggaagcctgttccgatcaccctgttttaatgttgagcctgacctcccatctccccaaacccctctgccctctccattccctgctcttttgtgctcatggcatctaattaccttttaacacaccatatcctttttttacttgttggttattgtttgacttcccttctagattccccccctccccagtaatgtatcacaaacacctagaaatgtttctggagcatagcagcaactcaataaatccctgatggctaaagcaactgtacgtgactaggatgctgatcctcagatgggatcagacaagagtgagttttgatgatctggattgacatggagtatcagaccgcttcctgaacttagaatcatgatctgcagagatgagcatcagccccttctgggacagggcaggacgctgggtgctcagccctgcctcggtcacagaatgggcaccagggaaggaggctgcctccccaagctgccctaaggaggaggctgatgtttgctgccagtctcctcggtccacagcacctccatctcctggctcttcaatcgtcctgcagtacagctctgaccttgccgccgttccgagcaggcagcccagggcctccattgcaggggtgaagcacccct

SEQ ID NO: 35760 - DNA, 2397 bp, Bovine  19866880186564
  misc_feature (1)..(1): n is a, c, g, or t
ngtgtccgactctgtgcgaccccatagacggcagcccaccaggctcccctgtccctgaaattctccggcaagaacactggagtgggttgccatttccttctccaatgcatgcaagtgaaaagcgaaagtgaagttgctcagtcatgtctgactcttaatgaccccatggactgcagcctaccaggctcctccaacaatgggattttccaggcgagactactggagtggggtgccattgccttctccagtatctgcttaatagatacttattcaatggatgaatgaaattatatacagaggcaatcaggtatgagtggcatacctggaggtataaaatttggggggtataaattactgggagatgtccagcatgcaaagaaaaacaagacagagataaacgggctaagtttcagtttcatccttaaagcagagccaccaaaggctctgagtaggaaagccactcggtttggtttgcattttggaaacaacactccccatggtcatgatccaggtgaagcccgcaagcaactggacactggaggcatttaaaacatgttttcaaaagggctactgagtgcccagcataatataaccttttacatatttgagaaatctccaagctggggcaagcaccagccaggatcagcatcagcctctggacacatcctctgagcagtgatgggtcgccctggtgggacaccccagagccactttttcaagggaatcggtacccactggttgttcaccggcttctccccctgtatcagcagttctgacctgtgggagcctgggtgggagggaggcacccacccagattcaggaagctgaggagtggattcttcggccagggcagatcccttcaaggagaattttcctccttttgctctccataaactccgtgccattggagggcctgggctcaggcttgcggctggagattgggtatgtgaggggcttttaggcatggcagttctctccaccctccaccctgagtggggctgcggttactactgcttttccagggcagcccagggactcttgctgtttgcagccctctgccctcaggctacccgcaaagctttaccctgtctggccagcaggccaccaggcagcgtagatgaaaggtactgttcacacttacggtgactggaatgctctgtctgtaaactgggcgatgtagagaccagctcataagcacctcagtctgttggtggatggtgggtccctggtgtcaaccctttcattggcttccctccaggcacaggcttcttctgacacagtcccaggacagcctggctgggagtgtccaggcccagtgctcaaggatgcctgaacacaggttcttccctttctggccaaagcctacatcctgcacccaccctcatcctatcctctcttctagaaccatccaccacctgggaacctcctagtactaccccagccctcacctcattcctctgactaaattctgagtcatgcacagcttgtacccttctactttcatccctcaatcattcatgcactatttgtcaagacttgccctaaacctttgcaagaatttgatcatgtaaatctcaagatctatcagaacttagtggctgacttggatttgtatctctggggccagagggagtcacacgcactcctggctgcaaggagagctaggaggagctctgagatttggcttcccagtttccatttgggaggtggcaatgaggtgggaggggaagaaggtggggaaggctttaaagaagtcgatcagctctgtttgctccactgttagccccgtcatccccatttggcagattcaaaaactgagttgcatggaagagaagtaactttctccagatcatccagctaaagagtgatggagacatgattagaattccagcctgacagctcctgagtctgctcttgtatccacccatcttctgtggggccctcatagtgatggagaagtaggggcattcatgataggaggtgcaatggttccagtagaggcctgttgtcttggggagggagtggagtcaaggacaactctggaatttctgcctgaaatggggcatgttggaaatgtaaatgatactgtcaaatttttgaaggacttccatggaccactctcttcaatgtcttggttgtaattctgataacaagtgggcatacctgcctttgcaagatgaaaaaaatcgtagctcactgagattatgtgacttgtccaaagtcacatggatggtaaataaaggtgacagctggatgtgacctgggtctgcgtggcctcaaagtcaagtcgatgaccacgtttctccacgctgccttcttacgaggaaaaacgggaatgcgaggcccggccggcttctgtgaatcgcgagttgttggattcctgtccttcttcgaccc

SEQ ID NO: 35761 - DNA, 2537 bp, Bovine  19866880457676
  misc_feature (1)..(1): n is a, c, g, or t
nctgaagaaggctttcttatctctccttgctattctttggaactcagcattcagatgcttaaatctttccttttctcctttgcttttcgcttctcttcttctcacagctatttgtaaggcctcctcagacagtcattttgcctttttgcatttcttttccatggggatggtcttgatccctgtctcctgtacaatgtcacgaacttctgtccatagttcatcaggtactttgtctatcagatctagtcccttaaatctatttctcactttctctatataaacataagggatttgatttaggtaatatctgaatggctagcacattataaatcattagtagaaacaggcagtccttgccattaattaagagctgcatgttgagaaaaagataaaataacaatgagttttatttttttatattgatagtttagaatttgtcatatcagtttcctattatatgtgttcagttcagttcagtcactcagtcgtgcctggctctttgcaaccccatggactgcagcacactaggcctccatgtctatcaccaactctcggagcttgctcaagctcatgtccgtcgagtcggtgatgccatccaaccatctcatcctctgttgtctccttctcctcctgccttcaatctttcctagcatcagggtcttttccagtgagtcagctctttgcaccaggtggccaaagttggagtttcagcttcagcatcagtccttccaatgaatatccaggactgatttcctttaggattgactggttgaatctccttgcagtccaaggggactttcaagaatcttctcccaacaccacaattcaagagcatcaattcttcagtgctcagctttctttatggtccactcttagattcatacatgactactggaaaaaaccatagctttgaccaaatggacctttgttggtaaagtaatgtcttttttttttttaatatgctgcctaggtcggtcataacttttcttccaaggagcaaatgtcttttaatttcatggctgcagtcaccatctgcagtgactttggagcccaagaaaataaagcctgccactgtttccattgttttccccatctacttgccattaagtgatgggaccagatgccatgatcttcatttcctgaatgctgagttttaagccagctttttcactctcctttctcactttcatcaagagactttttagttcttcttcactttctgccacaagggtggtatcatctgcatatctgaggttattgatatttctccccgcaatcttgactccagcttatgcttcatccagtctggcatttctgtagtcgcatactttgaatctgcccaggtattagatctatacattaataaaactggatatgagtgtttctgttggaaaatttcactgaatcattgcaaactattcatgatcctctatgtatttggctgtctggcttgtctaatcaataaagacacctaaagagtaggcagatctccttacatgtattatatgaagcattaaatgtcttactctgattaattttaaattgtaatattttctttactccaaaaactatctatgaaatatatcaggaacttttcttttctccatacatgtttcaagcaaatgctggctttttaacttaaaatgttaatataggaatgtttgcacatcacttctatcatctttgatttaaattaagtggaatatatcatagggaaagagaggaagagccttaaatattactagtctctaaacttcatgaggacagagaccttccccttcttgattgcactatatcactaaaacaccccaaaagaatagtgttttaagaaaaaaaaacacttaaattgagccaagtggaatcaaaggccctattttctggaaatgaagcaaggacattcattctaaggacattgctgctcagaagggaagaaatccaagttttgtgatattgatatgaagatagtttccatggagtgcaaactcaagcaaagaacaaataactctctcctccatagggagcttttgtgctttccctaacaaagtgttgccttggacttcagagaggacatattagttctactcaagggactggaaactgtccttaggggaaatgaaagttaacttgaagtactgatctcattgattctcttttcaaatgagttgagaaatggtcaccatgacctgccttgagtggatctgcccactggccctatgccttaggccacaaagactctaaaaatagccaaggcactgtaaacagcctgttctttaatactacttctaataataataatagcaaaataataaaatgaaacataagaattataataagagcttccaataggggccctcattacatgccaagcactacttgaagcatttgacaatactctgaacaactgacaattctctgaacaactcctgtgatgtattattgttttacaaattttatatttcacaaatgtgacaacccaggcttgaacttgtccaaagttaagaagtaaaaacaaaatgaaatgtttgttgaattgatgg

SEQ ID NO: 35762 - DNA, 1707 bp, Bovine  19866880461465
  misc_feature (1)..(1): n is a, c, g, or t
nttttgcatttcacgtattatccaaatccagtaagtcccctacatacaaaccttcaagttccaaactttcaaagacgcaaacatgcacgccagcgcctgtatgccagctgctgtactgtcgtacggcacttttcaaggtactgactgtaagatcaaacaggttttctttgttttttgtctttctttttatgtttgcatcatacgtgtgacaagtatgatagacctattacagtacagtactatatagcccattatgttagctgggtacccaggctaagctaactttgttggacttatgaacaaacagagcttatgaacttgctcttggaatggagttcattcatatgtagggaacttactataacttaccatatccagcaaggcccccttgccagggcatgtcctgataacttccaggccctaaccacaccacgctgcttccatatcctcaaacacaccaagttatttctcactttgggatcttaattcccatattcacccattcctctaatctagcttcacgccaacctgattaagaaatggacagaagacctgaatagacatttcttactttgggatcttaattcccatattcacccattcctctaatctaacttcactccaacctgattaaaaaatggacagaagacctgaatagacatttttccaaaggaaacacaccacatgaaaagatgctcaacatcactaatagttggagaaatgcaatccaaatccactatgagatatcacccaacagctgtcagaatggctataatcgtaaaggctacaaacaacaaatgcaggcaaagatgtggagaaaagataaacattgtactctattgttgggaatgtaaattaatgcagccactctaatctaattccatcctataggcttgttagtatctacccatcctccatcatgaatagcactcaaaaagtctttctctgactcctggattaaatagcccccaagttacactgtctctgaggaggctctgtgtttccttatgactctctattacagtttggtactctgtgtttttatgtatgtgatgccttatttgaagtctgtctcctgaatcagattacaatgcccacaaaagcagagattatatatatatttttgttattgttgttcacaactgtatccccagtacttagttgcaaatgcatataaatatttaatatcatgaaatatttgttaaatgttgaataaacaaagctgtatctttaaccacttctaataaaaatcaatggtgttttcatggtaacaatgtttcattactttttcagagttaaacctcaaaaatactgggaaaacaggatatctccaaattgaattttctagacctttggaatcaagggattttagagttgaagggaaataaaaagtcttctcatccaatttccaacctggaatgagagtttttaacttttctaatcttacaatccttcatttataaaatatattagtatctttcagtgatgaaatggtggaactaaagggttttttttttaactacttcccaattgactgctattttattactgttcataatgcaaataatatttataaatgcatttcaattctctggtttatgcagggaatctatgtgatagggaaaaggtttgtccagatttcatgttactatcagcatcattatcataagcaaacttttactgatcaggggcctatataatatgaag

SEQ ID NO: 35763 - DNA, 965 bp, Bovine  19866880501181
  misc_feature (1)..(1): n is a, c, g, or t
ncgcccagccctgggtctatcccctggaggcagcatggagcagtagggagagtccaagctctggagtcagggtaccagccaggcctgctcacttgggaaactctgtctgcatctcattacagcacagccctgtagctgagcgatcaacaggcagactgcacatacgagccaggggacccagacacccccgggtctcagtgtctctgtctgtgaaatgggcataatattaatagcaacagcatgcctttgcagggttcctgggagttaagccaggtatctggcatacagtagcacctaataaaggtgtgacactttctattgttagtattcacctggctgagcaggtattcccatcagtgaaaaggagattaaaagcacacctgccatgggagattattaagaggattaaatgagcagatgctcataaagggcttagcagtctctgacacttaataagtgttcaacaaatgagagctctgatgattcaagtaggaggagaggtccacgtcccacggacgaagtttttccaggaacccgggctgtgggaggaggggctgtactcagcctgaacagggagagtctctccagccagtgactaaggctcgggggcaggatccagctgctcggcaggcggggcggagttgggccgatgcctcggctggcccacgttcagggtgatgcgtttttaccgtaaggcccggggaactccagagccagcgccggcctccgggtccctggggcctgacactcagcggccagcaatgagcgatgcttcgtaaaagaggctgaaactccacagccctcaacactgcaaatggtgagaaagatgaggatggagctggcgaggagaggacagactcgcgggtgtctgtccattcagactggcattcaataaatgccaccctctgtttgtttaaccatctgaggtgctacgatagcacggcaggtctgggtgccaggctgag

SEQ ID NO: 35764 - DNA, 1332 bp, Bovine  19866880594163
  misc_feature (1)..(1): n is a, c, g, or t
ntcaccaagccaagcacttggtgtcttttttcttttttttgcaaatttgtgaaatgacaaaaagatttctcaggctgtggggaacagattgtccctctggcccaagtagaaggggggtgagacactgactgctgagtaagaaacatgcctaaagtacacagacatgatattttcatttcaacttcagcggtttgaataggatgactgaggctttttatagaattattgttttggccttgtaaattggcaaatctgttttcaatcaagtgggatcattgtctcttggagtgcaatatttcaaaaggaaaaaatggtacagtagatttagatgtgggcatctcagcatccttctctccacggagacttagtaagttgctgtattggaataggcgtgtgattcatctaaagataacagacatgtgtcttgtaatctgtctgggaaactgacttctgatattttagaatacagaaaagagcagcagattgtattcatgtcctggctacttgacataagcaccattatgtaatagaaagcaagataagtagcataatctcacattagcaacattatcatttttaccaaagctgttcttcagctttgggcaaacagttgtggtctaaaaaggaacttccagatttgatatcccaatgacttgttcatttgcttatttgttactttctgtttcttacttcacctaatgctgcctgatagcattttccaggtctggcctcccactggacaactggtgagggttgggtaggtcttgtacatcttgctatctcaccctgtgcctgatgctcgagcttcccaggtggctcaatggtaaagaatccacctgccaatgcaggagatgcaggagactcgggtttgattcctgtgtgtggaagatcccctggaggaggaaatggcaacccactccagcattctagcctgggaaatcccattgacagaggagcctaatgagctacagtccatgggattacaaagaggtagaagtgactgagcgactgaacacgctgcttattttgcaaacagtaactacgtttaaagatatttttttcccaaagtgattttgacaccccaaacaaccttgtgtgttatgtaaggcaagaaataatgtctcttaattaactgagacctaaagagataacagaccttgtctgagggtcagcccctccaccactgtctcctttgcaggtgaacaagtcacaaatgcatttattccacctaaagtcttcttcttcacctgagtattctcagataattctgacattccatttagggagcttcctgtgctaaaataatatatgagaccttggcatattctatat

SEQ ID NO: 35765 - DNA, 2195 bp, Bovine  19866880657893
  misc_feature (1)..(1): n is a, c, g, or t
nacgaaatgagtgatgtctcagaagctatctgttatgcagtacagtatattctagaaaacacagatgactttggcccatgactcacccctgaactgggagctcaaggctggggccatcacaggtggaaggcagaggagacacacctccaggggaatgctgagtgtcagagtgaaggcacaggtcacagggaggcggtaaagctcaagttcaggcagacggcccatcctgttcagtgatctggggtctctcactttcttcttgcacaacctgggctaagaaaaacccacttcccaggtgggagtcctgctccagaggaggacaggaggtttcttttcaccctagcatgctctaagtctaaactgaaatccaattcccatacaattattccccctaagttgaatgcaggctctcctaccaatgtaagccttgctcttcattagggacaacaaggctctttaatagccatcctggcatctcccaactggccttagccatcccagggaggaaggttccagctggggagccaggcgaggacgccaggcaccaatgacagacaggcagagttaaacagggcttggaggagcctcccagccccacaggatgtggcgaggtgaagaagtaagaaaatcagagaaagctatctagaaacgcaaacagcaccacaaataaagcgacttaacaggaaacagagagacttttcttcatttttttttttttaaagctaggaagcccaaaaatagttgaaagactatgttgcaaagctttccgaagacaaatcttgccttgttccgaagacaaatctaggggaacaagtctgacgtctaaagtcatgaagactacaggggcaagtgcagattgcaagcagaactccacgacacacaggaggagctgggggtttcagccccagtgtccaaacccagaagcccgtgtgctgatcagcagttcacacaaaggctcgattttgaagctcactcattttcagtaaagactgagttgcaactggctcagcttgaaggcgttcacatggaaagtcatgaatttggctgcaggaggagccaacatcagcactccccaagagagttggtaaacaagcagatgaaaaaataattggcctcattaaggataaaaaagtataaatgtaatgagagaactgttctgcaccgattgaattataatttttttcagctaataatacccggtgttgatgaggctgtggtgaatcgggcaggtccacatattgatgggaagagcatcaaaaaaccttatttgagagtaatttggcagtgttcatcaaactcataaaactgtgccttttgactcgtaatccttctgctgagaatgtgtccaaaggattttccaagaagagaagagttatacacacaaagcatctcagagcacccttaagtattacagcaaactcctaggaaccttcatttgtaacaacacagcactggtttagaacatgatgatctttttttaaaagtgatcattagtaaggtgcttgaacaaaatgcttaggatataatgtcagattacagaatagtccctacacctttgtctatatcaaggcactatataggcacctatccttatatcccaggtggctcatggtaaagaatccacctgcaatgcaggagatgtgggttcgatccctgggttgggaagatcccctgaagaaggaaatggcaacctcagtattcttgcctggaaaatcccatgaacagaagagcctggcaggctgcagtccatggggtcctgaaagagtcggacatgacttagtgaccaaacaacaagagattgttaatatatggacagacatatcagatgtctgaaaacaatctgattggttagggggagagtggttagtgatttccttttctatttcatttctgttctttgcaatcacaacattatctgtgcaacaaatgaccacaataatgatgattttcactggtaaaacttcactaatgtatggaaaagcagtgagcagaactccagggcattagaaacagcactcaaggtatgagaaatgatcaaacccagatgcatctgaagatcaacacaaagaaactgtgatctctaagcagagcatggaaaatacaggcagccatggggccacgtatcagcaacgtcaccttccagtccccagagagcatccggcagtatctgatcatctgagctttctgagagtcag

SEQ ID NO: 35766 - DNA, 3844 bp, Bovine  19866880667222
  misc_feature (1)..(1): n is a, c, g, or t
ngtgatctctaggtagaaaagagagaaagggaatccagacagagaaattagcctaacatacatgtcaattgctaatagtcacaacattccagagccttaatttcttcttttgtcaattaggatattacactctacctacttaattaatgtggggattcagacgagataatgcatagggctttatgtttctgtatgttatcatttatactggtatactcttatgctaggagcacatcgctctctttggaagatgattcaaagaactgaatctttttttttcaggcaaggctttattggagcccctgctgcagcagagaggaaggagagcaaagaacagattcccttgcttgctctctccctgagtgggagaaagtttctttttgatttgaagctcttttcatcagaaaactcatgctcatgataaatcaaaatggatcagtaatgttggggtattggtcttagctctatgttttggcatcacacaaataaatcttttttcctagggatttcttccaacgtctgttctgttattatggtaccagttaagacatagttttttcaggacatggttattagcagttattgaattggacttagaaggacacaacaaagtctctcttgttaatgaccaaaattattctacctaaatcagtgaattcaatcaaatataagataaacagtgtttactaatggcatgaatgcccagttacacagtcatgtctgactacttgtgatcctatgaactctacgccgtcaggctcttctatccatggaattctccaggcaagaatactggagtgggtagccatttccttctccaggggatcttcctgacccaaggattgaacccatgtctcctgaacctcctgcactgggagatggactcatcaccactgagcccctgggtagcctcttattaatggcacttccctaataattaaacaagaaatagttaaggtatatcctgaccttgaaaaactcccagcctactcaagaggcagacaagtgacaaagaaaaacaactccatgtgatggatgctataatagactcaatatttaatacattgccatgagaatataacagtaattattccaggaggaaaatggataattagttaaagattcagagatgaggtcctagtcaaggtaggcgatctctaggtagaaaagagagaaaagggaatgtaggcagagaaattagcccaagaaaagatataaaagtgggaatgtacttagtgtcctacagacataggaggtaaaaaaaagaccgtcctccaaagacaatcatggcctccttcccaatgcctgggaatatgttactttatgtggaaaaagaaactttactgatgtgaatatgtaagatttttaagatggggagtttatcctatatcatcctgatggacccagttataaggatcctttttatttatttatttatttattttggatcctttgtaaggatggaaggaagcaaaagaaggtcagagttagagatagatttgaaaatcctgtattattgactttgaagaaggaaaaatgaattcataagccaaggaacagcaggtagtctctagaagctggaaaaatcaattgtacatgtcctcctctggaacatcaagaaggcacacaaccctgtacttagtacaagaagatttgtgttggccttccgacctttatcactgtaagatgatcagtctgtgctttgttcagccactaggtttctggtgatttgttacatcaggaatgggaaaccaacacagtagaaataagagcatggctgagaggtagggcagagtgtgagtgtgtgtgtctaaggaccgaggaaagagaagcgggagatggcagaggtaaagaaggctggggttggttgtaaagggttttgataatcagttctgaatctaagtggtctgagttttccatccttagagaatgtgatcctgaaagtaagctctcatatgcagaagccgccattccattagctcattggtctggttcattccccgagcatgataattgaaacccgtaaatctcccctctcctacctggatctccatttgagaattttgaggcatcttctcatcttggcaggcactattgctcacacacacacacacaccacaaacatatgtgcactctcatacaaatccctcactgtattgtactgaacaccatcatttttacctactaatgggcatttcagggctcaagagtggtgcccatagttataaaaatatatttgcaaactttgataagaactataaaacaaaaaagtaggctgctatttagacacatttgtggggaggttgtagatatgtaagataggagaagtctttctgaagtctctgcctctctcctccccttctaatttcctgtgtcacctacatcctcagtttgtatttcctctttcatcactttggtggtcagaggaagtgaccagactacaggaggatctagaagatgttttaattttctttatctcctcgtttcaaatcctttcttgtactctcagctcttttgtaaaacaaaagggttagtatgtgcatgactaaattttccagttatgagagttgttaaggaaactctcaaaatagagagtagaccaccaaaattaagcctgagaaagagaatatgtgatactcaaagtccttggaagcataagaaagaggctttttggatgtcagcagaccttttctgggactggagtcgtttctctgctgcgtggaacattgcaaaacacactgtttcataatcacggcatggcttgctgtgaagtcactggtggcccctttgcttcccaaatcacttttcagtgaacactttgatcctctatgatatcagtctcttgggttactaattgcttccaagtgaattcaggcttgccaagactctgggtggtgtctcccttcggatacaattctttgtacttatatatgtgtttgcttccaaattcctctgaatactttaacaactgaaattctctcaaaccaatcaagttgaaagatacaactggatacctgggatttttcctggcactgtagctgactcccaggggaataccctaaaagcatgcatctctaaaactctggtttgcatcccaaagaaaatttctgtctacctcaatggattgcaagataatggtatgaaaagaaatctgaaaaatactcaaaccattcaaaaatcataagatttttaagacccattatataagacccaggcttttcaactctctagagactttgaattcaccactgactattcatctttctcattattacatccaactgataacaattctattggttatgctttctaaacttcccccaatatgttggatccttacttttatgccctccttaccctgccctctctaataccattattctggcattgacctacttctggtctctcctagaattttaagtagtttctctacttctgatcatgattcccagtttcaagaattagatctttcctttaaaaaataaacatgctgtgttctcagttgcttctgttgtgtatgattctttgcaaccctgtggactgtagcccaccaggctcctctgtccagggattctccaggcaagaatattggagtgggttgtcatttcctcttccaggggatcttcccaactcaggggttgaaccggagttcctgtgtctcctgttttgcagacagattctttactcactgagccacctggaaagctctgaaataaacatactaatgcttttttttgtttgtttgtttggctcacaaggattaaatgagggaacttcaatatatatatgaaagcatccagtaaattttctggcacatagtcatcactcagtaaacattcccttc

SEQ ID NO: 35767 - DNA, 708 bp, Bovine  19866880676965
  misc_feature (1)..(1): n is a, c, g, or t
naaatgagcaaagtgaatgaactttaatttaaagcagccgcaaattggttgtcacaccccaaatttcaaacgagaaagaaaattccccatacaagatgatttgtctgagtgctttgtttccttgtcatagtatgtcagggatcaaaggatagcattttttcctcttcaagtggagaatagctttgtttttactgccttttcgtccctcctattaaagggagctttcatcatagactttaatatgacttgattgtctctatattcatatcccttgataccctgcttttcactgtaagtcagcaagatcaaaatcttctcctaattatcttcactacctgctgaagtatctgctgctgggaatgtgtcagttgctccaacaattatgctggtggtaacggcacacattcccatgaggcagggaggtgatgtctggacttcaaagggcctacgtcaagtggtgatgtatattgtacttcaattaaagtataattaaggtggcatgctatattcagacttctgcttgtgtcaaagataatccatttcagtagttcatactgccacctctatggcagctccagagttacacagcggatggcggagcactgctaactcctccagtgcccattcatggggagagtgaccctggagagtcagtgggatcaggtttatttcagcatccaggtaaagagctgaagctttgagccagac

SEQ ID NO: 35768 - DNA, 668 bp, Bovine  19866880695079
  misc_feature (1)..(1): n is a, c, g, or t
ntgccgcaactgctgaagaccacacacctggagcccatgcttcacaacaagagaagccgccgcagtgacacaccggtgcacagctgcagaggagcccccactcaccgcaacaagagaaaagcccgcgcacagcaacgaagaccaagcacagccgaaaatcagtcaatgtataaaagtgacaagaccacccgatcataaatgaagtcaaaaaggaacaatcgcgtctttccacactggatcagagcaaagagaagttctggacagagcactccatgctaagcatgagaaaaaaagggaggaaaatggcatttcaactatgcaagcattctagaacacaaaagggaaaggaaagacaaactgcgaaagaacaataaaaagctcagcgtgaagtcatttatacaagactcgaaaacaagatgatgaagcaatatgctgggataaaacggcagattaccaggttaaggaaacacttgagggtcaaagcagcatctgtacaaatcaaataaataaatgtaaaccagtggagaacaggctaggtgcaactgaaagttcaaacaacagcaaaaagaaaaggctttagagcctcacagtgatgaaaaaggaaaagataaatgaataaatcaattacagatgatgataaataaagacttcaaagctgtcccacatta

SEQ ID NO: 35769 - DNA, 5871 bp, Bovine  19866880699526
  misc_feature (1)..(1): n is a, c, g, or t
ngactgatactaaaggtgaagctccaaaactttggccacctaatgcgaacagcccaactcattggaaaagaccctgatgttgagaaagactgagagcaggaggagcaggaggagaagtgggcaatgagaatgagatgctggattgacatcacccaactcaatagacataagtttgagcaagctcttggagatagtgaaggacagggaagattggcatgctggagtttatggtgtcacaaagagtgggacacgacttagtgactgaacaacaaccagcaggccatgtgtgagaatcaaataattacacggaaaccaggacattaaaagttgttattctatactacataatatgtaatcaacagattttactttctttctttatctaatcatttatcttttaattctgttgatgaacatagatgaaattatctgctcttccatcacatgtagcataaagattttatagccaaatcaatatattttcaagttgtatctgtactgcttagtggttgcataattgtgcataattacataaattctctgaccatttatttctatgtatttgaaacagaaataatatccttcagaagcattgtaagaccaattgcattatatatctaaaatcaactagcaagtaaaatttatgtccagcaaattcttgttttcttctactttccattattatttattagacattgtgataggtatagtggagaaaaatatgaattaattatcattaattatcattaattatctcctcatggaattgatgtactcatatggggaaataacacaaataattcaaatatatcctaatatgtgcatttttacactaagaaaaacataaagagaaaaataaagtataataaatattcaaaaaatgaagtaactaaaatgaagaaatagtattgtcttccagagaaaaatatttttatgtttctgtttatcttatttgtatcaacatttatttgtattatcttgttaataaaatgcagttaattttcaagaaactatgcttgattcaaaatagggatgttagtttagtatggtaaatgttttgttaaaaataatttggtgaatttagaatttaatcacagaaatttgtatcctcatactttatatcatggttgtcaactttatttttgatgttactgtcaaataaaagggaacttcaattttaccaaaaggcattatttttccgttattaatttcaacttctacctattatataatatggatgatcaatacagttaagaactaaaaatggtggagaaattacagacacaattttaaggcctaagagagctgtgcgagcaacaaggagtagagggactaaaaatttacagaggaaagcagcatttaagagtaaactcatgatttccaacaccttttttcttggcagaaatttactgaatcttgtgcatttggcttagctctcctggagaacagagaaaccagcaaagttcttggtagtcagaaagtaatggaaagtggtaagttccacacttgaagggtctaggcaacaaggatacttcaaatattcaatatctgaataatatttcattctgtttacaacccttggttattcttattgtgttagtgttatgtcaggacagaagatctgaagggagaaggggtgagacacactgctttaaaacgtaaagttctgtttactactaggattcaggcttccctggcaagtctggctgcctaatgtgatagacctttaaagacctcttggcataatggttagagaaaagtgaaaaataagttattttaaccaaaaggaagttgacaaacactttgggtcaaccaataaaacatttttagttgtcagagaagagggtctcttataatacttctataactgcaatatacactatgcaatgaaagaggtatttaggattctattttatggtaaatatcaaccaagtgatcatttgtattaaagatagctgaataaaattttactctatatcacattatctgaggaaggacaaagctggctaagagaatgctatcttagcaagtgagtagagtaggcctgtagagagtgaaaacaccattattaaaggaaacggtaacactgtgcaatgcacactagaataaagaaatatgcccacaaccaactgctaattaaattttgttagaaagtaaatttcaagttttatttagcatcatgctttttctaatattttaattttctgttaatattaaaatattaatatattggatattggaaactaaaaacacttttctgattaagtacatatcaagctcattctattgctctgatgaagatattgtagtaaaaaatttagacctatatcatttttttctttccaatcacagctatataaagttttgtatatttatacaataaaatgttatgcgtaaaatgaaataatgtattaggaaaatatataatgacatttggtctttaattttcctagtagtagccccatcccattccaacctgaaatgactgaaatcaagaaatcagatgtcagtacagaggtgcagatggagagagctctaagtaaagccctctagcataggctgaattgttggagataaagcttccaaaaaagagactacattactgttcttgtttccttccttcctttttccttccttccttcctactccattctttcctccttcctcccatcctttcattccttctttctttcctcccttccttctttaatatttttctctatttcagccccaagaaacatcatggtacggggggcagcattcaggaatgtgaacccagtggagtcaaattgaggaaagcaaaatttcttttcctttgatggagctacagttccaagaaaattgagtcaaccttccctatcctcttgcttattttctctctgtgtctttttacaacttaagagtcacaaatttctgttcaaaggaacaaaaagggatcccaagggaatcagaagatatcatagagattacacagaaggatgagatcaggaaatatggaccaataagatttatgaattttggtgctcacctccaaggtatacatgcacaaatgtgatgctaacgaacacacaaaagacactgagaaactgaactaagaaagagatcatcttgaggttgttcattgaccatgaggtggaacatgtccaggaaagatttgaagagctccacaaaggctttgagaactaaactaattttgaaaccatagccaaaaaaaggggaactggtatttttgttctatagctaaacaggtaacgttgcctgaacacacacacaaacacaaaaaagacattttccataagatttaaatgatgcagggtttcatagtgtaatacttaaataatctagaaaacaatccaaagttatttggcaaatgaaacaccatctgcacttctgttcacatagttaaagataagcaatggacatggatacattctgacaaacaaagcagctattacaagcaagctcaaatgagcgaccaggaacactcttaataccaagcaatgatagaatcttttaacaataaataaataaataaaggatataaagaagaaccaagtagagatttagaactgaaaaaatgcaatacctaaaatgataaacttgctgggtggatttaataacaaaatagacatggcataagagtcaactaacttaaatctagatgagtgcaaattatcctatctcaacagtaaaaagaataaaacaaataaggggaaaaagtcttatttatttgtgaaactgaaagtgttagtcactcagtcatgtctgactctttgctactccatggactgtggcccctcaggcctctgtccatgggattctccaggcaagaatactggaatgggttgccatgctcttctgcaggggatcctcccaacgcagggatcaaacccaggtctcctgcactctaggcagattttttttaccgtctgagcctcctgggaagcccataacaaaactctagcatttttgtcagagaaggcaatggcaacccactccagtactcttgcctggaaaataccatggacggaggggcctggtaggctgcagtccatggggtcgctaggagtcggacacgactgagcaacttcactttcacttttcactttcatgcattaaagaaggaaatggcaacccactccagtgttcttgcctggagaatcccggggacggagagcctggtgggctgctgtctatggggtcgcacagagtcggatacgactgaagtgacttagcagcagcagcatttttgtacaagttctttttccaattaggtttctttttaaagaatctttcgcaggtctctgcagctgaaaacactgaaaattgtggctttactccacagtccatagactcaacctccgagttgttgatctgggcaataagagtccaaggtgctcaaagcctgccaagaacagagtgcttaatttggtctgggtgtttccaagtttgaaatggaagacaggaggcttgccagatatttcaagtagaaagagacttaacaccatgaattgaaagttggaacaatggtgggatgcgctacagtcaaaatttgcaaagactagaatgcaggaagtagtgctgaagtgaattctcaacagaatgagtgagaggaagccaatggcaacatcccatatgtattgacacttactcctggacaggacagctgctacataaaataaaaacttcttctcctcggccttcaaaacaccaaactggcacctctgcctagcagaatctaaccttaacccctgcgagcagaaaccgagggaatgtactgtcagactagcttctcccaagcagaggaggatgtagaaggaagcagggaacaaggtggggttggttttaataacccaactttagaggagattcaagaagacttcctagagaatgcaatgccagacacaaggttttgaaagaccagagttggccaagccctggccttggtcaatgattcatcaaaggagtttccctttctaggctgcaagatcctgaataagggaagtaccaccttcccaagaagtgttcatcttttgcaaccagaagatgtggctataaatagcccaagtttctcagcctcctgtgttcaagatggatcattgcaagcaacttttccacagaaagagagttaagaatgagagttactgaatcaaacagcaataccttcctcaatggaaatgtaagtgggaagtattcctttgaaatctcagaacagagttcgtaggcactttggagtcgttgtgtcaagagaaagaaactgttgacttcaagtgggtgtcagagctagcctctctaccttgaccttaaactccatttccctgatagccccgacctaaccttcccaaagacacgttggaactctccagagcaccagcccactggcagctcatctttcatctttccctcaaagtttagattgacagaaactttgcagtcctgggaagataaggggagacatcagggaagcacctacagtttctcttgctacgttagatgctttatgcccctgatgcgttgaatcctttaagggacctttgagataaacctattacccctactttccagatgaggaagcaaaggccaagaaaggtaaaataatatttctgaggtcacacacccactgctctcctcaaaagaaaatagtgaaagcttcattcttctactataagtgaattctgaattccatggggcattcctgggttacctggaggttgaaacagccttagctttgcaagactggagaagctggacctcatctcgctacccttctttcccccttcatcccaagaaaatatctcgccattgtcagtgacattagccacagtagggtgccacctccaacctggcctctgtctgcatcattttcccaaa

SEQ ID NO: 35770 - DNA, 2660 bp, Bovine  19866880744029
  misc_feature (1)..(1): n is a, c, g, or t
naattttttctgctaacaacgtgaatagctctatgtatccatatatcccctccctcttgagccttcctgccacccctttccccacgcacccctctaggttaccacagaccaccaagccgagctccctatgctagacagcagcttcccactagctctctgtttcacacattgacaggttatatgtcaaagctattctccccaactcatcccaccctcccctcccccacctgtgtccacgcctgtgtctctacttgacatgttttttaaaagaccattctgacttctatatgggaaccaaatcgattgaagacttaggggaacaagagtagaagtagagagtccagttgcgtggcagttatgatcaaatagtaccgcttcttatgaggaagtgggcatgccaacttccaaaagctgctgtcttcccagagatgctgagctattaaggtgcaccaggaagccaagctgcactcagtccaggctctttctgacaccgtctcctgtttcttgttcaggagacactgtaaagtggtcagaaagacgtcggctcttcatgcagacctaagatggaatctctttgggacactcgccaaatctgtgaccttttacaggttccttcccaggaaacaaatgggaacaatatcgcctgcctcctggatattataagtgagacaatggctataccgtctgtgcccatgtgctcaccagattattttttttctttttggatattgaggtaaatggtctttccagacttttgcagctgggtggggccttgtgatgagttctggctgtgatgaaagtatacagaagtgatatgtctgttcctagaagtccacaggccccactttactcctgtcatctttccacacgaactatattaaagatagcagcatcccaaaatagcaggagctggatgcttgaatcactatgtggaagaaagttgcctgaacaagaatatccatgttgaactttgtgagtgagaacaaaacgttttggggttaagtcatattttagaggattatttgttacagcagttactgttacttactctgactagtaaagtctcattaaatgatagctgttatatatggcatattttgctttctctagaatctacacaagcttatttcaacaatactatgaagaccaactctgctgagagacaccgtcaggttctaaagcctttgacttctcaatcattgaggaattcaaccgtgctgcatataatcgctctatagatagcatttgaatttgtcaagtcagcagttgagggagttctcattctttaaaagcattctttaaatgattagtaagttccagagagtgttctagatactatcacacatggtgtcctaggctggctttgccagagccctgtaaggttgcaaataactattatcacagccacaaccactcccacctcgggtagcgtacacattccgttctttccgccaagaataccctggctccagacatctgcacggctcacaccctagctttgttcaagtctctggctgctcagcctgaaacagtgtccctctgttacccacatccctagcctccattcttctctgtctccagtgtgcacgtcttgctgctcattctcagcactgtttgcccctggtggagctgatggaaaggatgcttcttaagtaaggtcactctgggttctgatgttcttattctaagaataggaaagaaagacgctgaaggttatataaaagatacagtatgttgaaaattacataagcagttgtgtgaatcactattttataacaaagtagaaaaaaaaagtatgcctttaggaaagcatgaatggtctcagattttgttacgtatattgttttagaccggtctttaaagatctggccctttctttcagtatctacctgtgaaaaggttatgatgaccctcgctagcatcaggaaccatttccacttgtgttactgatgggtcttggcattgatattgaaaaccagtgtccctcccgaataaaggacacaaagacctggtgatgattctcctggagaagtgaccatatttgcagctgataagaaacagttaataaggattttttgaatgtgcctataaagaaaagcgggcacttggtccccacggaaggcttccttgtgcagcaggccgggtgactgatgaagtgggttttgtgaaaaatgtaaattcacattttgtggaaactggaagttcatccgtctaaatcatttctgttatagtctatgacggcttctgaaaattgccagggtaggtcttttatttgatctttcaacattattggaggtcatataaacaggattatatgaagtctttcactgtcaattagtgtaattctaaatcaacattctgtcaacgaggtgcagattttacagcacaaggaggaagagacaagagctcactcttttcttcaaatggatttccctgcctttggtgagtgcttaattaaaatgagaaaaaggtgggagttccctggtggtccagtgtttaggactcagcgctttcactgagtccaacccctggtcagggaactgagatcccacaagtcatgtggtgcagccaaaagtagaataaaaaagagggaagaaggaaggaaggagagacaggagaagggagggaaggagagaaggtggggaaaaaatctaccaaat

SEQ ID NO: 35771 - DNA, 984 bp, Bovine  19866880808055
  misc_feature (1)..(1): n is a, c, g, or t
ntctgactctttgtgaccctatatcctgtagcccccaggctcctccacattaccagtaaaataaggtgcttttttttttttccctctgtagaggccttagttgtgctcaccacactttatgaaaatgaatcactgcttttagactcatgctagagaatggagaataattctagagacttgaattgctaccagccacaacacctgtctttctagaacaaggctgggtaactcccatcttggcctttcattctagactctccagacaccatctccatgatgatccatttcatgtttgatggatatactgagacttttaagcaatctgctcacgtggctatgtgtgtgttagttgctcagtcgtgtccagctctttgtgacccccatggaccatagcctgccaggctctcctgtccatggaattctccaggcaggaatattggagtgggttgccatttccttctctgggggatcttcctgacccagggatcaaacccaggtcttctgcattacaagcagattcttagctgtgaagaatctgctattccttcctatgaactcatccaaagagatttctagatttctgggaagctctggcctttctttttgtccttgctgagatccttaacctttgaggatctctgccatattatgaatactcactcttttttattagcattcttttttctggctgtttgtaagtttccgccctggggggtccagctgtgttggaatttccttctttctctgcctgcctctcacagatgcttcatcagaccacactccatccagctggcagagctctctgcctctctcttctccaggttccctttggcctcaaatgctcattgaagagctcagaaagaggacgtaaaaaagggggcttcctggtgggcatccgtgagtcactgtgcagacaggctgtggcaggtccttcctaccatctgatgagtcatgagagtgtggccaaacagatggtcatcaaga

SEQ ID NO: 35772 - DNA, 1197 bp, Bovine  19866880808563
  misc_feature (1)..(1): n is a, c, g, or t
ntagaattatggcatgcccagcacctaatagagctgtgtgtatactcttgagaaagacaaatgggctggcatgtctagctgcagaaatgagattaaatggctccatccccaatcttgccattgatttttgcagccctcccattaacatgagacatcaccataccacccctccatcatttctgggaggtgaagacacggttttagagtgtaaataattagaccctcaaaatccaaggtgacaaatcttacacgcttccagttgctacgaatcaggacccataaatcagagactcttttgaggacgtgtgcgtgagaagaagacatgtttacacagtgagagtgctttgtgtttctatttctttcttttttcctcttttttcctccttaggcacccttgtcattgaatatgaatcagctttattgggtcactgtataaatcaggacatttttgtaaaaaggcaggtagggcactcttacccaatgacgatgagtaatctgggacagttcctggaaagcaaggttgtgtgttcatcctagtttgaggtcatcatgccgtatatgagtagtgtaggtctgtgctttctcatctcataaaatgcatttctgtggaatgttaaatattgccaaagagataatgcaaaaagagataataaacaatactacagtggctaccttttattgagtgcctactttgtggtcctaaagatctagagttgtgattaagaacatcagtttgattctaaccatctggtagactgatcagtccctctgagcctctgtctttagcaaacataaagcactggtacgaagtaggactcaaagaggtgagctttcacaatcgcatgcagaattctttgtacataatactctctaatcctttcagaagcctggtgaagcgaatatcattaacctaatttttcagatgagaacactgagggtcaacaaaggtaagctgctttccaaaagtcacaaaaaaagtttatattcaaactcaagtctgtctgataaggtcttcacttcactattttactgttttccatcataagtcctaaattagtgttagcagcaaaaaagttgaaatgctgtttaacctaggcttacatacctcttaatttactcacttatccattccacactcttcaggcattttatatttctatttatttatttgccagtgacttatacaaagtcaactca

SEQ ID NO: 35773 - DNA, 874 bp, Bovine  19866880854901
  misc_feature (1)..(1): n is a, c, g, or t
ncagctggctggaatcctaataagcagagacagaaagtaaaaactggaagtatgtgaatactccacaagaccaaccctcctccaatttagtggtataaacagtagcaatcttttctcaccctcacctctcagttccactcaacttcagttccacttataaggacagcaagagaagtccaaggaattgtgtccattcatctgtatccatgtcttgtgtgccatctacaaagcttgtttacttgtttagtgatgaaagtaaccttaaacctagtcccagccaacattctcagaaatcctgggactcaacccagacctctgtggttttgcttaggcataagggcacaccgattgtaagtggcagaaccagaattttaacacacttctctctaacccatgctcaacctgttccaccttcagctcccttggctatacacaaaaggataaactgtacttcatagaagattctttttctgaaccataaaaggatagttatggggagtttcaactccttaaaattcattcagacccataggagttaacatcatattagtagataatgtatttgcttatctgcttccaaagaaatgagtctaaattaaatacaaatgatgactgttctataaatattgtcttttttttaattggcaaaggagatggaattgatgactacctagttcttttatcatcaaggtctattttattttcatgatgacctcagagtacccagggcatttatgaccttattcatatgggctccctgcccagaagcacaagggaatgaatctttccctaaaatgaataattggggatgactctcaagcacctcactgccccctaaaacaatttaaatattttattgctattaataaatata

SEQ ID NO: 35774 - DNA, 1229 bp, Bovine  19866880968645
  misc_feature (1)..(1): n is a, c, g, or t
natctcctgcagcccatattttctgtgcaaattgcgtggtaactaatcatgtcctgcttttggcaccttttctattattgccttgatgttgtacaataactctttaagtcttaatttttacctaccctgtgaaaatagaaattatgtctttcttttcatttattctataggatcctgctagttgcctggcacacagtaaatattcaaaagtatgtattgctgaaaagttctttttctattatttcatgctgaaatgtacatactcagagttcacaatggaccttggagatggagttacagaggagaaaactgggagacattgcagaagtgaatgcctgcctgcactccccaccccagtgggtagcagatgaggatggaaatctgtcttcccattatcaatgctatgctctttctgctattttcaattgtaccagctacggaataacccactaaaggtgcagaacgctccagcagtagtacttgaaacagtgttgtgtagacacattgtgcatatcataaactgaaaccaaatgaagataggtaatctagcttgaatttcttgttgttattggagaatgctcacaattctccaaactcattctcttattaaataaacacatgagagatgtttgaccaatgaacttgtcatcaggaatccagctctgacaacacccatcatgaagctaaaggaagtcgtccttgtcccaaaacacatcctggtgtctggggctgatccccagggctgtctgaatgctgagagaggactgatgagctcagccacgggttcattagagaatcatggtctggcaaggccttcattctcttcttcatgactctggccctcatcattgccataaccaagagaggcaagaagaggcagaagaggcagagctgcggagccagcagccagtggaccatatggaaatgtttgaggattaggaacagtgccacatgtgctcagctcattctggatgaggaatttctgcccctgcagtgaggaggaaattatttgcagtgactcacatgggaggaagcaagcagggcctgagtcaaaccagccccaactccatcactttctggaagtagcttgttgtgatcacaaatgactgattagccatggagcaagtaccacgtaccattgttctaataaagctattttggatgaatgggagagaaggaaaatcctctctagtcaataaacaacagaacaccttcttccccatcatatt

SEQ ID NO: 35775 - DNA, 2466 bp, Bovine  19866880977900
  misc_feature (1)..(1): n is a, c, g, or t
ntaagaaataactacatcaagttctaaaaaagaagagactccccaaatcaaagagaaatgggacttggtctattaccattactagagaagagtttccactaaaaagaacttgcctactcacagccagatttggggatctgccttcatccctcttgcaaaatacacttctgctaaataactgtgatgcaatgttacctgaattgaaaccattagacagctgcccaaggaaggcgctttctgcctggaccgcaggttgtctccgttaatctttgtttatagtgtacagaatggcatggctaattagagactttcatacaaaggtgcattttctttaagatctcctcttggtcctcaaaacctcaaatttggctgagtgggtcttgttctgtgtccaggcttaactaggtgtttatgttattcactccttaaatcaaaggtcctaatatatacatcttttcaaatttcagcatctccaaaaatggtatgtgtcctacaatcaatggcacttagaagtctatttgggcttccctggtggctgagtggtaaaaaaaatccacctgccgatgcagtagatgcagattcaatccctgggttaggtagatcccctggagaaggaaatggcagcacacgccagtgttcttgcctgggaaaggaccagaggatacctggtgggctatagtccacggggtcacaaagagtcagacacgactgagcacacacacattcagggctccttcagtgacgttacccagctgaaaagctaatgctctcggaatatttgcagttcacactaactatgataaatccttattgccaaactatttaatgggatactgattcaggggaaaaactttgaaagccacactgcttgccacgttatcagtgaacttctgctcagcaccttctctcgtcacgtctttttaagaatatgttgatgctatacagctgtgaaattgtgtaatctgcatgtgtgtaacctttggtgcttgaagcttaactaagaatgttctattttgccaaaaactttcagctcacttaaatgcattgcaataacactgcactattaacgccttatgtgctacgagaaacttgatgtctagcagctcagaggttaagcctacagtgttggagtcttgtgtgtgagtgtatgtgtgtctgtgtatgtatagtaactaatcatttattttaataggatgctcatttgagagggaggcaggcactctagatttacatagagcttttaaggagatgagtgagtatgcacagttaaattgctccttcagttaccagaagacttattaaatcatgaactggaggaaattctgactgagtaagttacaataggctgacaagaaggtctgagctagaagatactggtcctggggaccttgtttcatttcaaggataattttggaaataatttcaaaaatctagaattaattattctgaacaagaaccgcaaaggcagggatgggtttttgtccaaggtatcatccttggagatctcctgaattatgtcagaccaatatcaaggcctaagtttaccaaagctgctagagaaactatacgaggagtctgtcacaatgtactcccatgtcctgggcaagatttgcagccatcacattttatccattaattaaaaaagaggaagagaagtaccttcaaagtcagctacatgggactggcgggcatatgcacagggctggactgggtgctaaaagtgggcagacttggtgtgtcatacaggacaactcattttcccaggataaaaagagttcatacatgccgtctccctgtacatgagaataatgtgattttcattcaggagtggtttttgcagggcacatagagaataagtgtgagggtcagctgaaagcaacactgtgacaagttaaatgtgttttcaggcatgataaggatgcctcaaagagggggaaggctctgctggtaggacttcagactattgtgaagttaaagttcattttgtttgagggtcttcatttccacttgggtgctttttctgcaattagagggttctaacaccagatggcacctttgttataatcataagatctgaagaccaggaattaaccaatgtgtgtgtgtgagtgtgcatgtgatataagtatctatgtaaatatatatgtatgtgtaaaagtataaatgtatttatacatctcattaagtgtatatttacatatgtactttgtaagtcgaccgtccagagtcaaagttaaagttctgttatcaatttgccttgattttgggcaaaaaacaaacacctatctataccttagtttcctcatgtgtaaaatgaggctaataatagtgcctgttttgtggtgcctattatactttttaatgagttcatatatttaaatacttagtgtctggtatatgataactgtctggtgtaaaagtgttaactcttatcaccatataatttgttcaaaagctgatctatga

SEQ ID NO: 35776 - DNA, 1851 bp, Bovine  19866881018478
  misc_feature (1)..(1): n is a, c, g, or t
ngatagagaagagcccaggaatgggagtgaaagagtggaatatataaggaaatggagtgtctggctaatgtgacagccaggaaatccataaagaaaactccagccaatgagaaagccctgtgaggagtgaatctatagaactcttgggagtggatgtcttgttagtagcttctcatggttttctgcatagtgccaccaaaaaacccttccttctcctctgtctgaatcttgaatcaaaacagggaaagaagactagattctgcagttgggttgactcaaactaagaggataaaagccacaagtggcaagtcattcatgaaatcaagaatccagaaaagaaactaggaacaagagaagaatgggaaatttgtgaccttccccaacaggaatccaggcagatttaacagaaggatgtattattgctgggttcttcagtgtatctagatagaagcttgagtctatttatttcagtgttaaaggaaaatgaccaaccaccatcaactgtaggatttgcgagacactgagatgcctggtcctcaggtcataaagagaatatcaaaatcacctaagccctctagcacaacagaaacaacactctttgcacagagttttttccaacatctgtactttcattccatttgctagagtccatcaacatcatgtgaggtaccttctgcagatacactgcgattgttcaggccaccatctttttcttcagctgctacagttctacttagacatcaatgtcatatacagattaagatttttttttaattttattttacttttaaactttacaatattgtgttagttttgccaaatatctaagtgaatccgccacaggtatacatatgttccccatcctgaaccctcctccctcctccctccccataccatccctctgggtcatcccagtgcaccagccccaagcatccagtatcgtgcatcaaacctggactggcgattcatttcatactagttctttcctgctttataacatgttaggtttatttctatgttttaatctattgcaatgattaaaatcattgcaactctgtactattgctacttatgatgttactctcttcccatctgaactccaagctccttgtgtgaaggaaaagatactactctaatctttgttccagaacctagcataggggcaaaatacaaatgttcaataaatcttgaggacatgcatgaccaaatgcttgaatcacatcttgttaggcaactttgttcaaaagtttaccaacaaagctcaaatggaatgcttgaattttctctgcattcttaccccacctcagtcaccatctgtgacagagaagcaatgattatatattccctgtgaggatgatcacaacaataaaatcacaaccttcagccaacagaactcatggaaaccaggtcccactgctttgagcttttgaggaatgtaggactttgattttgcagtttactttcttttctctcctgaaatactggtttctaatttgattgtctcatttaaaaaaaaaaatgaaatcacttcaaacttaacagaaaatttgtaaaagttaagcaaaaccaaattttatatacacttcatccagattcaatcagtttttaaaatttgccacacttgtttttgtcattctccctctaatatatatgcatgtatatatgtacgtgtgtgctaagtcatttccattgtgtccaactctttgtgaccctatggactgtagccttctaggcttctctgtccatgggattctccaggcaagaatactgggctgggttgccaggcccaactccaggggatcttcctgacccagtcctgaccaggcgtatatgtatgtatgtatgtgtgtg

SEQ ID NO: 35777 - DNA, 771 bp, Bovine  19866881104950
  misc_feature (1)..(1): n is a, c, g, or t
nctctgcgggtaggagctaattaaagggtgtacttttctgtctcatctcctcggtttgatggatttggctctgcacagaagccaaagtctggcttggattgcttctgaacttgcccttgcatcaactgtaatcttacattcttctctctgccacaggaaaaaaaatgttcttactatgaataaaaaccccttaaacgaagtgactctaaaacaagtagattggaaaataaagactgagctaaataaaaatgtcataacaggtaagaagcccttccagtagctttccaccaggacccttagctcataatccatcattattttggactttgagtagacaacataattagcatgacaccgtttgctgagacctccatgaacatgaaaaagcacagttctggcttcagagcatcttggtcagcagagcaataggaaccaaatatcaataactagtatcttaataaagacaaggtgtgaggtttcttggagatttttttcaaagcaaatataaagcacaaacagcatgtttacctctgaatctattgttatacttcaagaaataatttgtgggagtatacttctacttatactgtacttctctgtaaaatgagacaaaaaaagagtaagaatgactcagtactgagagaaaaagagggacttgacatttaaagagtgttaaactaaggctgaattatactaatctaatttcttagaaccacccaaatcaacaagcttcattgctaaaagagagtaaagagaaaaaccctctggaat

SEQ ID NO: 35778 - DNA, 849 bp, Bovine  19866881182167
  misc_feature (1)..(1): n is a, c, g, or t
ncctacaacgtaaaattattatgaaccacattttatagatgaacatggaacctcagaaggatgatgatttgtcccaagagcaatggttcacaaagggacagtcagaacttgaacttgagagtattgctcttttgaactcactgtggccctctgaactatggcaagtgactatcgtgtacatcacagactcatttaaatggcagctctgtggagagaggacgtgtatttccaatgctgagcccttcatccatctctctctgataggaacataagtttcaaggcacagagaagttgaagctaagatagatgtattaatgagcaattgcagctgctacatttccagttggcctcttggttttgagagttgttccaaattgtttgttctggtttttattcagctcttatctcttcctttcttataagaggaaaaatgagaaaactcatataaacagacaggacaggaagtaacgcaaggaagacagttacagcctgctctatccacagctttcccattctcactaaaaacaggataaaaggaaagtagaaatagaaaagaaaccatattgaagaggaaatactcagctttaagggccgttatgtgcaatccagatgcccttgccctgctaacgtttggggagaaagacagttcagctgtgagataacttagctgtgtcctccagcactaagtaattcgttctaatgagttttccaaggaaaattaatttttcagcactaaaggaaagaaggcatggagtctcagaaaaaatctgagcagacgttgcaacaagggttatctaaagaactgaaactagagaagcctcaaaggcatatccattcggcattcaggga

SEQ ID NO: 35779 - DNA, 1347 bp, Bovine  19866881207853
  misc_feature (1)..(1): n is a, c, g, or t
ncaacccagggatcaaacccagggtctccctcattcagcggggttctttactagctgggccaccagggaagctcatcttttcagaggactcctccatcttccagaattctcagtcctggagaataagcagttaactctggggaagggataaaggagaagacaatagaggaacagtcttcattcaggggcatctgcttccccaaatgaaacatttggaagttttttgagtgcttgggagtggggctttaaaatgcaacatgtgaagtgaagttatttaaattctgatctaactgtgtggcctatcttcatgcctgcattaaaatggttcagactttgaccatccacccccatcattctgtttggattagccgagggctccacttgtgtggtacgttttaattttgtctgacacagtgttcccatcccatcctccctcaagtaagtctgggggaaaaatgtacttagctgagaattcacaatctctgcttttttgtgcttccaaggaaacttaacaggaaatggatttgctttgccatatttaggatagcttggagtgcagattcacaaagaattttccttgagctacattttgcacagaaaactcaatgacagatgcaaagaaaaaagtggtttcactgtccaatcccaggacacttagagagcgtgattaaagctttccatatgatagctgcgggaactgattactggtgagggaagaggttattcgaaaccgcatagtggaacatgtataatatcatatatgaaacgaatcgccagtccaggttcgatgcatgatactggatgcttggggctggtgcactgggacgacccagagggatggtaccaggaaggaggagggaggagggttcaggatggggaacacgtgtatacctgtggtggattcaatttaatatatggcaaaaccaatacaatattgtaaagttaaaaaaaaaaaaaaaagaatcaggactggaatacaggtctcctgccactatgaagcatgagatagaaattaagctaaaacatagtcaatggagccctttcaagaaaggacttccattttttaactccaccatcccagttcccaatgcaatgaccaaaaatagtatttctcaggtgttgtcacttggatcctttgtgttggggatgagtttctgtaacaatgtcaagaatgtgggctagagtaatcagcactggttctataaaagtaagaataggaagtgaaagtgaaagttgctcagttgtgtcccactcttttaaccccatggactacacagtccatggaattctccaggccacaatactggagtgagtagtctttactttctccaggggatcttcccaacc

SEQ ID NO: 35780 - DNA, 1163 bp, Bovine  19866881212324
  misc_feature (1)..(1): n is a, c, g, or t
ngcctgcgtttgcttagtggttttttccgtctggatctatctattgatgtaagcggggtgttaaagtccctcactattattgttactgttgatttctccctttataactgttatcatttgctttatatattgaggtgctcctaagtttagtgcatttatatttacaattgttatgtcttcttcttggatgatcccttgatcattatgtagtattcttctttgtctcttgtaacaggctttaaagtcattttgatatgagtgttttgaaacagaggtgttgcctgagtcatctttgtagcacctaacgtaagtttaggtacatagttggcattctccaaaaaaaaaaaaagcaatcgctagatttataattattaggtcaaagattatgaatggcttcttagttcttcatattcatttccctgctatttacctaaagagttatatagctttccttgacataagcagtatacaagtttcatcacagtaagacagtcatgactattaaatttttataatttccctagtctcatcactgttagtaaaaagatgccctatttagaagtctttgatttctaatgagggttttttccttaaaattttaattttttcttggctcatttttctttctaaaagtcatctctttttaaacaagaatttccttaaagtgctttccatcagcaaattttgtgtgtgcatgaaggaggaataggaaaaagaggaggaggaaagagaggaggggatgaagaaagggaaaagggagaatacaagcccaactgttgcactccataaagtagatttaaatgtgttccattcaggtaagccatcttaataaaacccaagggcatgaaatttaaaaacatatcaagttcaccttttcaaaggagatgttggtaaatgaagttaggatattcatgtatattcagaactcttaaactttgctcccagcatcaaatgctaaaatactatacagcacataaacatctttgttctgttgaaagtgatatcactcaggtcaaaatgtctctgtggcatattttcactcaggaaactgttcaaggaactaacaaggactacagcttcagaagctaaaatcaaatgcctttgctgtgaaaaagcataagattttcctccgtttatatgtattcttaattttaaaattaact

SEQ ID NO: 35781 - DNA, 1350 bp, Bovine  19866881288905
  misc_feature (1)..(1): n is a, c, g, or t
ntgaccgtgcgtttttggactccttttcccacccccgcctccctctggaaacatctcttggctcctgatggatcctcccaaaccagccctctctggccatgggtgagagggcattcgagggcaccttcctgcctgtccttggactccagccagccccgggctttagccgtagggtacgtgtatcaagattgcttcctttattcagtgtccacggtatcaaaagaacttctgacccactcggaactctccccttgaaacagaaacattctcaaaacatctctgctgctggcctgttttactattgctgtttcttgtggtttcatagtgaggtttttggctcattgcatttgacctggtgtttatttttagtcgtgaagacagagttcaattaatgtcaaaacgtgagggcaaatgcagaggagggattcgtaagtctaggggaaaatgtgcctaattttgtttcttcatgataacatctgtcacaccagcagacgctgagcttcctcggcgctgcctatgatgggctttgcagaggcagcgatccaagccacccccaaaaacgaaagcgtttctgggtctctttcactccggtttatccagcagctggccacagagctgaatactgaccacagttatcattacgagtgataattattataattaatgagtaaaggccagcctttggaaccttcagttctttttttatgagaaaacttttttttttttttttaatgtggaccacttttaaagtctttatcgaatttgttatacagtgttgcttctgttttctattttgggttttttggcatgtgagatcttagctcaactaacaccaaaaaagtgttagttgctcagttgctctttgtgaccccgtggtctgtagcccaccaggctcctctgttcatggaattctccaggcaagactaccagagtgggttgccatgcctttctccaggagatcttcgcagccaaggggtcgaacctgggtctcccacgttacaggcagattctttaccgtctgagccaccagggaagcccacttagcttcccaaccagtaatcaaaccctcaccccctgcattagaagatggggtcttaaccccaagactgtcagggaggtcttatcatctcccccatgggtttggtttccttctgtctccagaagcagcatccaacttccttgaatatcagcttgtctccccggatcataagtgttttgagaacaaactccgggtcttgctccctctttgtccgcagcttttggcatcgtgacatgcttggggaatgtcctcttagattgcctgcgtttttggacaccgaattggggttagaatgtcagatatgaggcaga

SEQ ID NO: 35782 - DNA, 1416 bp, Bovine  19866881299984
  misc_feature (1)..(1): n is a, c, g, or t
ngcccataaaaatacccacagtttgtctttcatcgcagcagctcagagcctcgtggcattctcccgaaaagacagtgctcccaactgggttctaggagccggctacttcccaggatggtctggtatttgcaaggcagagggagcgagtatgaactgaaataacccagcccaggcattgatgtagccaggctgccagggagacacaagtcttcgtgtatggagagattctccctggaattttctggatgtcaaagctctgagtcacacaccaatgagtctgcattcccactctgctattaagtagctgtgtgactttgtgcattttcttagcctctctgtgcttcagtttctgcctctctaaaacaaagtggagatgatatccacttcctagggttcctgtaaggattaaaagggatagtgtagacacagatagaagagatttgcagcacatatagctgacacaggacttgtatctggaatctgttaacaactcttgcaatgcaataagacgaacaagtgccttcctccaaagtgggtaacatttaaacagaagatatatatgatatgtacatgaaaagatgtgaaggtctctatagtcatcaatgaaatgcaaatcacagtgacaagacaccctttcacccccactggagtggccagaatgaaaaagattgtccatatccagtgctggcgaagatgtgaagcaattggaactcttacacactcgtggtgggcgtgaaaaactgatatgaccacttggaaaaacagtttagcggttgcttctaaagttaaaaatacacttaacatatgacccaacgattccactcctaggtatttccccaagacacacatctataaaaagatttgtacatgaaaacacataggagacattcataacgaccaaaaaactgaaacgagtgtccgtcggtggatcaaaggataaacagagtgtggaatatccagatgatagaatattagatagcaataaaaagaaagtcaccagtatacacagatgaatgccgtgaacactacacggagtaaaagaagggagacatgggagactcgggcaaacctacggccgattcctgttggtgtttggtagaaaccaatgcaatgctgtaaagcaattatccttcaattaaaaataaataaatttaagaaaataataattaaaaacgaatagagacatggaagagcagaacttccgtctaaagttcgagaagagagaaacaatctgtggggacagaagtcagagcagtggttgcctttgtgtgtgggtagggtgggagggcacatggaaacagggacaggaaacgttctggggtgatagaaatgtcctgtatccctgtactagggtggcaggcgcatgggtgtacacatctatcaaaactcaccaaaatcggtgcttcatgttatttg

SEQ ID NO: 35783 - DNA, 1490 bp, Bovine  19866881310211
  misc_feature (1)..(1): n is a, c, g, or t
nagagaagtaaaaattttaaaaagtacctattattatgaagcttatattttggatatattttggaagagagacaatcaatcaagcaaataaggaaggaaggaaagaagggatgaggttatttatcagaaagagatgaatgtcatgtagggactgaagaatgtgatagagaggcaggtggtatcattgattggacactcaggacaggactcctgaaggaggagacctttaagctagaactgaatgacaagaaggagggggtcatagaagagcaatgggtagagactgctaccaaaaagactgcaaaagttctgagatggggaggagctttaagaatacaaagaacagaagaaaagcccagtatggcttgaacaggtgaatgaatgagggttagagccacacaaaataatgtcaaagagatggataggagccagatggcacaaggctttaaaagtcaggataagcctcattcatcaaatatttgttgaatgaataaatgcacagaccttgaagcactatggaaatgtaaataccaactgcctttcaggagttcagtttgtcaaaagatgaaaggaatctacatccattcatccaagaagtatttactgaggccctagagtgtgccaggcaccatgctacatagagggggcaccagaatggataagccaaattccttgatttcaaccaacacatggctttgaagaaagatacaagaccatagcacagagtagcaagctctttaatttgaggaaacactatgcgagcacatggaaatccaccatcttagcctgaaaaagtcaaggaaaaggctaagagagcatatgaactacatcaagatgaagagctcagagataagttggtctctgaagactaggaaggtcaggaaaatttcccagagagaaaactggacttaaactgggtctttggatgtaagcaggaggggctcccagttgaaaaacaaaggcttcaagctcccagtttgaatcaaaggtcaacaccttggtggggcatttgcagcttcccacaccgactgctgctcctaacttacactgtcttcacacacacacgcgtgcttacgctcccgctggtcctccctctctgctgaaacatagatgaaatgactagctaatcacttcccaaactgcttagcatcttagtcactctgaaagaaagtcccatccccattccaactaagatcatgtacagtttcctgatgatcgaatagcccatggataggagactcctaatataaccatgtgtttcactttggaacggttcattttcctcagcaaagatacccatctttaaatgcaatggaagactgcttccccaatgcagccattccttgattctaattttaatcgcggaagtctttctggtcacctatggctgggtaaaaatcaataggaaaccatagcagcacatgagtaagcattcacctttcatttatgaatatatgggtcgcccagaaagactgtatcgcaggctccag

SEQ ID NO: 35784 - DNA, 1758 bp, Bovine  19866881691801
  misc_feature (1)..(1): n is a, c, g, or t
nccctgagcacaaaatagacactagtgaaagtgaaagtgaaagtcactcagtcatgtctgactctttgagagcccatcgactatatagtccatggaattctccaggccagaatgctggagtgggtagcctttccctttccaggggatcttcccaacccaggggtcgaacccacatctcctgcattgcaggcagattctttaccagctgagccacaagggaagcctcaaaatagatactaaaaacaagcttattatagagacatcattgaattgatgagcattttgctcaactgctactggcaatgaaagatagattgagtatctaagctctccagaatcatttattctgagctcttgtctcttctgttgttgatccagctcaattgaaaaggctttatggtcatttatgagggaaaaatacatcactaacccacatgtttaatgagtcagcaaaactgacatcatgaaacaataagtcggttgagggctaagtcagaaggcaaagcaggttccaggacaaccaagacatttccccggagctcataaacaataatgatgttcagttctatgtctgcaggtgaggacgcagggaaaatatcagtgctcagtacttagcaacatgtgtctctattgcacagcatctctgtctttcctagaacaaggaaaacacagtttagagggcagcaaatggtaaactcttttctgaagcagttgttatttctgatgattttccataactgtatttcttttttatggtggtgtgggaaacttgatctgaataatcatcctttttgtaaagattacatgttagtaccatatcaaataaaagccgttaaaaccaaaccctttgaggttttaatccaagtctaggatggagacaaaatttatctttatttttatttagttcagaatatttggaagattccattatttaatatcttatattatcatttcccaaatggcattctctggatggttggcatcctgagagaaggcaataaatgattcatgggaaagagctgaaaagagagaaaacagagtgttttcaacggctaaatactttaagaagttgtatcatcttttatggtataacaaactactccaatgcttatcaactgaagaccacaggaacttattgcctcacttgtctcagggggccaggaatatggtgtctgcctagcaggatgcctctggctcagtttcccatgaagaagccttgggataatcagtcatagctacaatcacctagaggctcaaatgagacagagaacaaatttatttccaagttcactcacgtggctgtcggcagcatcaaaaggtgtatttccaagtgtgcttatgtagttgtttgtaggtctcagatcttcaccatgtgggcttcaccagagacttcccaagtgtatttgacatggacagtgatcctaagcaagagagaaccagagacagaatcacgttttctcttataacctaatctttaaagtgacatctcatcagcaaaagcatattatcattaaaagcaaataaaaaatccagcttatactcaaagagagaagattctacaaggactgggacaccagggaatgggaatcattgatgatcattttaggaaatgcccagtccaaaagttctgggttaatcttcactacaacacttctcagggcttttaatatacaaatgtgttttttggatcatcatttgagtaggggtcaggaaactttctcttagacagccagatgcttatgaggacctctgtcccaa

SEQ ID NO: 35785 - DNA, 791 bp, Bovine  19866881870686
  misc_feature (1)..(1): n is a, c, g, or t
ngtctgttaacttagttgttaaaaaaaaaaaaaaaaaaggttacaatcagcgattttgccacaagagtggaactgacaacccttagccagctgtgaccgaatgatccattattcatgaagcacagaggctctgtgactgctcaccaccttgctcgtctgggatggactctcatttgctctggtctcttggggatattttctgattgtgaccacacagagcaagcccactggatcacttatacccaacaacctccctaggctaaagattcagaaggacaactttctctatttcaatgttatagaaaacatctttttgttgctgttacaagctaaagacatttctcactgtatccaaaatgggaatcatctgcagtatggctttaagccacatggaagcaagtaatagtcaaaaagaagtcattccaaggggacaagtggagtgttttaaattccaacagctgaggccaaggtgattgatcgtagcacaactgtagggactgtggagagatggtcttttcagaaaaggaggaaaatatcctagtaacattaagtatggaaattgttctttttctgtccaaagaaatggagattcacaaaatcttttgtagtgagtgcgtggatgctaagttgcttcagttgtgtccaactctttgtaaccctctggactgtagccctccaggctcctctgtccataggattctccaggcaagaactctagtgggttgccatgccctcctccaggggatctttctaacccagggattgaacccgtgtctcttatatctcttgca

SEQ ID NO: 35786 - DNA, 1219 bp, Bovine  19866880461049
  misc_feature (1)..(1): n is a, c, g, or t
ntgagtgtagaataatctgaaattcaggggaaaaattcttggtgccaggaaggaaagctgcttctgcataaagggtgtcagaagtgtaaaattctacaagtttactccaatgcgtaaaatatgaatctttgcttcagttctatccaagtaaaataataaaagccatgtttgattttaggtagtccctggaggattcttccactgccagtgtctctgcccctaatcgcccagatatcaccacaggtctctctccctacctacaattaccctaagaattccttgtggttccactgttcaccctgttaccaaggataaatagcgataggctgagattataaagtagagatgggaaagagcagcacctgagcttgaattaacaaatgagaacagacaactggaaaggagggacatgtagaaaataatagatgattctagtttctttctcccagcttttctatatatccagggtccctcccaagtcacttttacttgagaaggctgtggtcaaccaaatagggatctaaggagaaggcagccttcatcttttcttccccaaaggaccccctcggccactatcatttaggagcccctctagtgagataaagaatccacctgcaatgcaggagacctgggttcatctcctggattgggaagatctcctggagaagggaaatgactacccaccccagtattcttgcctggtgaattccacagacagacgagcctggcaggcaacagtccataggttgcaaagagtcagacacgactgagcaactaacactttcactttcttcccagtaagatagaggggatgtggaggacagaggtgatggacgagagagaggaaacagatgtgcccttcatcttggaagcagcaagtgtgactgccttcttgcctgattagtcctggtctttcagccctcatctctgtttccctcctgggatgagtctctcattcaccaatccctccactccccccattccctctcagtcttgcctatacagttccaagagaattacttacaccaagggggcttttcagagcgctgttggagttgtagggtaggtgaatgaagagtgcgaggtggagaaaacgggctgtcagaggcttggttgctgtgcatagagtcaaagagagctggacaggtgagggagagagagggaaggaaaaaaaaaagcccatgaagaattcaacagccacaggttctaaatataagtc

SEQ ID NO: 35787 - DNA, 1388 bp, Bovine  19866880665130
  misc_feature (1)..(1): n is a, c, g, or t
natgccttatctctgacgggagctgattggtcttcctcagtcacactcttttgttctggtatttggggccatttttaaaggagagtgagctctatagatgccactctagagggttctgtgaactggaaaccaccgagaaccactgtgacagggagactgtccttaggtggtatgagcgtccttggggaaaagcagagtatcagagcaggtgatcatcagcaaatatttattgagtgcttactgtatgcaaggcactggggatacaaagaggtatacgtcgtggctctgcccttaaggagctcacaatctagttggagaaacaggacttacatacatcacagatcagtaacaccacaggggcctgaacaaacgccaagtgaacagtacacataatacagagagggaagcaaggggttgctcaaggctgcagtggggaagggggcgccacggggacgggtacaagcagagtgccccaggcacgggagcagcactcaaagcgaagctcagcctggcgcacacttgtgggtccgagagacgacgacggatttattgtggcgcaggtgaggtttcgtgcagggtctctgcccacaaggtgggaacaggttagctcttattgtcccgaatctttcacagatgtgtctccctttttctcctaatgccaactgtttcctgggtaaggtgtttcactgcctgaatgaaatcttagatctctgccacagcttctgctcactggtcagtcagaacctgggcccacttggatgagcgtgggggctgcccagctcagcatcctggtaaaggtgagtcagcctggccgctggcctgggtgcagccccgtccaagggacaccagggtggttctgcacgtgggggatcacggtcttttccccagtacacacacacacaaataacaagatacaaaggtaaaaaatgttctatcagtttttgaagcaggtatgtatgtgctgcttttggtgttcaaatgcagttaagccccaaatggtttatgaagccaccagatacacactggttttgttcctgctttctaacattcaacctccggacttccttgaactaaaccccctatttcaccgagattataattatctgcctgtagcacaggcaggtctatgttatctgaaaacacaggttctcgccagcccagtacacagcagaatatactcatttaaagctggctgctaaattcctactgagaatgagagtactttcataggaaattctgtgttctgtggactcagtacaaagaattcattttttgagtcgagaaatgggactgtcggcaggccagttagtgctgtaggattttcaggaagacttttccaacgcatcccctttgcccccttcatccacatgggcggtagatctaagagg

SEQ ID NO: 35788 - DNA, 740 bp, Bovine  19866880681987
  misc_feature (1)..(1): n is a, c, g, or t
ntactggagtggggtgccatcgccttctccgtttccagatactaggggctgccttcccaatacggctaagtaggatcctagactttccttctgtggccccctccttgcctccactcctccgtggcttgcttccacccgcaggtggctccgcagcactgcgccacaggcagtggagggctgaagagcttgtggccacgaaggtcactctttcagactggcggctagcactgggatatttgagatctgtctacagcattcagaaagcacactgtgcttggttcaagaaccctaaagaagaaactaaggtagggacatggactcttcaggggatggtgaggactttcaggacctctggcccaagacactgcgggagagaggggtataaccagagggcatccccacccaggcagtgccagctcccccacccctaccccgacccctgcctgagggagattgcggaacgccgtggggtgtgaggcaaggatggggttgtgagatgttggcagtttgggaggacacgaacgcgtgacacagaagatgcaggtgacaggggctgatgattcagattaacagggcgcgcagatctcaggaaatgcacactagggatagaggatgcagatggcagagaagcacgggatggaaggatgtccctagcgcagccaggacagcagctcaccttgttcaaggtgggcccgaacgggcctcagctgactctctgtagcgatatcgccgatcacgat

SEQ ID NO: 35789 - DNA, 930 bp, Bovine  19866880699071
  misc_feature (1)..(1): n is a, c, g, or t
ncatcagtgaggccagaggacaaggtgaagaggatttctttttctcaaaaactctcttaagatgaacaaatttcttactgtcttatgagtacatcaagatagctgaaagactggactaatgcccccatgcctaccccaccttaactgagcctccatactgaagctcacatctctatttcagctccaagcattcattttccttctgccaggacaaaggtcaagtcacacccaagtcatacttggagatcaggaacaaaaccctctaaaatctgaatatgcaccatgtgagaagagaggaggagaagggaccaggaggaacgcagagattccttggtgaccctttgtccttggacacccctcctccttacactctggattaaacagcattagggagccaagagaggaaacacatgtggtggttagagacctgtgcctgcctgttcccttcctacaccccgtcatctcaccacaccctacacctctccttacactccccttcagctcaggaactgggagctacagagaggaggggaggaggaggaggaggaggaggaaacaaaattccctgcccaactccagccccacgcccagcacagacaggaggtaggcaagcctgccgagaatactcagagggagtcctgtgatcagcaaataggtcccagcctggaaaattcgctgagaagagatcaaaggtgaagtaagaaatggagaggaggatggaggagggggtaaaagtgggggatcctgagaagcggaggaaggacacagcagggcttcagacttgggggcaaggtgggatgggggtggggaaaacagctagatggagtaagagttggtgtttccccgatgtctctcagggaatctttccataaccttgtaaggagacttgcacaggtgtgacagggaggagccttggtgctcttcctggtt

SEQ ID NO: 35790 - DNA, 951 bp, Bovine  19866880744551
  misc_feature (1)..(1): n is a, c, g, or t
nacttgccctttagctgagtgtagggtctgaagttttcttttgcaacaaagtattaggaaagagagaggaggaaggggagaagagcacagaaaccggctgtggctgttggaacaccgcggttaaagcccagcttctcccagaggtacatctaaataaatcctggcttatttcatggctatttctgtcaggcttctatttctgctttgttaactatgaatttagacctttcatgttccttcagctccacatttgtgaacacattttcctttgctattctattaccatctcctgttagagagttaaaatagaacttcaagaatgtgatagtgtacattcagtagcaaaccaggaagggcttagtggcagaaagtgtgaagggttaggaatcttagacatagaaaaagctcctgcttcggagaaaggataaagcctgccacaaacttcggcttgcttaaactgtacagggaccttgagaatgtcacaagtcatggaaactgggtcaggtcactagaatggaattcaaagaaatagcctgtaatcaggaggggtgtgtatgtttaagacctgcggtgcacaactggaaatgttaagtctaaggagagcgttgtctggtggtggaacaacagagaaaagcaggtggtgaagactagaaaggtcaggatctgtataaagattagctgtggctttctaatcaaagcttcagagttcacgtgaagggtaaggatttaaaataaaaatacagaaaggaattattgaggactactgtacaagtctataagactaaatcattccatttacttaacggagtttgtggctttcattagatccattggtcagtatttctgagaacttttgcagaacgtagaaaattgatgatatgactcaatttcattttgggagaaaagaataacaggtacttctattcccacgatttagtgttaacagatgta

SEQ ID NO: 35791 - DNA, 2198 bp, Bovine  19866880765284
  misc_feature (1)..(1): n is a, c, g, or t
ntggatgaagtgggacaggcatcgctccctttcggcctcctgctcaccgggtcagtcactttgattggcctccccacagagcccaggcccttccatagtggtcttcactcaccgctgctggtttgctggggagtggggtccagaacctgccacccattgtatcctggagggagatctttccggatcatccagcactcattccagacatggaaattcctgcagaaggcagtaaggagaaaagggctcacattttcagaagatttgccaggtatcagaccctacacttggagaaggaaatggcaacccactccagtgttcttgcctggaaaatcccagggatgggggagcctggtgggctgccgtctatggggtcgcacagagtcagacacgactgaagtgacttagcagcagaccctacactgagtgctttatatcattgtttctcctatttttttttttacatttgaaagtaatttcaagcttacagtaagttgcaagactaggataaacaccacccatatacccagttcatctattgttagcattttgctctatttgctttcgcactggctttctttcagatggagatttcctagaatagggatcttcctttacatactcttatacagttctcaacttcatgcatttaatatttatactttatctaccttattgtctatatttcagtgttgtcagttgacctaattatgtcctttacggcatttgtttccacccagtgcaggatcacacattgcttttagttgtgcaataccctctgtgtcctttgaactggaagagttcctcaggctgtttttatcacattgacattttgaacatagtcttgattgaccgatttttatcagagtggccctcattttggacttgcccgatgtttcctcatgattaggttcaggctgtgtgttcacagacagaattctgcacaaatgtatgtcctccccaggtacactactgctcattgagccagagaagtttcagccctcgaggagctcagagagggagggagtgctagggacagcagctaattctcatacaaactcaaaggtcttacctggaaactggctggaaaagcaaaaacaggaaatcagatttggggtagaagagaggagaaaggaaccaggggaagcaacgagacatccaaaaataaagggacacacagagacacacacagatgccagccaggagggagagtggggcagggagaggagaggtcgagagagatcagagtaagtatgcagagacagctagtcctggctttgccctgagagagaaacggagaaatgtgcagacagacagaaaggctcagtgaaggaagagtaagatgaggtcagtattcagagggctcacaatctgttcatttggttgccaacctcagagtacattaactcatagtcttctgtgtctggaatgagcttgatgtgataatctgattagctggatcagctttctggctgaggactggctgagcactggcaacaatgtatggggcagaaattccgtaaggccagaaagcatcagaattttcctgccctacctggaatggagttagagatctgcaggagacagtgccccttaccatattttgtctcgtttctgagttggcagcatctctgcatgttggtcatagtaggtgtcaatggtcaagttcgcatccgagttgtgtgcagaacggaaattggaaacaacacgtgttggaacacctaagcatctcattactaaagagaggaaaagcatggggaattaccaaatccatttcaagcagaatcactggtctcaggtacatactttgtcacttttaagctggaggagagaaaaaggccacggtgcttgcagatctgtacctacacctcctttatcctcagagcaccgcacccaggcccagaaaccttgcagcctacctgtgcgatccatggtttccattccaccagagaaagaaatcacttgaggctcttaaaacaatttacaacacttaaaacaattaacaacaactcaattgatcatttagggcttttcccattcagcagctttccaaaccaaaaacagagaacctaaacaattgataatctgaaagaaaagaaaaaaaatgagacctgtgctgtggtcagaagagaagcagtgtgaccttaagtagacggcttaacttctctgggccttagtccttagcttatatgtaacaaaat

SEQ ID NO: 35792 - DNA, 3289 bp, Bovine  19866880770691
  misc_feature (1)..(1): n is a, c, g, or t
ntccccccctcctttatttgtcctagcatccacctctgcacttaacagtcgttaatacaaataaaatgagttcatacctctctagatgtgtactgagcgtggtgagcaagttcactgcctttcacggcctgtggttaaattagatgccattaatctgggtgttcctgagcaaagtatgaaaactgagctataatcaggaaaggggctcaaaggaaccaagttaatttgctattatatagatggatgggtgtccctagatgaaccctgttttaatttatatctgagtattttaggagtgtggacttccctcccctgggggaataaagtattgctagatttctaggactcaatcttctattaacctatcggtttttctaaaaatcaagtcactgttttttttttttaggagtgaaaatctctgaatataattactagtggtattggaacatgaatagtactgatgagtgcttctttctcaatttgttttcaatattttaaactagatgagccaatggatatgtcagtgttatctgaaggaggagagtcttttcagaagaaactccaaggtgatgagccagcagagatggaaaacccccctctccccactgagcccactatatcaccacaagcctcgacaccagtatctcagagcacaccagtcttcactcctggttcacttcctattccgtcccagcctgagttttctcatgtgagtattgtagaataatacttttttcctcctaacgtctttttttttaagcaactgtattgaggtatggagaaggcaacggcaacccactccagtgctcttgcctggaaaatcccatggacagaggagcctggtaggttgcagtctgtggggttgctaagagtcggacatgactgagcgacttcactttcacttttcactttcatgcattggagaaggaaatggcagcccactccagtgttctttcctggagaatcccagggacggggaagcctggtgggctgccatctatggggttgcacagagtcaggcacgactgaagtgacttagcagcagcattgaggtataatttacaaaccataaaactcacccattttgtgtgtggtttagtgatattttagtaaacttatacacttgtgggagatggtgaaggacagggaaacctggcgtgctgcagtgcatggggttgcagagtcagacgcaactgagtgactgaacaacaacaatagcaatagacttgtgcacctgtcatggtctagttttagaacatttccagagtcacctactatctgatgtactttttatgtttaaattttatactatgtctttaaagttcttgaaatgttactttgaaattgaaaggcagcattaatcattattctaccttaacgccactaacttctcactaaatcaaccctaggctttctaccagatgttattaatgaaaatttcttttccagatgttcaagggcctcaaacttctatttggagaaaccacttttgggagcctcctgtttcctaatctgtgctattgccttctattcccggtgtagaactgtcacctcccttccactgtctgcagattgtccttacctgtctttgtgttggattcctcttgggctccatgtcttcgtgcttgatttatgccctcattttggtggaggacattctttagtagcagactttctactctcatacttgattcatagtttgtaggagtatagaattttatgttggaaataattttcctttaaactttttgaaagcatagcttcaccatcttcaaagttcagtgttgctgttgaggagtgtggccagtttgatttttggttttagtatttatttactgatttggctacattgggtcttagttgcacatgggatctatatggtgacacatgggtttagttgccctgcagcatatggaatcttagttttccaaccagggattgaacccgaatcccctgcattacaaggaggattcttaaccactcaaccaccaggcatgtccctgtccggtttgattttgttccttaatatgtgagctgttatttttccttactggaatcttatagaattttctctttatccccagtgttctaaaacttccagatccttgacataagtctatttttattttgtatttgttagttctctcaatctggaaagtcaagttgttcagttcagggacatttaattatttaatttcttcttttttttcatggaatacctattatttggatattcaaactcctagaatagtcttgtagttttatttttattattttgtgccctacttcccatctccctttctccttttctttaactttctggatgatttcctcaactgtttttttttttttttaattaaaaagcccccactttattgagatttaactcacgcaccatattgttcagtcttttaaagtgtacagtcaggtggcttttagtataaattgtgcagttattcctgacattctaattttagaacgttttcatcacactccctccaataaaaagaccctatgcttattaaccgtcatttccatttcccctactcccagccctattcaatcactaatctactttgtgtctttatgattttgcctgttctgggtatttcatatacagtattatacagaattatacaatttgtgattggtttcttcagtataatgttttcacagttcatgcatgttgtggtatgtattagaactttattccttttaattttgaagaatactgtgtgtatgctgctgctgctaagtcgcttcagtcgtgtccgactctgtgcaaccccatagacagcagcccatcaggctccccgtccctgggattctccaggcaagaacactggagtgggttgccatttccttctccaatgcatgaaactgaaaagtgaaagtgaagtcgctcagtcgcgcctgcgtcttagcagtcccatggactgcagcccacctggctcctcctccatgggattttccaggcaggagtactggagtggggtgccattgccttctccctactgtgtgtgtacatatcacattttattcgtccatttatctgttgatggacatttgggttgtttcccccctttttggttataaataatgctatgtacattcatgcacaagtttctccatgaatgtgtgttatatctattatatgtagtcataatttatttctctcattatatataattaggagcgcaattactaggtttaaccatcttttaacctttctctgagcaattattctactcttgggttttaatttctatacttttttttttctcaaatg

SEQ ID NO: 35793 - DNA, 1045 bp, Bovine  19866880827575
  misc_feature (1)..(1): n is a, c, g, or t
ncccttcctttctgtgtgtgtgtgtgtctgtgtgtgtgtgtgtgtgtgtgactctccatcaaagggtccccttcctttctatgtgtgtgtgtgtgtgtgtgtgtgtaaagggtagtggcaggaatgattgttctctccctatcattacaagatacatttttgtccccccttttcagcattttgacctagggcttgaggagacgtgagagagatggtggcccagcctgtggggtgggcagagaagataaaatagtaagctcctagcatatgccttggagctcatcccagcagcctggttcccttggcctccccactaatggaagctgaaaggaggggcagtgtctgcagctgctctgggctgactggtgtttgtggggacagctgaaagaggagccagcaggggtggggctgtggctgtcttgagccatgtgggtttttccaggaaattatccactattctccagggacatagacaggccaccgtgaaaaatgtccaaacctaaaaaaattcagaagtaagccctgatattgggtataattgtcctaaactccttgaggataccatgctaaaactctttgattgaaaagatccagtaggtgtttgtatatcagtctgagaggtccctgagagtaactatgcatctccctgtaagtattttcccaagcatccccaaatcttcatctgaagaatggctaagttttttggttcaagttctattctttcttacatcattccagaaagcatccttctcttacatccatgtccaaaaagacaaggttcgagaattcagcgtgaattaataacatcagcagatacttcccaaacttcaattgagtcattaatttcatctgctgtcatccctttctccagacttgcaccaaagctcctaggatgaataaagtggtaaaactgtcgattttcacatcgttagagctaatggaggaagccatgatgtaagtatactaaacagaaggaagtctcaaaacagtgactggttagcttcataggaagccaatcacatcaagaagatgccagcctcacatt

SEQ ID NO: 35794 - DNA, 839 bp, Bovine  19866881146020
  misc_feature (1)..(1): n is a, c, g, or t
ntttttaatagaatatttagaaattcctcctttcaacaagcagtacacagaatgccagcttcgagcaggagctggctacattctcgaagacttcaaatgaagcccaggtaaggcgttcctttgtgtagcttcccaggggaggcagtaatgcaagtccacttgctggactgagcagcggctggatggtagagattttgggaactgagacactgccaaaatgttgcataaaatagaacttttactgtgtacaaggaagagaagtcagaatcttgggttacatttaatagcattggttctgttgctgggacaaaagcagatgaaaatttgtgtttaacagaaatctttttcatggtactggctaaatatatggggtgtggttgtcccttgagtacttagacccccagaaagctgcaggtgaggcaggaagctgcttgggtaggagaatagactcagtcacattttggatagtatcgggaggtgttcaactctgttttctgtgactcattaaggaagctgttaagcagctttccatagtcatcaccagacccactggttttatgccttttcttccagtgtaacacagcctaccagtgtctcctaattgcggatcagcattgtcgaacccggaagtacttcctgtgccttgccagtgggattccttgtgtgtctcatgtttgggtccatgacagctgccatgccaaccagctccagaattaccgcaattacctgctgccagctgggtacagccttgaggagcaaaggattctggattggtgagtagttgtgagcctgtctagaacagcagacaggaagatagcaagcttccagaggggaagaat

SEQ ID NO: 35795 - DNA, 702 bp, Bovine  19866881205267
  misc_feature (1)..(1): n is a, c, g, or t
ntctgcgactaagtggatgggaggatgctgtgtaagagtggttccaacactcccaggaaggggcgtgcatctcacattcaccctgaccttcagaatcctgccttttggagtcctgaaggcctattcaaagcagggctacttgggctgggaggttcccatggatgacagcctgcgggtttggagccctgtcaggtctaggacttcatccaccccctttgggcttctcaccaggctctgcctctgttgtcttctccattctgaagcccctcctcattgtagtactcgtttaccagcaggtccccgcccgtgccctgggctgaggtgaacgtggtaacaactcgggcagggattcccaggcctcgcagcactgcatggaagtgggcagagggtcagggcaccagagggggctgggatgcggggatggggcctatggctagcattctccgtgtctcctctggacactaggcacgttcatggtcttaaatgcccgggtgacattgtggaaagagaaggggcacaggaatggacacccgcccgacctacgctatatgaaggccaagtaatgagaagcagacaggttacacagcgggtggagtacacagcagcgggaggcttcaacagagcgctgggactggcttttctggggcagaggcagggaggagctttggggagtttgggagcagagctcaccagatgggccca

SEQ ID NO: 35796 - DNA, 696 bp, Bovine  19866881223601
  misc_feature (1)..(1): n is a, c, g, or t
ngtgcattctttaccgctagcaccaccaaggaagcccctctaaggtctttgggtttttcttaacaattacccgagtggttatggaagagacagtactatcagagctcattgctgtcagaattcaaattcaataaatatttatcaaccacaaacacatggtgactttactaccgtacttacatccaagtgtaacagataaacatattccccacagtttaaggaaataccagtgattactgaaattctaccaatcaggtctgcagctattcccttaaagccagtacttacattgattcgcacagtcaaagggcacacaggtgggtaaatgctcagagccaaatcatccacactaaagggagaaagaaaaaataaccattaaccaagaaggaacaaagctcaactaggtggtctccaggacacaactaaggatgcaacgagtgaggaaataattcccagaaatgcatcagttccttaaactgggcaaccaagaaataaccaattcaactggtatttatggaacacatacataccctgtttcactaagaagttgagggtggggggaactcccttgaccagtaggatgggacattattaattcatttgaaaatgtttggatctgaaaccataagtttaataactgctattgccagggttcatccctgaatgccattaaagtaggtaccacttttaatcaag

SEQ ID NO: 35797 - DNA, 905 bp, Bovine  19866881269449
  misc_feature (1)..(1): n is a, c, g, or t
ncaagtctggggtttgcagtgagaacagaggaaagaagctttgatgtgatggaaataaccaagaaagaacttccatcccccaacctgttcatgcatgtggttttcctgagctgagcttcacgtgtattgcatgccatccagcttccaaatatcctagcctttctacccacatccgaaatctgcatgaacccctcctcaggtcccaaacccttctccttaatctggttctctagtatgtgatccctgaaatctgctgtttcttcccagctccatgactccctacctctcattcagacgtacaattgcaccccttccctgtggacctttgttctattccccatccacatcccctccacccccgaaagtataagaagagtatgggtgctcaccttattgggattgtgttgattttcccatgggacattgccggctttccgtaggagggtgcgaggtgatttcactcacccagagttggggaatttgtgggaaatctgcaggtgacagaaatagacccccgtagggccctagagttccctttcccgcgaatctgggacatcccacactccaaaagccacggacactcctgatggtgctcagggactctccatgcttcctcggccagctggagtatatccagcaggaataacactgactttgcccatctgttttctaacaggatttgaggggtgctccatggtgcctactatttaccccctggaaacactgcataatgccctttccttgcgtcaagtgagtgaattcttgagtagagtctgccaactgccacactgaggcccaagcacaggcgtctgcaggtatacagaatcctcttatcttgaaccactatctctgcccccactcccatgctccccagagcttgagtggtaagttaaaaagataggcac

SEQ ID NO: 35798 - DNA, 1070 bp, Bovine  19866881290563
  misc_feature (1)..(1): n is a, c, g, or t
ntgctgcctgggtttcctcctcgccctctcattttctctcagtccttctccactctcccctgcgcccatccaggactttatctagaataccaggtttaggtttccagctgcctactgcccatcacagctcagatgtcttctgggatttcaaacccaacatgcaacaaacagaacacatcatctttctccccaaacctgttctttcccattggccctactttagaggctcacccaaactggaagcaccatctaggcacatacacaagtccaatctagcccacttctataatatgacttcatttgaaaagttctgctagtttactttgtccttcaattttttcaaaaccttccaacttctaatctgtggttgttggatacacattagatacaccttggaatcatatgggaagctttaaaaattcccaatgccaagccacaccccaagtcaattataacagactctgaccgagagacctaggaatcagtatatttgaagttctccaggtgattcaacatacagacaaggttgagatacatgactctaatatgaccccttccattccattctaccaaaagttctttttcaaaaatgaatttctaatcccattgactcctctggttaaaaccttttaccagctccccattgcccagagaataaaacccaaactcttgagctgcatctacaagccacttcaagatctggcccagtcgggctctcacgcaactcccccactccactcctcccactcttggaaagggaacagagtagaaagactggagacagggggaccagtcaggaggttgctgcaatcatgtaaacaagctctattccactgattctcttgcctgcacattggagtcacccaaggacttaacaatatttttgatgtttgggtcaaatttctgacttaattggtctggggtgcaggctgatcatcaaacttcccccaggtggttcttacgtgcagcaaagttggagaacagctgctctgctgctgctgctgctaagcacttcagtcgtgtccgactctgtgcgaccccatagacagcagctcaccaggctcccccgt

SEQ ID NO: 35799 - DNA, 1768 bp, Bovine  19866881468825
  misc_feature (1)..(1): n is a, c, g, or t
nggatctgtgccccctccctgtaattcttgtaagaccgtggggacagactgggtagcgtgtgcaacagagaaggcaagaatatcttagcaggagctggacagtcatgtctgttctcatcagctgttttcctcgtgctattcttcccccacccccatgccgtcccttcttccctttattgtttattctctgtggccaacgccatacgacttaatacacacatatgcataggttccctggtggctcagaggttaaagcgtctgcctggaatgagggagacctgggttcgatccctgggtcgggaagatcccctggagaagaaaatggcaacccactccagtactcttgcttggagaatcccatggagggaggagcctggtaggcctaccgtccatggggtcgcagagtcggacacgactgagcgacttcacttcatacatacgttcatatatatacatatatatatgtgtgtgtgtatacatacatatatatagagagagaacactgccatttctcttttattgtaacctgagtatagggctgtcttgtcaactctatagggaactatttttatggtgacaaagtgtaaggaagggaagatgagatatgagcacaaaaatggatcaattctctcgccattattcaactcaaaatctaaaatgtatcttgactccagaaggattaatcatgagaagggcaaaggcagatctcagcagctagcctgatctgtcacgagcatcacccaaaggaggttaaccctggctactgggattcacaaaaatccatggtatgcagtgtagcctgaagtccacagttctggagaacaccttttaagggagtctgattaaactaggcacaacaaaccacagagctgtcatcacaagctagacagattaaaggttttggtaacaatctgtattcccttctcaccttatgtagactagcagttccaaaacttttcctgatgagaacctactttgattttcttgaagtttcatgatctctagtgaagagggactgttaaggcaaaaccattgctagaatggggagctcagtgtgcagcagcattcgggtcccttcctgaaagcagcatggaggtaagccatggacaacctcagggccttcaggcggtttaagacagatttactgagcacccaccatgagaaaggtgctggtgtcggagtccgcagcacttggctgccatggttccaagggaggagcagcttactaagtgggatatggcagggagatctaggttgtaaaacacactcagtagtattcaccttgttacagcttaaaaatggggcttcagatgactccacttcttcctcaggtcagccttggtgctgtcagaagcaaagatgtagctgatggattcataagacagatcccacacctgagactgagtcagatgaaatgtttcagccaccagctggtactcttgagaaaggcgtgttgcaaaaacacccttatcatcagtctgtcaatgtaagaaagtttcaaaatgaacgaggaaatgacttaaaaaaaaataacaactctcaacttttgttgagagtattttcctatttaccatgcttttaagagtctaaacaggggcctacaaatgtatccaggcatgtttgttactgaacagtcttctttatcctttttaagaacataaaccaccagagtagtggctctcaaccatggctgcatgtgcaaatcaccaagggagcttttaaaatgcatctgtgcccaggactcagccccgatcaatgaaagcattat

SEQ ID NO: 35800 - DNA, 892 bp, Bovine  19866882115403
  misc_feature (1)..(1): n is a, c, g, or t
ngatgcatgtacaaatacatgttgtatgtcctgggtctacactgtcttctgtgcccaccatcaatgctggaccctctccctgacttcaaggctctccatgctcttctcactcctcacatgcctagccttatatttatccatcggatcgtctcctaaccccacaagtcctccagaaagaacatctctgagcctctgtctctggtacccattgcgcccaaagccctcaagtgaacacccctacctggagctcttcctgtctatttagtctttccaagcccaccggctccaatagtcttctttcatttgactctaatctctttaaattccatttgcgttttccttcagaaacacacaggttagttcttcaagtcctaatctgacaccctcccaacttgacttataagctccgtgaaggcaggacctggtctgatatttagcacctacccccaccacatatacaccatccctaaacgtcagtgctaccgagttggcttcagaattgaagacgtttttattcttctctttgttctcccgtgacttccccggcaagtttgaagaggacatcatagatatctgctttgagattctgaacaagagcctgtacttcttaaagaacccgtccaaagactactcgcagcggaacgacgtggtgtacatctgcaggggtggtgagcgccatggtaagaccggaagcttccccggccccaccccagcgtccccagcaccggcacttcggaaactcatctgtctgtcctctttagatcaacagcaacgacgacagcggcgtgctgcaggggaactggggagaggactactcccgggggggtcagccccctggagtggacgggcagcgtggccattctgcggcagtgggcggccaggggcgggcagc

SEQ ID NO: 35801 - DNA, 2884 bp, Bovine  19866880282276
  misc_feature (1)..(1): n is a, c, g, or t
nctctgggagttggtgatggacagggaggcctggcttgctgcagtcctgtggtcgcaaagtcagacacgactgagtgactgaactgaatctactttctgtctctatgattttgcctactctgaacatttcatatcagtgaaatcacacgatatgtgatcattcataaataaaatgatacctactaaatgagtataaataactaacaatatccaggagatggtgaggactgggaagcctggagtactgcagtccgtggggtcacaaagagtcagacatgactgaacaacggaacaacaacaatatcacattattgccttcatttgacaaatcaaatccagacatagtaaagaacaaaatgtaaagaaacaaatagctaggagtaagtcaatcattatgaactctagtactctcctaggctgttacagttaaatttgccttgatttatttttgtctgaaaaccaggaggttacctcatgaggctcgccctgtgaaccagattctgagtttgatgggtgtggtggaaatacgccattctctttgccttccaagcattttgagcacttatcctaaacttggagatttccctacctacaagtctttactttctcaaggtaggcacctaaaattcccttctacctcccttgcatcctcaagtgcatgcttgagccctgctctccaccagtcaaaatcatctatgccagaactcagatcaaaacatttttggggtacactccactcagagcagaaacaccttgcacacaggcagatgttctagaggaatcttcaggactagaatcagaagtactagttggggcaaatagtggtggtggcagatggttcttctgggacagtcctgagtaatttgagcatcatttacagcttaagtttccaagtgtggccctctgaccctcctagagagtttggaagtcactcataaatcttcatttaagtcctattctgcttaaatttgttgggatgtatttctgttaaacaagaatacaattgctaacacaggactctaccttagaggtcccactaatgctgaactgtcagtagaagcttgccccaaattcacttgtgagctttagagccctggcaaatctctctttcagaaaagccctcctttttaggttcgactgggcaaatgctctctaccatttagagtgtaagaagtttcactgatgcaatatgaatcttttgtgatatttgacactaattataaagcatttatttactatgctgatttctaaggtactctctgtagaacactaccttggaatcattatctctttgccaagtccatcagtctaatggtttaggtggtcttattaatcaacctccctgccctactactttctttgacacatattcatgtacaacaacagctttaaagttcaatgtctaatagccttatctaatcatcaaggatgaatggaaagttctaaggaaaaatacgaatttgtgatttttgaactttgtatgtacatgttgtacacttaatgcctaatcaagaacatagtcaaccattgctctcaacaaattccttcttatactttttgatataaagagactccttagatgctagtgggccatctgagagacctaggagaggatggtttctgtgatgttgaagataaattctaggcaataatctgtgaatattcttaaatgtatcatttatgttcaatcggattctttccctaacacccttcatcctcaataggttactgcacataaggaagagaccaagttttgagtttcttaaatcactctgaaatgaaagggctccagtggatgttttgacattttatctactctatgtttggtttgctctagcatgtgggcatccacagaaaatgtcacaaatctcagttgatactttctaaaatatattgaagttgatgtctacaatagctcccaaggcacgcagtgtatgcataccccgtataggtctatgaatatatctgtgaacctataatttcagattgagaaacaccaggcctggagtcttactactgtgcgtttttaaggcaacacatagtcattgcaaaaagagggaccttgttaacataaagtttgtccatgaggactgtatagaattatattttaggatagaaaattttcccaaaacatatgatcttgaaaataaaaataaaaacccatccatgaaaactaatcacagagtatcctaagaaaattaatttggtatatttaaagattactgaatgcaatcatttattctcaacaatgtttaagacaatgcagatacacaagacctgaatgggggagcagtgagagcctcgaggcatataattttattggtgtgaattcccagaggaatcacacttgaaactgactagcaaaagatccatttgctaggaagtcatcttgaaatttaaattcatatcctgagatcgatggctgaaagacaaagtaaacaccgcaggcaacacacttttggagaagtcatggaactatccttaactgagtctttctctgactaaacttgaactattccaatatactaaaaatttgcacatttatgagcatttaacatgctcacggttaggctgaattccacctcagtcctaggtttctatccaatgtaactttccattacagcaatgactagctaaacattgcagccttttaagggttactgtgatacagctccttaattacttttgctcccgcatgagctctgtctctggggatggggtatgtttcaggcgtggaagagtgttcagtggggaacattcccatgagctcaagctggacataacttgtttttaaggcttactttaaatatctggcagtattctcattagcaattccataaagcagcataatgcctcttattctcatttctgcctagtccctctt

SEQ ID NO: 35802 - DNA, 1317 bp, Bovine  19866880454081
  misc_feature (1)..(1): n is a, c, g, or t
ncaggaggacaagagcactctccagtgacgtgatgacatacgcctccgttctggcaggggcatctctgctcacactgtggtccatgcttgccagggggacaaagatcctcacagctgagggattaacatgtgacaaaggacaccatagtttatcccaacctacaacccttaggttcacaaacacagcagcacccaggaccctaaaatagacaagctcctctgttcaatattgttcatttcattaacaacaagagcaccaatcatattgactggaagggtcaaggggtcacctactccttcccttttggggggatattttctactgaaaccatttcgatttgaggagaatctgtcctatcagagagatgactctcactggccacacactcttagttacagggactatccatgcaactctcaaaaagcccatgggttacactgggagtgtacttggtgtgtttgttctaatctcaaagaagaatgaaacatcttcacatcacctaattagtacatattccttgtactcaatttttagcattctcttctgcaaaatgatgaatctcctccatattatatgaatatacctcctactttaagcctttgtcttttttactctcctataaaattgctccaaatttctcaaagccttattcaactaggaccttgataaaaacccataaaagcaacattaacaattaaatagtctgagatgctcatccatttttctgaaaatcagggctttcttggctaattcagttttttctttagctttactttacagccttaactctgtcagcaggaaacagctacctcatgagccacattttttcaagttttagttctgtgatttacaggtgtaaaaattttctcagtaagggaacaagattttttttaatctcacttttttgggcaaattctgcctcttagtctgtttgctaatacaagcaaaccaagaatgcccttcccacaaaataaagaaagtagtagagacaagggcttccctgggcgctcagctggtaaagaatccacctgcaatgcaggagacctcagttcaatttctgggttggggaagatccccaggagaaggtataggctacccactccagtattcttgagattccctggtggctcagacagtaaagaatccgcctccaatgcaggaggcctgggttccatccctgggttgggaagattccctggaggaggtcatgataacccactctagtattcttgcctggagaatccccatagacagaggagcctggtgggctacagttcatggtgtcaccaagagtcggacacaactgagcaactaag

SEQ ID NO: 35803 - DNA, 861 bp, Bovine  19866880458116
  misc_feature (1)..(1): n is a, c, g, or t
ntatgtactaatacttattttgaatatttataaatacttcttatatgggttaaaatagtggtgtactttcttatgagatatagagtttctggagactcaattatcttttcatctttatgcattaatgcataactttgtttgaggggagagtgaagtttttgcaggagcaaaatctaatcaaaacttggagaaacattccatttctctgaacctcattaagtacagataatacatcactttgattcaaattattagacatattttgaaataactgattcactctgataccttacctaaattaaacagctcagctattgacatgatgacctggagctattattcccagcagaaaatttcagtttacaaaaccatcaaaataaattaagctgatgttatccaacctgcctgatgagactgagggcagccagaggccagactttatccctgagagcctgcatccttgtgcttctcatccccagtcaccctactctctgccaacttctctccaagcatccaaagtctgacttgaacccttcaggggatagtctctctcaaggaaatctagaagtttgggaaagtatttttcttcagatgacagcagttgaagtgtgctctcatagtcagactgattgattccgtggtccccaaagcacatttttcccttgccctgtcttcttctgatctgaacattcagctttcagaaaatgagcaaattatacatgaaacttggggtttctaggtggcacaatggtaaagaatttgcctgcaggagacacaagagacatgggttctatccctgggtgaggaggatcccctagaggaagaaattgcaacccactccagtattcttgcctggaaaat

SEQ ID NO: 35804 - DNA, 1122 bp, Bovine  19866880460072
  misc_feature (1)..(1): n is a, c, g, or t
ncagatcaactagagggctggaattcctgtgttgctcacatgtctagcatttggctgagtgatgggagtgactgagccatatgtccccagtaatctagcacattagcctgagcttctgtacatggtaactggcttctcaacaactgtaagagacagggcaagccccaacatgcaaatgcttttcaaacctttggttataccacatttgctaatgtctctccagacagagaaggcatcataaccaagtccagcttccttatactctacctcttagggggtggagttacaatgcatctgtaaccatttttatttttcaagctatcataaggttgaaatgaatttaaatatatttataagtgatgttagtattttgaattacagtactattatagagcctaagggcattctctgtgaccaggaattcttaaaactgacttttgtagtggaaataattttgaataggaaaacaaagttcaagattcactgagattccacatgagatatgtatattagctcttgttaataaggacatttaatagctgtgggcaatcaggatgtgcatacttgcaaatgccacctaattgtcatatatttgagcattaataatatctaaggaaatgaatacaaggaagttcagtgactctttctatttttgccaacattatattggatacctgtaataattgaactgttaagttgaaaactttactagaatgttttaatctagttatatatataaatgtataaaatggtaggtattcctatctgtgtataatccaatttccatattacacaaagcaatctgttgtttagaaagaaatcaggtaggaggatattgcccttccacctccactctgctcctctaacaacgacacgtaaatctcattaccaattaagctgcctgcatgagagcccatcaaatgcctccaaagtgctctagtttcctacatgtaattacaaattgcagaatactaattttggtgtcaatcaatctgagaaccagtgtgctgcactaatactcaccggggggcattgaatatcaatttctctggtctgcctctagcttaggtcaattccctatccctgaattggctattctgtttaacatttatatctatacca

SEQ ID NO: 35805 - DNA, 1242 bp, Bovine  19866880567252
  misc_feature (1)..(1): n is a, c, g, or t
nttggttggatgccttagtatttgtaatttcctgatttgtaacattaaggatgttggaccagattatatgtatcttccctttcaacgtatgattttgtgtgtgatttactctcataaatatgtgtctgcaacccccaagacctttctttgtttcagaaaccctttaaaccttttgtatgagtagcaataacggatttgttctctcagcccatataattctatttgtgattttctaaaggtctatagtgaaatttatttctcctctggtaagagggcatatccagaaacacacagagacacatatcctaagtcagccagcagccagcaaatagttctcaaatgcttgttccccagacttttgacactagtaccaagtagaagcaaaaaatggaaattaattttcatctaaaatatccaaactgaggtttatttagtcatcaatagcatttctggttaaatgtacttagaattagtgaaaacatgcctaggaggccaaatttgcccaaacatttccaatacagctttaataacacagataaccttttagataaagcaaacgtgctgtgctgcttggagtaagtaataagaatttgcctgcaggatattcgaatgggggaatccatttgaaagatattacaaaccagaaattgtaaggcacaaaaagctgacttgtttgccagcaaggtctgttgatgtgaaggtctattgactagatacaatggaggatcgatgttgtctggggagagaagatactggagcccaatccttgtggcaagttgttaacatcccccattgcactgtcagaattgctttagaaatcaagttgatggagcagcaggaataagagtggatcatttgggttcactggcctgggggccagacattgatggtaggtgggaaagactgagctcagaatgaatgtttcatcagagctacatgaaagcaatttcaatgatggactgcgtgaattatcacacatagaaactgctgattttgcctttgtgaaagtctgaaatctgagctgttgttggttcctctttggagaggcagacaatctcttccacttctactcacccaactcccttttggaactgaacggcagtagacttcatggttctcaattctgtactgtttcgatgcctcactttgctaagcttaaaagaagtttcaaagtatctatgtcatatacttgtgaaaattaaatgatacaatacctgcgagtactcagcactcagcactgtt

SEQ ID NO: 35806 - DNA, 879 bp, Bovine  19866880601668
  misc_feature (1)..(1): n is a, c, g, or t
ncacaaacaaaattacagcaatataaagctagacataaataagaaaataattaaacctaagaaaggaaatactatagttagatacaaaataaaatgttacctccagaacttttcattttaataataagttctatccaacttaagagttaatagagagttaaaaaagagtagtttaaaataagattggccaaagaactaggaaatttcctttacaaaatgctccttcataagcagttaggcaagatgacctgttttgtttttaatttttctaacagagtaaatgtataagaaacaaaaggtcctgttttcacatgcaaattgttccttttaaaaaatgtcaacaggcaaagaaatttagccaacacgtggccctgaaacagattgtttacagatagactgttttccggaatgtccccaagaagcatcagtggagcaaaggacctctgtaaactgaagtatttgagtgtctgcaaatttgtttcatcagatgcccatgacattttttttctctatttggcttcttcaaatggcaaaaaattccaaacaacaggcattattttgggaggaaaaaacttggtactttgtgctgactttttttttttttttttcctgtgaaagtggaaatgttaagaagtacgtgaatacacacaacaggaagttttgaaatgtagaaaggggaaagaagttatatatatatatatatatatatatatgactatataaaggttaaatatattagttgaatttaagggttactctgaataaatattctggataaactcaagtttcatgtatgtgtcctcaatcgtgtctgaccctttgtgaccccatggactgtagcccgccaggctcctcagtcaaggaattttccaggcaaga

SEQ ID NO: 35807 - DNA, 2656 bp, Bovine  19866880701412
  misc_feature (1)..(1): n is a, c, g, or t
ngatgaggttcggcaaggtgtcaggaagcaaatgatagttgagcagcaggtcaattaccaccacatacaaagagctgcaggtgtgctaattgctaaagtctagggatgtcgctgcaacaagctggtggaaacctgtggcagcagcagttaaatatggcttccctggagggtccaagctcagagctaaaggtcgattccaacgttacccctggcacatccaactactcgtagaagaaataaaggtaaataatgccaagggcatgggagcatgggcaaccaggtacattgtaagagctgtcgttttagcctgagcgtcttgattggtggggaatggtaatagatgagactgaaaaagcagcgagagaagagaattcttctagagaagaatttggatattttctgtgggtgatgggaaaccttgatgggttaaaagcggaaaagtgacaaaatcaatcttgccacagagatagattattcaggcagatatgcagggggttggaaagtcaaagaagattaatatggaaggcaaggggacccattagaaggctagggcaataaggacaaagatatttgtggcagcactatttacaggggtaaaaacacttgaaacaatcttagtaacaaccgataggaatgaagctgtgccgtcatgaaaaagaataaagtagttctcttggtttccctgagatcaaatctcttaatcgaagccaccgaggcttcagaattagcgtgtagcatcttgacccattcttttagtggcctacagcctctacattctgggtttccccaatggctcagtgggtaagaaatacctgtaacacaggagatgcgggtttgatccctgggctgggacgatcccctggaggaggaaatggcaactcattcctgtgttcttgcctggagaattctatggacagaggagcctggcgagctacagtccatggcgtcgcacagagttggacatgactgagcatgcacgcatctccattctagcccccatccactttctggcccaggtaggagatgacttgggagaatggagcattagaggagcaaattgggactgtgagcatttttgtaaatctccccttacctgagaattctctgccataatacagaattctgccttctttcttccttaccatgcatcccagtgttatggtgataagaatagacagtaatcttttatgtggcatgatgttatgatgccaatatttggtgaataatacatattttatttaaaaacagttgttatgacaactgcagtgaacactgggattttcatgttgttaaggaaaaaagagtgctcttcctccaactcccaagcctactcctccttcaaaccaaggttagttcttccgtggcttttaaaatgttaacttctggatataaatgtgtaaatgtaaaaccaagcagagctctcactcccagtgggttattcatgagcttgccttttgtccaagatacttcagttctctcctgttgcttaaaggctttgaaggaaaaaaatcctagagctccgtggtatagatttttcagtctccctgaagcatccagaattgttttttatttctcttcccttctgaatccacgaagacaaacccttttttttcttaatacagttttattcacacatcattaagctgatttaccatattatacaccactgtaggcttagcaatcgtgcttttctctcattgtgggaatgaaacaattattcagaatctcatattaaaaaaaaaagagattttgcctgatcctgcaagtacacatcactgggaattttgctaaaacctctgatgttattaaagttcacaatgaggggaggcatggagggatggagattaagcaaattataaatgcaacaaataaaatgctaaactgtaaagtaggagtgtgtggtccttggggctcaattggctgacataaaacatttctaaggaggagtttttacctggggtgtcatcatttcttactttggaaagtgcattttgttggatggtttgctctgtgttttggaactccctgatcccaagtttgctctctcaaaacacatgctacaattgttgtttccctcagtaaatgctagagttttaaacattctgtagtcttctctaacacaacgaagaaagaagaatcaaaagtgattatccactaatgtttggcgctcaaaggcaggatcacacacaataacgagttgacaatacacagcatggtttggagatgagtaaacaaggcaccattactccctactatgaacaaacacctggaagtgagacagtggcagaaaaataaatgaccagctgccaggttaaaagctcatcattcaaggagtgtccttcatctacttgaaagcatctggaaagtaacgggcaccagcattaactgcacactcatttgtaaggcttggcggcatctctccacttgacagcaccctaatcattcatctggtggcctgggagtgtgcagactatgcgtgtgaaaagacaaagtgaaaactgaacaccagcaggattttaccacatggatgcctgccagtggaagcagaggcagactggaggaggaactagatttttcagacaatctttacttgccccctttccctctctttcagatcaatctattccaaccgtctttcagcggttgtttttttttt

SEQ ID NO: 35808 - DNA, 1376 bp, Bovine  19866880745325
  misc_feature (1)..(1): n is a, c, g, or t
ntcttctgggaggtgtcattgagtaaatgcaaaaataaaggtagacaaatagctgtacaacatcatgaaatgaaataaaagttataaaagacagacatccaaaatctgcttgtggacacagaggcaagaaatggttctgaccagtagaactgaagaggcttgggggtgggggaggtgggcagggagcagcatttgacctgtggtatgaggaatgagaatgacaacatactccagtgttcttgcctggagaatcccatggacataggagcctggagggctaccgtctctggggtcgtgaagagtcagacacgactgagcaactaacacttttacctttcattgtcatgaagaataggtatgattttaacaaacagagatgagagcatgaggaaacaatctaagaaaaagataaacacatgccctggaactacagggtagtaaaaatcaagtttggcaaaaatatcagtttttgcgagatagattgatagaaagtaaaattagttaaaaggccagcttattaaggtccttcaaatggtttgctgttttgcccagcaactgtgatgatcaaaagcgtgttttccatttcatgataaagaggtactgtcaagtagaaagctgatttaggtatgatgcaagaaaaacaattatatctctcagaaccccagtgtgtccttcactaagtgggaatttaattaattttgttcaatagtcactgattactctgtgaacattttaaatggtttgactttttaaagtaagagatatgcacagaaatatgggaataaaataacacactcattagggagatagtaagatagaaaataataaaagtgccccagtattgtaaaataaggcttgctggctggtaacaacagaatgacttattaagattggaggtttattaactcaacgattcatttattcgttcaagtttttactgaccatcctagccctcttgaagatgttagggatagagtaacaaaacaacagcacaaaaaattccctatctttaaggaatttgtatgttcagttgagaggaaacacaatggatataataaacatgcaagtacataaagtgttagaaggtggtaaactgcagagaaaaatcaatcacagtaatttggatggacagaggagtgaggagcttaattctaaatgaagtgcatgtggtaggcttgcctgagaaagggatatttgagcaaagaaaagaaggaattagtaaaaagcccggtggacaagtatagatgaaaacttcctggcataagtaatggacgaacaataagaaagccagtgtgactcaaaagggaggagctgagcagaggaatatgtgatgaattcagacaggtaaaggggagggggggtattgtttgggagga

SEQ ID NO: 35809 - DNA, 1576 bp, Bovine  19866880748993
  misc_feature (1)..(1): n is a, c, g, or t
ntgctagagaagccgagtgttggcttcgatctcccagtatcagctttccccacatgcagaaacctggctacgacagctccagactcaggatcttatgtgatacaatgagcccctggcttgcactgtgagcccatcactgtcaagggcagggaggtatgacaatgtccattttgtgggcagctgagcagaggggtggacgggattaccaaccatctctttctataacaaaactttctctgacatctgttaatctggaattcaagagtcccaaactcttctccagacttttccaggtgctaaagagtcttttgcaatgcaggagaccccagtttgatccctaggttgggaagatcctctggagaaggaaatggcaacccactccagcattcttgcctggagactccacatacacagaggaacctgggggctacagtccatgggttcgtaaagagttgggcatgactgagcgactaacatattcaaactcctctctggatgaagaaaacagcaacttgcctaatacttcttattttataattttataagcacttatattaatgtttagccacacatgaatagttgtttaaaagtcattttttacaaatgagaaaatcaaagatctagtttgctgttgtcacatatttagtaagcaatcaagcataaactagacatggctcattttattttatgaaacattgtttccatctattttgctaaatcaaggtattcttcaattcataggcaaaaaaaaagcattgactacagtatgccagggacctggtaccgtgtgtgtatcagtacatatgtggtgaacgaatgagtgtcttacccatgtcacagagtgaagccttagcaaagtgcaggctagaaatgaagatccatgcacaaacgagacccccatttttcttttacatgcctctaccaaggttggcattcctcttaggtactggaagttttccttgttttctttcctgattcagattgccagatccttgtgtttgattttaaatgtattatgacagtacatcctgtttacttggattagttcacaattattctttttgtcttctcttctgtaaaacaagggttactatttcatacctgaccggatccttagcatgtcctttatgtgcttaagtttgtttagttcttgcaaacacatttcgaaactccatttaacaatctaatcccttcatgggtatgtggggcagcagggtgggggagggcggggaggcagcgggggagggggtgggtaatagtgagtaaagtgaaattctacaagctcttgtgcttggctattaatggaatgattcaatctatattaaatgttacaacaactcttaaagggatccatttcactcattagctcaatcatgaggtcctcactgagtttttcatctccaaaatcagaacttgatacatttgagtaaagacttgagaatatggttttgcaaagaacctacttctgtttcagtcctgggaaactgctgaccaaatctcagaacagttagaacataaaccataagctccataattatcagtgaaaccagtttttaaaaggacacctcaccaccaa

SEQ ID NO: 35810 - DNA, 1401 bp, Bovine  19866880784561
  misc_feature (1)..(1): n is a, c, g, or t
ntagaatgtctttttgcttatatggtggtggtgatttagtcattaagttgtgtctgactttttgcaaccccttggactgtagcccccaggctactctgtccatggggtttcccaggcaagaatactggagtaggttgccctttctttctccagggattcttcccaacccagggattgaacccaggtctcctgcattgcgggtgattctttaccaactgaaccaccaaggaaagcccatctttttgcttataccttgtgccaattttccttttgctatttttcttaatttgcatgtgtttgattaataatggtacagaataagaaaaattatgtttataatcaaacatctttgagaataatcatgaactgatctctgtggcctaggctgatgggaaattttcaaaggagggccttgaatacacacagcctggagagtggggaggcctggctggtcgggctggccacttcccagatgcttcaaggagacattattttggtgtacttgccagggttcaaacctacaagcctagttgtcagcaccctgagaaaatagctctatctattgtgggttgttttgttaatccaagtcctaagagtcatataaagtcggggtgctaattcattgttacacagaacttggagaggcgctgacacagtatcctggtcctaccttctctccttgaagatctgacatgtgggaaacgagattttattggcagctgatatagggatcgtggatctgagcaaggtaggttagaaatttcagtgcttcatggttctagccttccagagcccagtgcctccatcagtagtacagctaatctcagaaagcagggcaatcccacaggactgtcatacctggtaaaaattattgccataatgtgatggtaaagatattataactcttccttgagataagtctcataccagccaatatgactcctgaatgcttggatggccatctctagcatttgtcactaaaattttccttttcttgcagttttcctttagatatgttaatacatttaatcagctcactgtctggtctccgaggcctgggagctatttggtctctttaaggggtatttttgtatctctccactctgatgtcttgatttcatagcttaaccccagaggacaagcatgcttccgttacttccttgttctcagggatgcctctggtacatcttctgttctctcaacagctggcactagtgagacacccttgtggatagagaaggaagagagaacacatgattcttgtttctgctttcataatctttttttctttccaactaggttttgctgccaggcacccagcacagtcaccattttaactgtttccagcaagttatcaaaaagaattgaaacacacgaattgattataattttggtttaatt

SEQ ID NO: 35811 - DNA, 1625 bp, Bovine  19866880838522
  misc_feature (1)..(1): n is a, c, g, or t
nagatttctatgcagtttttagtgagaagagtaaagaatatttttgcttatgtcctggaaacattgttaattagacgtgggatgagagaataaattattgcaaagagagaaataagtttacaggaagcttatgtaatggtttgaatttcaaacaattagggaggcgtacatgtttgccgcaggaaatcatagaaatgaatcatagaccctttcaaattagcagggcaagaaaaatataatccatgcaggaaactatttccatcctccgtagattcttcaattgagataggcttcatgtatactttaaattcattagattttatttttccttttaaaattaaatgattagaaagtttaaaaccttgaacaaacgacagtaatatagtttatagggatattgtcataagaaggaaattaatgtgttcagtatgatagggtcaacttaatcttgaacgctttctgctgtctgtagtttcaatatttatgataaagtgaagatactgctattagagattttgaaattaaacacagagtcaaggaagggtatttataataaaggcaaaagggaaataacatttaaaaaaccaagaacagaggaaggaaagagattaaagaaaatgtcacaggttgaaaagcctatagtcctgcagagttcagaacacatggctttagttcagttaccttgagcgtttttggtccaaattccccgtaaagagttattagaatctgcttgaaagtagaggtattattcaccatgaaacctgtctatatccgatgttaatgttacagtttatttatttattcttaacattatatttgatgtgcgttcatgtccacctgtgcttctcactttctttccttatttgggtaatgaacaaacactcatgtgcattagggagtgttctgttgcttatagtcacaataggaccttcatcagacactattgaagaccttagagagttctcaaaattaagcctaaaagtatatggatccctatctttactttctatatttcaagtatatattttgaattactttataatataagctttccccttttttaaggtttgattggtttttaatttatttatttttaattggaggatagttgctttacaatattgtgttggtttctgccaaacatcaacatgaatcaaccataggtatatgtatgtcccctccctcttgaacctttctcccatgtcccaccccatcccatgcctctagattgtcacagagcactggatttgagcttcctgtgtcatatagcaaattaccaccggctatctattttacatatggtaatatatatgtttccatgttactctctcaattcatgccacactctccttcccccactgtatcaccaagtctgttcactgtctgcatctccattgcgcccttgcatataggattatcagtaccatctttctagattccatatataataggtatataccgtgaagaaaccataattgaaaaagacatgtaccccagcgttcattgcagcgctgtttacaataactaggacatggaagcaaccttgatgtccatcgacagatgaatggataaagaaattgtggtacatatatacaatggaatattactcagctgtaaaaagaaca

SEQ ID NO: 35812 - DNA, 2547 bp, Bovine  19866880867397
  misc_feature (1)..(1): n is a, c, g, or t
ncacaaaagtggctatttgcaatagcatgaagtgcaaacaaatggacacggctgtgtttcaataaaattttatttacaagaaacacgcggcaggccagatttggccaatcagccatagtttgctgacctttggtctaggaaccagcaaggtcggcaactcctggagacttattgaaaatgcagtacctcagatcccaccccagatttgctgaattaagtcttcatgttaacaaggtgccctgatgattctatgcacattaaagtttgagaagactggtctctaaggcgagacaacctctatcccttttctgggcagcatgagccatgcctaactagtctccctgaacttctgccttcacttaactcttgttaagatgctcagttgtgtccgactctgcaaccccatggaccaggcttccttgtccttcgccatttcccggagcttgctcaaactcatgtccattgagtcagtgatgccgtccaaccatctcattctctgtcgtcctcttcttctgccttcagtctttcccagcatcagggtcttttcaaatgagtttgctctttgcatcaggtggccaaaatattagagcttcagcttcagcatcagtccttccaatgaacattcagaattgatttcctttaggattgactggtttgagttccttgcagtccatggcactctcaagagtcttttccaacaccacagttcaaaagcatcaacttaactgttgccacctctcaaaccagtctccaagaagcaaagggattttcttaaaatacaaattggatcccatcacttgcctactgaaaacctttcagcagcctgtcaattagggttgtcagacttagtttaaaaaaaaaaaaaaaaaacaagatgccaagttaaatttgaatttcaaataaacaatgactaaattttcagtataagtatgtcccatgcagtatttggaacacacttggactaaaatgttgttctttatctgaaattcaaatgtatctggatgtcctatattgtgcctggcaacccagtgctctgagattataatccaaactccttatcacagcctagaagaccccgatgatctggccctgtctccttcctgacatcatggcacaccgctcaccacctcctctctggccatcaccacaccggctaagctccttcctgccgagaccctggacaagctgtgacctctgcctggagttcactttcctcccatccttcagatttcagcctaaagacttttgtgtcagagagaggccttccctgagtctctaaaatgagcacaaactcctcccccctaagcccctgtccccctattctccattagcctctgtatcagcaccctctttccactgaagccctttccataatttctggtgtttatttggggcttatttttcatttgcctatttccccaccaggatgtggaaggagtggaggagtgaaaaaaaaattcacttaactttccttctccttaaaagaataaaggctttaatatagcttgccctccctaccccttctttagcttttcagaaataggctgtccatgaggagtttgagagaactataaaaacaaatttcaggaatttccctggcagcccagtggttaagactttgcgcttctgctgcagggggtgtgggttcgatcattggttggggattaggatcccccatgctgtgcagtgctgccagaaaaaaaaacttcagaggccctctagcatcttcccatcacgtagaatttataccagctggggaaaaacttgaatggcacatagcaatgggcaggtccttttttaaatggtggtagaagaaagtctgaaactgcaataaatatctgcctgggatggaagatgtgttggatgagtatctgcattggaaggtttggtacaggtcatcatttaacttttcccttctcatagagtaatcacacgatttctcaattaaaaaattcacactgaagttacatttatcattatattactactctaccatgaacttgttcttgtgttctcttttttaatgctcagcatccagggaagaacatttagggggtagggggcctttccacacgagactgttccttgagcttaaagaaatccaaagaaggaatgatttcttcggattataattgtcttagaagaaggtgaggttttatttgggaccagaaggtcagggaatagcgcagaagagggagagagaataaatagcatgtggaatcggggaggaagagaagaaaacagcagagccagagaacaggagtggcccagtgtgactgaaggaaattcatcaaaaaatagcaaaataataatttaaagaactgaaattggatttggtttatagactatatcggggacttccttggcagtccagtggttaagacacctcactttcactgcaagggatgcaggtttgatccctggttggggaactaagatcccacatgccacacggtgtagctaaaaaagcaaaaagccaaaaaaaagaatacgttgactaatgagtgtaacttgctcagaaaagcaaagaggagccacagaagttgt

SEQ ID NO: 35813 - DNA, 2640 bp, Bovine  19866880897076
  misc_feature (1)..(1): n is a, c, g, or t
naatacttatgtatttatttggctgtgtctggtcttagcctcagcacacaggatctttgttaagtcatgagggatcccgcgttacagcactcagctcagtagttgtggcacaggcttagttgctctgcagcctgtgggatcttagttccccaatcaggggtcaaatctgcaccccctgcactgcaaggcagattctcagtcgctggactaccaggcaagtccctcatctccaccttttggaagagactggaaatacttattttctctcctgagggtataaagatgatttcttttctccatagatggatcagaatcttccttttaatactagagtacaagagaaaatattccgtataaaaaaagactaattgttcatatccagcctacgaataactgctggaaagcaaatttttctgaagtcaagtactatgtaattcccaaacaaaaggaaaaaaataggctttgttttcaatcttcttgcataaatattaaaatgataattttaccagtatattcaccttttatcctatgtgaaaatgagtccctgatatgataaatcaatctttgtcttattcctcctgttgaggtgatatgaaggagtgttgagacaatgacaccatccccacatgttcttcaatagataccactcttccgattttcaacaactagctaagtgtagatttttcttgcctgtgccgccaaattccattcctaattaaaatccaaaacttaccatcttttcgtgaatatagagaaactctgtttaaagttcctgaatatccctttatgatcagaaggagttaatgtgactcagccttctaaatgtctcacttaacagcagacactctggggaaatgagcttattaatatgttttggtttagtttttaatgagactcaggaactgccccctaaacaattttattagtgcatagtatgtgtcagcccttggggtagataccatggagagtaggacataatcctggtgactagaaaacatggagtctacttgaacagagattcttgcatttgcattttttaaccttcactttgttcccatgagagcattttaaacaggactctaacatggaagcactagagatatccgtaacaggttagcagtgtttatctttgagtggtatgattataggtactgtactgtttctgtgttttttgtttgtttattttgcagagagtatatgtaattttttataagtagagcagtaaacactagtttttgaagtgatgaacatgatgttatataatattcccccttatccatggaaggcatggccaatatgttccaagaccccctgggaagataccaggctacttttctatacatacatacctgtgataaactttaatttataaattaagcaaagtgagagaatatctgaattgtcagcattgtcttgctctttggggaccatcattaagtaaaaggagagttagggtgaagggtgaagatcgctcagtcgtgtccgactctttgcgaccccatggactgtagcctaccaggctcctctgtccatgggattttccaggcactagtactggagtggattgccatttccttctccagggaacttcccgacccagggatcgaacccgggtctcccacattgtagacagacacttaactgtctgagccaccagggaagtccaaaatgagagttactagaacacaaacgctatgagactgctacccagaaggtctctaagtgaccacacttagagtgggatgtgctacacaaaggtatgatccacatcccagatgcagtgaagaaggatagcttgagatttcatcatgccgcttggaatggcacatgatttaaaatgtatacattatttatttctggaattttccatttattattttcaggcgatggttgcctgcaggtcactggaactgtgagaagcaaagtggtggataagagggggactgctgtagtgcttttttacaatagcgtgctcagtgaatattgttaagtgaatgtatgcctttttcaaattcttgaacttttctcccttaaaaatgttaaggattttatttcaggtccaaagaactccccagacttcctctaggagaggtattctgctaacttttatcttcaacatttgaaaaccaagtaactaaagacattgataaatgctgtggatgttatattatactcagaggataaagaaggtgaatttgttttctcactggaacattttatgaatcaacagtattgatgtgtaggaataggcatagttcgagatcattataacttggtcttacacaccactgccgaagtcttccaactcatcttgatggaatagattagagaatgcaaaaaatctctctctaagctgtaagatgtaaaaataagatattacaaaaactaaccttaaattactaggttagttggctggactgtgagggttaatgagtccagtgtttcaacttcagatagccttctttagccagtggctatattgctaaactagccagacttcctacataaatgtgcaatgatcttaagaaaaccagataataggaacatagtaacattgttaaaaaaacaactcaaaatactaactttaaaaacaggtgttatgtgtgtgtgaaagtgcttggcatcaatacggggctaaag

SEQ ID NO: 35814 - DNA, 1366 bp, Bovine  19866880924256
  misc_feature (1)..(1): n is a, c, g, or t
naaatgaaactagcttgttttctgataatagtttttctatacttttgctgaggttattgatattagttttactatgcagtcaagattttgtatgaaaggatagaggatatcctttgagttgagacttcaaaaaaaaaagtaataggtctgacacaggaggccaggaggggatggataatggtaccattagaattagttctgtgtgactccctgatgtttgtgataacagaattcaaccttggtcctatgtccctggcactggtttgtttagctgagattctgccttggtcctggttatcattctgctccaatacccccaagagaaataagaaccatgtccagcctgtgccaggcgcctttactgaggtttggtatcacctcttcccgtaaaaatggcaggtcaaaaaggaagcccattatttagggacaaaccatgcagatggtatttctggtttgtctcccaaggtcagctggctgctttacctagaatccacgttgaacagtttttacatcaaatcctctgtaccaagatggcggatcatcagtcactgagaagtcaggcctcttcctaacttctctgccttctgaataatctgttttatcccagtcctgagagggccaaattgttcagttaacaggacaggttttcagactacccattggttagctggagaaaataatatgatatgggatgaatggtcaatagcataatataagaaactaagagtaatcaatatctttaagatcccatcaagaaggaaaattatatgcaaaatagctcaatcactaattagtagttgttctcaattagaggcacctctgttttatgttgactttttcaaaatatcttaaaattagggagttagagttaccaagttatttgaattgtattgtaaatcactgggaaaattcagtctaattcatgtaaaactcctcaattatcttggtaatttagaaaaattagtgcttcctatcctgatttacccaaataagtatggttattgacctgaactattgtctttttattgtaagtagcattctggtttggattggcagttttttaagtgacattttaaggcttaacctctttattaggagaaagaaaacttaagaaagagaactttttaaattccttgctttgtaacagttgctaataaatgaaaaaaaaaaaaattccacaaccacaaagactgagtctaaagttgagtttattctgacatttcatagacaaaattctaattttctagtatcaaaagatataatcaaatgcaaacatagttgattttaaaagaattttaatgatttatttaagtgaaaaggccaaaattatttgtttataatcaaatttcccagcactgccaaatag

SEQ ID NO: 35815 - DNA, 1036 bp, Bovine  19866880930657
  misc_feature (1)..(1): n is a, c, g, or t
nactgatttttcttccttggaaggagaaagcagagaagaagcccaagggctctgtcaattgaaggcaaaatttatcaaaaatactatatgatttagccgtcagggccttccttccttccccatcctttattttttatagaaaagtaggcaaagcatggaaagataaagtaagaaaaaggtggttaaataattttacataaagaaaatcttcccctggagcaaacaaacataatcttaaaatattttgaaaatacattatgcaagacagaaagatatactaatctgtgccaccaaattcctctttaaacatttaatccagcacaggcaggatatcacaaatgatgttactcatagctgttgtctaagtgattgattattgagaacccatatgcaggtatttaaatcttagtctggaaacagagaaactttagagtcagtcaccagtgaacaaatgcctaaaagaaacatacagaaaatccaaagttgcaaaaaataaaaccaggttttatttcagataaatggaagtctcctttgtaaattcatattcaaaataccataggggcctctttcttgtaagtcacagtacttcacaactcaaagaaatgctctctttattgagaggcaataagaatgagttataattaggagtgaaccagcgactgctggcctccgaccaagtgaaaacacggtaagaaccagcccactcccactccgacgattccagaatgcgaattctgcttgcactgaggaggctgacaagtccatgttttgaattacagtttttgctcttaaattgattaggagaaaagttaccatggcctgaaccttaacacagaagcagttccaaaccctaacgtgaacactgttaattggtggccagtcatttctactgaaataactccacttttcactcttcctggttttctccatctgaaagtcttccgcgtggtaaaggctgttaagcaggcatgaaaaagcacaggcctcattgtgtctcgctggaattgacaacagactgttatttcagcctggactg

SEQ ID NO: 35816 - DNA, 1937 bp, Bovine  19866880946607
  misc_feature (1)..(1): n is a, c, g, or t
ntcactttcgtgcattggagaaggaaatggcaacccactccagtgttcttgcctggagaatcccagggacaggggagcctggtgggctgtgatctttggggtcgcacagagtcggacatgactgaagcgacttagcagcagcagcagcagcagagtaccaaacataaagaagagatagaaagggaccaaaaaaaaaaaaaagggcggcgtggtttctgtatctatgtaaacagaaaaacagaggagctaggtgggctacagtccatggcatcccaagaatcagacacaacttaacgactaaacaacaaaacaaaaagacactaggaattttgaaacaaagtggtgatatcaagacaggaaaaagcatttctggataggagtgatgctggctggattcgtacatagaggtgatgaactgttagccaactatacttattaggttgtaagttccttgatggcaaaaaaaatacttctagcttttctaataatctttacaatagggctttatgtacagtaagtattcagtgtttgtaaaattgcagcgtttcttaaaatgcacaatggttgataataaagactggatgcaacctaagtgtccacaaagaagggattggttaaatagatacattcaagttgttataatagtgaagtatgtctacatggggcttcccaggtgatgctagtcgtaaagaacccagctgccgatgcaggagacacgggagacactggtttgatccctgagtcagacagctcctctggaggagggcatgataaccctctccagtattcttgcctggagaattctatggacagaggaaccagcgggccccagtccacagggtcacaaagagtcggacatgactaacatgactcagcacacacacatttcttgaagtccaagaaagttaatcttattatgccgcttacattaagaagttcataggaaaaataccaaatggacatcctctggcatgcaatattttgtgccttatcctttttggaggaggctaaacaattctccctatattgtaagactctagcttctaatctcaaagagttaacccaatttttgtgaacaatgaaatctttctgtgttacattaaaattcatgaataaaatggtgttcatttacattaattatagtgatgattgcttacagttatgccagagaagatattccaggctcaagttctatttttagacaactgttctgaggatcattccacacctgtcctatttagcagctggaatagttaagcatcatagtgcttttaaaatagcagataagccaaccacaaagacatattttaaacaagggtgttttaatattgaagatcatgacttgaattctttcaatgctatcttaataaaagtattttaagatctaagatatgatccatgtcagatggattaaaagaaagtggatttgcctgaaatcaaaagaaataaaaatttcttccccacttctctgcttctataccttagttgtagtcattagaatcaagtaagaatgaacttcggctccataaaatccacattagaatggagaagagaaatatctaataactgtgttatgtcaaagtatgttttgagctgaaaagaatcttctgaggtttccctcgccccagtctaacttcagtacccttgttttacagaagaggaaaccgagactcagaatgttaatatgagagtcccagtgtggattctaaagactgtccaaggagccatggtaaaaatgaggctcaacataatgagttgtgctactatatataaaacaggtaaacatcaaggacctactctataaaatagggaatgatattcaatataataatctataaggaaaaggatctgaaaaagaatatatgtacatacatattacatatataaaaccaaattactttgctgtatacttgaatctaaaacaacgttgtaaatta

SEQ ID NO: 35817 - DNA, 2815 bp, Bovine  19866881023757
  misc_feature (1)..(1): n is a, c, g, or t
natttttctgtttttctgaagagatgctggaagctaatactgaaccttagcaaatctctctccttaaaacattctgagctacaaaccccctgggtgaatggctgtagggatccacctggcatgaggtgacatcctctgacaatagtcattatccagtaccctgaaaggcaggccaggggagaggcatcagggagagaatgctcggctatgagagatgtttctatctgaatcagtcacagtgtcatcagtgtaggcctgagtcacgttcagtcttggtcagttgagcacacaaggccagaaaagaatctaaatttagtctaaaactctgctaactgccactgcagattagcttctctctgctgctgctgctaagtcgcttcagtcatgtccgactctgtgcgaccccatagatggcagcccactaggctcctctgtccctgggattctccaggcaagaacactggagtgggttgccatttccttctccaatgcatgaaagtgaaaagtgaaagtgaagtcgcttagtcgtgcccgactcttagcgaccccatggactgcagcctaccaggctcctctatccatgggattttccaggcaagagtactctctaccccaggacaaaaactggggaaactattgtggtttttatccaaatcagatcactgcaaacctcaaagggctggtgatcagaatatactattctgcagtcttttctccaggacttctgggcttcagtctctcagattggtctgagtttgttgttgttcagactggccatggaaggtgactggccactcttcttaatcaataagtcattccatagtacgcgggatgtggatggaggagataactgagaggatggcgaatgactgaggaaacactcccggcattctcagatccttgagaaggggcagtgacaggaccacagccattggtttatgcacatggatccacaaggctgttgtggcaggagatgttcattaagctgttctctaagtgaagacagggtaaagtataaatgaaatttcccctggaacttcagagggtctttctctctcttggggaagacttgtagcagaaaattggcagttcattatctgatttgttcatatggtcattagcctaaaaaccagaagactggggcaaaataactatatataaaataatgctgctcaaaatatggtctaaagatgggcagcagcagcatctgaatccagcattccctagaggcacatattctcaggtcctatcctaggcatacagaaaactgttctgaaaagttttccagatacttctccatgtacaaaagttcaagaagaactgtcctaggcctataggagaggtgtctaaagtttccacttctgttcactcacaactaccccagcttgcttgtttttctacccttagtttccagttctcttatcctgatcatatgtgactaggtcatctggttatatataagaactcagtcttgcaatttttatcatcagtgtaaatcagaattctatttatggaaaacaagtctatagaggcagtaaaaacgctggttcttagccctgtgactggtttgcagtggagagactatagttacaacttctgaaacatttctgttcattcgcagaataacaatgatataaaataaaggatgaaaaaaggtgaaagacacttacataggctgcaagttgctcctgggaagcttttacttcagcttgtaatttctcaatgcactgaaaaggggtaaagtttagaaacaaagtgtgtaactcttccttttacatattcaaagtgttccagatgtaaatatgtactggttctcatattttacaaatgggagcattatctcagctagatgttttgaatatcatcattaaatagatcatcgctcccatctctttctctcttctactccatggaagaacacatcaacaaagtatatgaatatagtaaaaactaggtcatgattgggaaaaataatattcgcttgatgtactgaaaataaagttaacctatcttatatcacatcatgtatacatacatgtgggacccaatgaattggtatctgcctttggaatatatggatatattttaatgtgaagatatatatacctatatatagatacagattatctatctatccatccctctatcacaaaagcagatacaaaacaacatgggttgaacaagagataaatttacataatgacacatatataaatgtcctaagattcagaaattggttacttcttataaagtaatttattaaaagtctatgaaaaatgttttggtcaacttctttcactacccagaaagaagctattgcttgattaagttcaattgaaaactacaaagtatttgtatagtcagtatcacttataaaataaataggatattcacttaatatgattcaaaagaatacatatcaaacttaaaaatatcaccaagaaagtttatttttgtatgtgaatattctatcaggaaatacagttacattgagcaaatacaaaaactgtgatttaccatcttgaacttaaatatgaacttctagcccagccagaaataactacaggattgtcagctcatatgtttaggtaacttttaaaataaagattattcttcttctatgacatacctggtcttttgcaagaaccaattttttgtatggttctccactgtcttccctacagtccagagcttctagctttttctccagccaggaaacttgctcaagcagctttgattttgttccttccgagactgcaagcgaagaaatgtgcttgtaagggtaggaagtacaatacttttttaaagctatttt

SEQ ID NO: 35818 - DNA, 2740 bp, Bovine  19866881050601
  misc_feature (1)..(1): n is a, c, g, or t
ntcaataatttacaaatttggaaagctcaacagcatgtttaagctaaaggaagcatcagtgtaagatgcagaaatagaaataaatgtaatcacttggccaccacagtacaagaatattcaaagacatccaaattttgtaagtgcctgagagtaaagtgttcctttttttggtagaaatgattcttagggaacggtcacaattgcttttacctaaacaatgaaatgttcctttcagatgaatagtggaatgtgggcaagtaaattattttgaaagattttgacgcaaccattatcagcattaataacaacaaaaggcagttattttaagaaggaccagagtcactcacagcagtattttaatcctgactggctttccctatcacatagcacacctgtcttccctttgcttggtccctttgtatgtgctcaggaaataaagtctaattttaacgtggaccaaggaaagcttaattgaaagctgccattttcaaaagtcatgtaatacatcccttttctcaaactaagctccttggactctaagttcacaaagtgcaaacaccctgaattagtcacaaagccccgtgtgaggagtccatctcagccacagtcattctcactgtcggccacgcactttagtccgttcgcagagaaaccctctctttcttaccccatacttcctctatactgagtcatgattcatctttctaagctgaaatttaccattcctcccctcagaccacccttgtactccaatatccaagaccctcaccaaccccttaaccctcttgtggacctaatacacctgttttctggaccacagattagatggcaatctgtcagtggaatttttctaaggtattactgtatttccaaagtaagttcagaaaggaacaaagatcaaatcacatttggttttgagcaaaatgaccagtggacaagaacaaacttacatgtaattgatctgcagtcacctagggagagggtcccaactctggccgttcagcagctccacctcacacctggtagcctttgaacacctccgggtttcccacctctgagctttgagtcatgatgctgtccgccagatgctctcctcctcaccctcttcccacctgcggctttctctccctccctccggtccacgccaaagtcctcctcctcagcaggtcctcggtcctcccttcacccgaggcaccgacgcttcctgcgcactgtccctgggaatatttcacctgcactctgcagcagcacctattacaggatatatctccactgtgctcctcaccatcccctttttaaacaacaggctccttgaggaattccttgctgctctgggatcattgcctctctaaatagaggttgagacaaacctctggccccttagggttcagggaactgaattcaagcttggaggtgctgggtggtacagagaaggggtgaaaaaaagaacatgtcatccaccctaactgggatgtcaggccattgtggttgaaatagatcttgtttcaaagaatcacaaataatctgagtcacaatgacattttaatagtcacagagctcatgatttaagaagcagttgtttggttttttaaaatttcctttggcctcactgctgatgggtagggtctgaaatatagaaatccgctggaattaggcactctcctttctgtttaaggggtcaatcctttcttacctagattgctttttgatggggaagggtagccatttaaaatatcctgaattgtattgtcttacatgggaactatcaatgccaacacatatccttctcaagcttggagcctttggaccgttcatctcattataaaatttcacagtaagaaaaaatattttgtctggagagaactatcttaaagtaatgatatatttcttattttccaagtgacagcagcagaattcattcattgcatgtggccccttgttctgggaaaccacacacaggcattcgatttcaccgtctcacttttgtggtcatccctctcgcgatgggttgcaataacagctgcagtagatgttgtgtgtgtatagtcctgcctggcacatggtgagctgttcaaaaactaggtgatgaggaacgagtgtgttctctttatctcattgttgtgcaaaatgagatttattgctcatttcccacgcaggaatggagattgttaaataaaccgccccaaatcaaaaaactcaagagtagcccccttcaaaggggaatgagtagaacgtcatcatccttcaactgctaatgccctgcagggtgctgtgaaacaacgcagtctgtattttaagtactctgaaaccatataactgctgtacctaatttttaaaccttgcaggccacaaacctagttatgtgacttgatgtattttcaaaagcagatgtaaagacagttcatccatcgagcaagaacactcacaggcttgtccagcttacactcgcgtgtgatggacgggacaccttgtcccacaaagacgtcctgtgtaccttgtttatatttatctagcagcctagtgagaccaatccgtagactgtgaaatagggagggagttggctaggtaggcaggactgaatttgcaacaactgacagggacaaactttgtcaaagtgctgcgttatcctgtagtagttctgacgcttggctgttgaaatgtgaacatgtcttgtaaaaaggaagaaatatatcctgaaactgaggcagaataaaatcactctctagttttttagctaaag

SEQ ID NO: 35819 - DNA, 1420 bp, Bovine  19866881078813
  misc_feature (1)..(1): n is a, c, g, or t
natcttgaggaaaaactacaaatttccctctagactaaaggaaaaggggtattttaaaaatttctagaaataaatatgaatcattggcacttcctccatgaacagcattttaaattaaaaaaatcataagctcatcagggctcttaaagaccactttgcataatctgaaaacttacttgtctgtcaggagtacatcttattttagaatcagaaatcatatatgtatatataacaaagaaaaatcctaaggagtatacataatttatgtgctctcttcctaatacttatcaagatttcttgttaaacttaggtcagagaagaaataagataagaaataagaccagaaaagaaggtagaagaagaaacatacagtgagcagagagcaagacggaacagatagtagattacaatgaattagaatggctgaggagagaagacaaagctgcagggaaagagccctttggcttttatctgtccactcactttcaattcactaattcaccaaacgttgaagacccattgtgcactaagcatggtgtgaggcataaataaaatcaatactggtccccatacccttgggactgatcattttatcaaggctgtcattctaatggccatgaatgttctattagaaaaagagtaaatgaagaaagtgttggatgttccaaagggtgtcctagcttaacaaatcccaagcaccaaaagaaagaataaatgaataaaaacaagcagaagtacctcatagatattcctcccatggaggcacaattctgtggagactaatgaccacttttcacagagttgacctagggagtttaactgtgttttcatcataatagacctaacgtgtcagtgcccgtggctgggagttgggggtgagtctgaccttgggggaggacaaggggcacaagaagtacccctcttcttgtcctcagtccatgaactgttaacaacccaaacatcttttaattgattgcagcagctttccttgtgtttctctcaagaattagccagctctcgtcattggttttttgtgaccccttccctgtgttgctgattgcttgacacagtgggtgtaattatctccaggcttccagcatgctttaatgaagagggttgtttatctgggtgagcagagaggcttgcctaccccttggtcctaaagtctttgctccgaaaacaggaataaaattaaaagctgttagctgatgagcaggaatgtcaacttttcatctctggcttttttaatggaagaaagttgatattctttttccttcctcacaattctatattacatgaacatttgtcatattaggaatcccaaatagtctcttaatgcccctataagaattgtctctgtcccttgtgttcagttttagagagacaataaattcatgtactcagcactcaccatataacc

SEQ ID NO: 35820 - DNA, 1517 bp, Bovine  19866881092137
  misc_feature (1)..(1): n is a, c, g, or t
nttttgttttaaaggaaaatgggctgctgttgaattattttctcccattttaaagagaacattaaactgtgaagaatgttgatgactattccagagcatataatatagaacaagtgggtcacaaagtctcagagctgagatctttacagggttttctaagctgggtcacagtgctttggttgagcccttgaattagccttaagagtctctttgtctcttctgcttttaaaggaggtgacctccagtcaccttcggtgaccaacttctgtgtttaatgctccctgtcagataataaattgaatcatgctgcaggctaaatgtgttctgtttctttgccttacttactgatcatattacatattatataaagcagtctaggaatcattgcaatttaatgtatagttcatatttatgtttatttatagacaataattttacagctgcagtttgttgttctatatctacttgtatgagcaaggacagaggattttgtgtttgctacctagggaaagtaatgaaggcagcagggttttggggtcatattcaatacttgtatcctaaatataggccaggtggcactgcccttgaatctgtacagtttgtacatctgaatagttataaaactctttaaaaaaatacagtgtgttaaaatgagagagagagtataatcagcacagccaagatatatttttgtgtatttgtgttggccctatttcaggtggtcaaaccacacgcattttcctatttgcgcttgtctagggaattgactgctccatcccatgccctctggggacctatgggataaactgttcctcgctctgcagctgtaaaaatgatgctgtctgctctcctgtggatggatcttgtacttgcaatgcaggtgagtgggtgaatgagtctgttgtctgatcccggtcctgttagctcctaaagacacaggaaagaaaccttaaccagaattccagctccagctttgccaaaatacagtgactaaactcagcaaagacccttacccaggaagggctctcctgctttccagagtcaaggggagaggcttctgtgagatgatctctgaagttgctgccagctccaaaatctatgagtctctgtgatttggggaggagtaagcaagcagaactgtgtcggtgcccctaaatccattggcctggagtcctgacaagagatgcagtcaagcacctgattgtacatgggggccagagcatctttatccatagtttctgcagcagccagcattgtggacactcactgttcatggttcatggggtcctgctttaaagatggggatgttctttcaaacgcactttccttttccttcccatataaatattttatttcctgacctgcacaaaactccgcaccccacagtgtgcatgaccgcatgttagacagtgaggtacccccaacttgatctctcttcccccagtagcccaatggtgcttctcgcttgacagctgtgttggtgctctgggttcagttctgagaaaggctttacgcgg

SEQ ID NO: 35821 - DNA, 1902 bp, Bovine  19866881095881
  misc_feature (1)..(1): n is a, c, g, or t
nattagtggttctgagaaccatgaggattgggagatgtatggagtgactgctaacaggtgtgcagtttctttgggggtgattaaaaggttctaaaattgactgtggtgatggctgcacaacttggtaaatatagtaacaactattaaactgtacacgtaaaagtgaattgtatgggaattacacctcgataaagctgtttaaaaaaaaaaaaacaaaaaaacagataatacattccctatagccagccacctgtttcaaagtgtcaatgagagaatacctgtcactggaggtgcagaaaacgatggcatcaggggtgtctgtggagctcttcctgcatgtcccctcgtaatgtcgtaagttgagccaacagagaatcccgaagtgggaggacccgaagggggtgcagataagagagtgtttggggcagaggtggaaggcgggaagtgggatagaggaggatgactgaaggcagcagccgtaggtggagaagcaggaggtggcagagaggtaacgagcggaggaacggaaggaactggtgaagatggcacaaagggcaagggtgccgcaggctgcacaggaggcagggacggctgcggggtggagtacacctgaggcggcaggctctgcacagaggacgcgcttggagaagagaaggtgctggctgcggctaggaaagaggggagggaaaatcacacgtcagtgacatgctttcacttagttttcaaagtatcttattaccatcttgggaaatttttaaatttaacagaccctattcccaagagttatctttaaatacataattaacaatacatgagtatgactgagtgcaaatgacttttcaattcccatcagtaaaagcagcaggtatataaaattaagttatggtattgcacatctttgtgtttctgtttgttttgttgtgcttttaataaaacagacctgcttttcatttctgctaatacaagcataaaacctcacaatttagggctcaaaaactttggtcagaaggttaatctccacgaagtcacagaacattagacaaagctaatgcgctttttaggatatttctgtcataacaaagatgatttctagttaatatgaaaacaaaaaataaaaattaaagcaaaacaaagatgttttctgcctttgggcttaaataaaaaaggctatttaccttcatcctggcaaagattacacaagttttaatatataggcacacctcacgttattttgcttcattttacaaattgaaggtttgcagcaaaccttacgtcaaacaagtctatcggtgctgttttacccggcagcatttgttctttgtgtctctgtgtgacactctggtaccactcaaaatatttcacatttcacattattattgtatttgttatggtgatgcatgatcactgatctttgggaccgcaaaaagattacaacttgctgaatgcccagatgatagccagcattttaaagcaatgctttagcaaagtatttaattgaagtgggtacattttgaagtgggtacattgttttctttttagacataggcataatctactacacacttaatagactacagtatagtgcaatcgtaatttctatatgcactaggaaattaaaaaaatcatgtgacttgctttactgcagtgttctggaactgaactcacagtatctctgaggtatgtctctaggcttttgttaaatgactctgagaaaagacgacagtatcctgactctcctcaaaacccactgatgctagacaactgcacatacctaaaggagccggggaggaggagagcgcagcagaagccaggcccccagaattcggtggggggggtcccaaggtggtgttgtctctattccactttcttccatcatttttcaatttcagtacaactgtaaaa

SEQ ID NO: 35822 - DNA, 1683 bp, Bovine  19866881097338
  misc_feature (1)..(1): n is a, c, g, or t
ngtgtccacacgagctaaatgcatacatccaagggagtcaaatgttagcccttttcttgatcacttgtaaccctcttcctcacaaaaaaaaaaaaaaaaaaaacaaaggagttacaagggttgagtgttttaattttggaataacatcaagattatctgcatctggcagaagtgtcaagatgctctaaaggtgttctgttggatcagaggagaaggaattactgggaaaagtaaagttttgcccaatggaggatgaagtttcctttttcagatgagctgagctgtcctctagaaaagggccaaatgaccatgttgagaagttgaagctcagaaaagatcaagatacatttctgcaccagaattcaaaggtgaaacaagattaagctgtaaagtaggaatgataaaccaaactcttgtttttctactggttatcacttcaaggttgtgaacatatataagtgtttccagtttttcctcagaccctgtggtgcctctgtttgggaagagatctaggcacatcatcattatcctgcccattgcctggcccagctgcttctgggcagagagaggccggaaccctcccttggtggctggtgggccaccggtatctcttaaccgtgtatgaggcactcctgctggagagacacgtttttcttactttactcctctaacacatttttttttttttttttttactgaatataaataacttcaattcatcttcactttatattgcctaagtttctgattccacatgcattttgcatcaactgaagagtttgttgagtgggtgaccttcacatccttttacaaggagaaaatacaaaatgagagctgggattaccgttttaaatggaagagctatagttggaagaaaaatatctcctcaaggtccttgaaacagagttgattagtcacaaagaggcagaggcaaaatacctctcctctctttgcactgtttttgcagcctttcttgactagtctttaggttctaggttttaaaaggaaacccctatatgccaagaaggatgaataagaaatgggaaataacattctctcagtctcaggggctttgcatctgtactcacttcaactggcccaataataccattttttcccttcatcaaattgtcatggagcacttcctatgtgccatgttcttacacacacacacacaaaatatatgttttatataggcatatatgtatcatctagtaagtgctagagaaagcaaacatatatcaaagtaagaggaaaaaggagtgtggaaagcaggcatgagctctcaattataatgacctcggagcagaatcctaaagtcagggagagaaaagagccatatatgcatgtgcaaagccctgaagtgggaactgcttgacaagtctaagggacagcatgagggtccacgtgtctctgttgagtgcgtagtgcaatagggggaggggcagtggctcgggaggtggtgcatgagacatacttacactaacaacgatttgctgcttatctaaaatgcaaaattaactgactgtcctgtgtattcttcttgatctatctggtaacttgttttcttcttccctccctccttccctcttcctttccttttgtgcagttgtggtattcaagtgccattcagttagattcattttttcagtttgcaatcagtttcaattttacttttccatc

SEQ ID NO: 35823 - DNA, 1094 bp, Bovine  19866881130590
  misc_feature (1)..(1): n is a, c, g, or t
ntttggcaaaaatatttttggcatcaatggcagaaaatctcttaaatggataaaggtggtaaaatgtgattagtaagtattggatgtcatttgaggaaccaaggggcttccctggtggctcagacggtaaagaatcacgtgaaatccaggagactcaggttcagtccttgggtccagaagatcccctggagaagggaatggcaacccactccagtattcttgcctggataattctatggacagaggagcctggaaggctatagtctatgaagtcacacagagtcagacatgactgagtgactaacacattttgagtaaacaaatatggactgccattaacattggtatccctttccatagatgtttgtgtacaaatattaagtacatacaagttgctggttcaaggctaatcataatcagatgagcaggtcaagtttatgctttattaataccaagcttgaaactaaattaaatcctgactttgtgctatgaatcatctgcttcacagggttagattaaaagagcggaatttcagaatatagtcaactagaaattctcttggaaataccctgaaaaactcaaaattatgcattaggagacacagaaatgaaccaataattttataaaatgggatccagggccttttcaaaatatttaaacatctctaagcttatggccaccctggattagaaagaaacaaaaaatcatctccatgatataaatgctgttttcaaatctacactatccaagagtcatgtagaaacgtttaaacaacgagcggtgtttggctgtctttcccaagagcaccaatagacccagctctaaataattcaggaagtgctccagagaaagtttcaagccacattttcttactattgaggacactttttctacctgtccctagttactagattcattttctctaataatgtgccagactcatgttcatcattaaaaaagaaggaaaaataacattaacaaagacatttgctttataaactgccacaaagacagactttttcagatgtaattattttccaagataatttatcttattaaaatatggtaatttaccaggtttcaggtattgaaac

SEQ ID NO: 35824 - DNA, 776 bp, Bovine  19866881164143
  misc_feature (1)..(1): n is a, c, g, or t
ntttttttttttcttagaagcagttgtgaactgtacctttaaaatctaacctttgaaatctggctgtgatcattgtgttgaccttagctggactgtattattattctcttgaagtcgaaaggcgtgaatagatctctttgtgtgctcagcccgcctccaagccaggccagcctaggttttgttttggcatagtcacgagtacgacacagaccagtaggttttgatttacagatatacataagtagatgtgatttcctttccaggaaaagggcacgatggctaacatgctttaatttatacacacgaggctcttttaaaaggctgacctgcagctggggcttggtgaaactgggtccttcagcaagaagcattgcttccgaatgctccctggtagactgtcagtctggaaagacatggaggcaaggaggtgggaggggaagactgactgaggaagaatttggggggcaggcacctaaacagctcactgtaagcatttcctaaatttcacatgcatccaaattttccttctccgaatctggtttccttttagttatttcctgtttgttaggcacgggtggtcctttcaccaggaaataccgacagctatgttttttctgatgtgtagttttttgttgttgaagatttctattaagatgaggttgacttggtcccgtcagcttggtgtcaattttctagttgtctacatggttccttcaggtgtcataagtgaaagctctgacttaaccatccccaaagctcaacaacatttccagggg

SEQ ID NO: 35825 - DNA, 1152 bp, Bovine  19866881175476
  misc_feature (1)..(1): n is a, c, g, or t
nagggagagaaaaacaggagacttggggaggatgtctatctagaaaagaccttttggggtcttgcgtaagtagttacacttcgtgaacggaaagccatccctataaactattgatttttgtaattctattttttatgaccccataagactttttatttcttcagggtacaaaatcgttcttttgagataacattgatgcttttgagatttgattaataattaactttttttataacttggattacttgaagtctgcctttacaagtgtataatgactacattgatggaatttgtgaatgctgagttagtagtaccatgtagattgatgtgatcatagtgtcaaaaagttgaaatagaaatacagaaagtgtgtaatttcttttggatataattatttgatgtcatacagtcattttatacacacctgtcccagtgtttgaaaatgtgacatattcattgagataattactgaggtcccaacccttatagtgtatcgattgtttaaaagcctggcatcatttaactttgggtaatactattcctttcattccgttatggtattttgtcatttcagaagaaaacatttttaaaaaaaattttattcatatttctgttgtttctcttaaatctattcttttttttcaaaattccttatatagtccttataaagtagattatgtagctggtttatgtagctggtaattccccttttgttagagcatttttattattgaaaatactatattgatattttcagatttatttcatcaaagcccttagttgagtagtaaaacagtctatatttatgcataagtcttaaaggcttttttaatggaaggatattattatataccttgatcttgtatgcttcctgggaaagtttatgttattttaaattaaattctctaaataggaaatcacttctagttgtcccagaatttcagggttttgtttggtgtttctggtcggcttacaatgtgtgagcaagaacacctgcgttgtttagaggtgcagtagttgaagaagtcacctaggctatcaacctcagcttcctcatctttcagagttattttgaagattagagaaaaaaatgtacacaaaggcccttgttcagtaccagcaaaataatggctagtgtagtcactatttcag

SEQ ID NO: 35826 - DNA, 1737 bp, Bovine  19866881177721
  misc_feature (1)..(1): n is a, c, g, or t
ngaaaacataggcagaagagtctttgacataaattgcagcagtatctttttggatccaccttctagagtatgaaaccaaaaatgaacataaatgggacctaatgaaatttaaaagcttttgcactgcaaaggaaatcataaataggatgaaaaaacaatcctcagaataggagaaaatatttacaaatgacaaactgactgacaagggattaatctctaaaataaacaaacagctcttgaagctcagtatcaaaacaacccaatcaaaaagggacagacaacctaaatagacatttctccaaagaagatgtacagatggtcaacaggcaccacaactattgagcctgtgctctagagcccgggaactgcaaatgtgccgcagctactgaagcctgcgcaccccagagcccgtgctccccaacaagagaagtcactgcagagagaagcctgcacatgcaaccacagaaaagcctctgcaccagtgaagacccagcacagtgcaaaagaaatatcttttaaaagtttaaaaaagatttagattgtatgttaaccacgagtttagtgtgtcagtgtggacattttaaatcaagtacatgcgtgcaacttttttttttttttttgccaccttataatttcatacatttggcagcatagctgtgtttctcatggtttgtcataatctctactaaaagtaacttgagggactttgaaatgtcacttatacctagttccagtgattttatttttaatgtattaaaaaatactctcaatttcttttttcctgaggctcaaagtctgactccccaggactacaatctgaggtggtctggccttttggtgacagtgggtgaagtcctggagaagagtttactcaatgtcagccggactgattggcatatggctttcactggcatgtctcgtcggcagatgatctacagtgcggccaaagcgatagcaggcatgtataaacagcgcctgccccccaggaccgtgtgagaagcctggccccaggctactgacacttgctcacttggagctactggtagagaagagacagacccttaagctggacaactttagtcagtccaactgttctgatcatttcctgtaggctgcagtttttcttttctagaaaggtgtggtatcattccagtagatgaaaagaaacaggtcctttttatgattatataattttacgtaccatagttctcaaaaaatgcataaatatttttataggacagtttgatataccagatttataaggtgcaaattcatgtgctgaggtatttaacttaatgatatgtacttgattattattttgttttttaagaaatagttgactaaagaacatgtttactgaatattgtttaaaggcattgtttcttttaattcatgattaatatcttccctgccagtctttgaagcttttcgtgtgtgcatgtgatcatatctgaggctaagctgtgggctcaccaacagactgtaagacacctacttgtagggagatggtgcacttttctatgcatatttttaacattggccagaatagcagaattgatcattttccttttggttatcatattatacacgtatggtctgaaaaatccttttttttttttccaagtaagtttcagcatttcacattcatactgtatgataaacattgggatgatatattttatttttcattgctctggacaactaagggcaaagattccagtctatttaaattagaag

SEQ ID NO: 35827 - DNA, 1851 bp, Bovine  19866881188991
  misc_feature (1)..(1): n is a, c, g, or t
ngctctggtaggacttctcaagcaagatttggaactggcgaactgaacaaatcaaaatctcttgaaagcaaatatattccaaatcatgggtttttcaagaactaataatgtttatgtaccatgaggccattgtgcgtctcttatataacttaaacctccttttattttaaaaaaattctggtggaagacttggttactttgaaatagggcataattttacaactcttatgggtatttaatttttctctctcattctcagccagttatgcttgatcttcttattggaaatgtttcttgttaatctatttttcattactttttagggcttaaggcaattttccaatggcaaaatcattgcgagagttctcatttcttatctcaagtatttataagctttgtatattctaggatgattttacaactatcttttaacataatctttggcaattttatcggctttccaaagtacttttaaaattcattttcagtcagtaatgccaattgtatctaacatcttacagaaaaactcaaccaaattttttggccaactcaatacttagaatggtcccagcactttaaattctttatcacttttatatcttagcaaaaaactatcaggaatgaggaaatggccaatattttttggctcttcctgagtcattaagtttttaaattttaatattgatatctgaaataaagagttgagagatatatgcctctatcatttattattaacttagtttctctcttcattctaactacagcaacgaacagttcaataatattggtcttttagtttgaccttttgttgcaaagataaagtaggttttaaagccaagcttttcaacttttctttttttccaattaacctccaattcgtcctccatgttgtcaccaattctctcaaaacacaaatcagaacgtcagaatttcatacttaaagcttttgagaactcacctttgtggtaaagtccaaactggccttcattcactccacatgatctgagtgacccgtcacccagcaagttcacacagctatttatcacttctaaatatcacttgagcaatccttgctacttgaatttccccaaatattacatgtcctcactcctctctctttccccaggttattctcttcttggaatgcctgtaactatctggtcaacttaattctcaccagttcctcaagaatcaaaagttacttcctcttagaagagctcccaggccaatctaaacattcttcttctttgccctcataaccctggggcatcagggaatagatgatgtggactttgtcagagggaaaccacactattttcttggccattttcttactcatgtctccactagctggtgaattccctgacagggaattcatctctacatattcatctctacatcatctctacatgttcttaccatatatgcagggctcaataatgtttcttaaccactgattgaatgaattaatgacccataggaaaaaataaacctcagaatatgtacatcagttgtcctggatcttgaaatatttttccaaatattaaaaaaaaataaatgaaaggtctaagttttatcccatttaattgttaaactagactactgcaaaaggaaatcctggacttgaaataaaatgattgcaataccagtgaatataaacacggaaaaccaatgaaagctttactagaaaaatacttgctctaattagaggaaaaaaagtgttgcttctatagagagcttatagatatctttcaaggacttaattaaagttagttattctgtgaattcatttaaaagctcaaggctttcttttcattggcattccttattctcagtatgggcccgctcaaa

SEQ ID NO: 35828 - DNA, 1516 bp, Bovine  19866881229291
  misc_feature (1)..(1): n is a, c, g, or t
ntcataaaagtgttaaacagtggccatccttctcagtaatttttttgttgtttcattttgaaaaaaagaagtcatttttcacaaaaatgcattttatattatcaggaaataagacttgttatcatcaataaattaataaatagccctcagattttatttctactatggcaaatatcaataaatataacccatgttagtagggcctcttggggatccttgattacttttttaaaaaattaacttattttaattggaagctaattacttaacaacattgtggtggtttttaccatacatcatgaatcagccacgggtactacatgaaagtgttctgattcccagatgtttgagaacctctgactcactatattcccaaagatatctccattttcccacctaaaagaggaaagggcctcaagtaagggtacctcagcttgtgcatgtgtgctaagttgcttcagttgtgtctgactctttgcaaccctatggactgtagcccagcaggctcctctgtccatggattttccagcaagaatactggagtgggctgccatgctctcctccaggggatcttcccaacccagggatcgaacctgtgtagcagagagccaagagaagcacacatgctggaaccaagctgacggggttcaaatcccagctctaccatgtcacaggctttgaggacttccacaactgacttaacttcgttatgacgcagtgtcacaacgggagcagggagatgatgatgctaataatggtacctacagcagtacttgtgagaattgagttgatacatggaaaggtggagtgtaagccacaaacaggcagtgatccttgcctctttattgattccttgttcacagtaagaactcaatacatgctgagtaaataaagcacttgggacggtaaaagccccacacagggattaggtgtaatgctatgtctttcttttcctgtgcatattttcaatagttgctttggcactgtcgtgaatctctgagtgtttgaagtgactaaaagataaagatgctggtggaggttgggggatggggaacttgccaagctcgttgaggtagccgccgtgtttccagtctgcaggcagcgtgcctgtataatctaccacagggcctctcttcccgggattcacatttttcagattcacaaacagttgattattttttgactgttaaaaatataaacaacaaatagatttaaaaaagaaaatacaatatggcgcagtgcagtgttacccatctaaggaaagcaggtccatggagcatatcaaggactggtccttacatgaggaggcaccaagggacagaggtgaagcttctgacctggtgggacttagaggcagcaggagtaggtgcccctcagccccaaccattccctccatcaccttactttttcattttaagttggtgctctgtgccaattaggcctcacttggatttacatacatggaactttgaactaaaaaaaaaaaaaacccaattcctagccttcccatcaaaca

SEQ ID NO: 35829 - DNA, 1346 bp, Bovine  19866881270020
  misc_feature (1)..(1): n is a, c, g, or t
ntggggtactgaaagcataatcactgtgagcagagtaaatagccatgacttctgtccttttgtaacctctagaatacatttctctatcgcatgtatttcattagcatttagcaagggtagaaatgaagtaaaaccaaagcaatcaaaagaatggatgaatcagagctgcagtcctttgggaaaagtgtcctgggacaccatctccctgggaaaatgggttacactcgcttttcccttacaagcaacactaagaccaaagcaaaatatcaatgagctgtggacagcataaaaataattcaaaaatagagtataagcaaatgaaagctaccctgtatttaatggaataaaagatgtcatatatatttctctcccacacattcccttcagatgaaccatttcccatccagagagcagctgagtactaactttaagaccttggtgcttaattcttactcttttgatacagcatgactcaggcacacagctatagctcttccatgagtctgactgttgctacttcccaatttaactcaatcagttcaacaaatattcatcaaaactcttcaggtacaataacagatacgagcaatattgtagcaaacatgaaaatcacaacttcacaaatcattcaggagttcacacagttaagagtctccttaaaacaaagtttctaaacctgactttttctaaaggaagtattgggttttagactcaaaatagctttgcagcattgactctagagattcactacaaaataaaaccactggctctgccagtagcttctatggtcatatatagcaagaatcttcccatatttgttttataacctcagattttcagctgaaatgtcagcaatacacacagttgtagtccattatcagaaacgaaaccaacttaaagtttcatgatcataaatacacaactatcccagagggtgagtcgaaaagcactttcccacagctccaagagaagcttttccatgaagtttacctaagtccttcatccagaaatcgcttctctctggtacctccttcttacttcttcaaactttttgatcctcattgtcttttctgtttctctggtaccaaagagggttccctgttccagtcctgaagttctgttagttgcatctgacaccacagtaagactgaacattaccatgtttttcctatgtattaccgtgagaaagctttaaatttttcagttagttgaatggactacctccggcagaaactatcgtctctgcaacttttgatgtgttattatgataattaagtttccatttctttattttactagattgtcttaatctcatgggatcctgaggctaagatgacaaatgtggg

SEQ ID NO: 35830 - DNA, 1590 bp, Bovine  19866881281467
  misc_feature (1)..(1): n is a, c, g, or t
nttttgagtatctaatgctgcaaatgttgtgtgtggaactgaatgaagattatttacctcaaaaattttcatgtacatttatgacatttcatttatgttacatttttaaatatgccattctttcaaagtcattttgcttggtccttactctgtaactccaaaatgtaatcaacaaatacttggccaaaggtcaataaaacaaaagtatatgaattttaaaatttccctcttttttcccctaccttttcactacttatgtcaatagcacattaattgctatagcccataacatagaaaaacacatgtacacatgtacactgcttagagttgggatgattttgtttttacaaaaatatgatcttttatatgtatcactttccaattatatgtatcatctttctcctgttatcaataaatcataggcatctttataattttttaatgatacactcttaaactagtgaatttttcaacaagaattattttaatctaaatatatttaacattaaaatgtctcattatctttcatatcatacttctcatgccctctggtcaccatatggctgaaattttttcaaacatccttttatcctctcttccctataatacaggtatattacatatgtctatacacacacaaagtccaagcaggcaaagtgctcacacgaacattaagtgatgactaaaggctagtggtgtactggtgaatgtttacctaacagctcttgggagagggggagaaccccaatttatagtgtttgcctatttcagtgttttaaataagtactcccacctaccttggcccttttatgctgaaatttaacaacttgctctctcaagcctatgtgagctggctccagaatgccactgacaaggccacaatgctaacagtagaaggtgctggaacttctgtagggcaacctgaggctagtagagagactcctctaaggaccagcctcttaagagatccaaaaatcttcttagccccttttcttgatccaattctacaggaggttagagaactcatcctttctaaggcttccacacacctcttctaaactccataaggatctttaatgtgggattgggcaaccaggtttcatggactttatgggtttatctccattttaccaatgttggagctaaaattttatccatgtatcctgtaggaagtcataaagcctacttcagaacctaccgtacctggcatctgtaattcagagtgatagacaagaaggcaactagaaagattaggtatctcttatatagtccttaagccctctggtgtttaaagaagatttcctaatggctatttcctccatggcagcataagtataactgccataagagatttcacatgcaagatggtacccagaaaccacagagcaggtgggctagcacaaaattcagtcaattatgaatcatactatataaaacttaattttgaaacaactatacatatttccccagctctactggctatcttggtttcaaaaatgtaaatcaagggatggttaagggaagatttaaataaatttaaatctagagacaagtcaatccctcttggactctggcattttctaaaccaca

SEQ ID NO: 35831 - DNA, 909 bp, Bovine  19866881293852
  misc_feature (1)..(1): n is a, c, g, or t
nacccagggatcaagggctgcatctcttgcatctcttgcattggcaggtgaattggagccacagtccaattgttagctctggtctctggccctcgtaccaggcctatggcccccccacattctggtaaaggattcataaatgacagcaacactgtgaaagtgcatgctgttttttcttttagatttccatgagcctctctgttgatgtcccatgcctctatgaacagtaaacaagcctgaaaagatacaagtatctttagaattaggaacaaagacagtgtttcctagcagattgcaatattgtattgccatgcacaaggctcaaattttcttttctgctctgcgaggcattttgcatccttacatagtgagagagagaagagtgaggggaagacttgtatgctctttcaattttagtttcttcagctataaagtgattactaaaataagtgccttttaaatgaatctgtgagaataagtgagatattgtaagcaataaatggtgaattccaacaaaaatattctctaatcatagaagttagtgaatataattaaaaatgtgaggagccaccccctgtaaatatctgataaatatttatgaaatgtagttatagcaatgatgcttctttttttagaaacatttctaaattcttcctgaaaactgagatctatatgaatatgtgtttatgttatgaccttttccaaaaaagaaattattacttgcatctggggaaaatctaaacacaaaacttagtatttgtttataggtctttcctcattgttaaccatatgtttatttaacaaaaaaaaagtattttgtcttcattaaaatttggggggctcatagtaattgaatagcagtgactcaagttcaattaatattttaatatttatatttggataaaggca

SEQ ID NO: 35832 - DNA, 723 bp, Bovine  19866881317855
  misc_feature (1)..(1): n is a, c, g, or t
ncgaattcacaatttggctagacagagtctacaaagttaataacataaagtggaaaaaggacaagatagaatatcctaagaagatttatgaaacaccagatgcccctgaattaatattgtaagttcaaaactgtattcgtattatgattcaagagctgaatttatcataccttttagatagttttggttgtgaatgtcagggtgctgtagtggtttaccctgtgctttttagtctatagaacacctttccatttgttttaatatttgatcagaaacatggtgactcattcaatattgtttttcttacttaagtagaataggatgcagtcctaaaaacaggttcaaaggttgtgcaaaatcttacatgttataggggatgctgggcctagagagaaaaacatattatagatttttaattacatcttgccacttaagacacactattcagtgttttcttctttttctttttttaagtgctctttaattttgatatttcctcctgtttgagtcccagttaacttgttcaaattaaataagtacctgattcagactaaagatttgccatttggggcatgcctaataacttccatcttcatttcacatattaagtttatgagacaaagtcttcttataattatgattatgcttttaattttttcacttcccactcattttttgtaataatggaaatatgtaatactattttaacaaatgaacaaattg

SEQ ID NO: 35833 - DNA, 945 bp, Bovine  19866881331673
  misc_feature (1)..(1): n is a, c, g, or t
naatcaaaatcctcccctcatattgatttttcatggaaggctgtttccaattaaaactgaagagtagcacagctcaaagaataaagagattgtgctggactggcaagccagctttcccaaagctcaaagccatatttacagaagctgcagacacagcataccaggagccgccgctagctgcaaatgcgtcctttgggaagcctgaggacagactgtatggggtgtgctcaccaccacatatttctgccaaagtctgtgcaccctaccttcattgcagagggcgcctgtgaagccaggcaagcagtcacacaggcctgtgatgtggtggcagggcccactgctgtgcacacactgcgggcacgtctggctgcagcgatgcccataaaaaccaggggagcagactgaaaacagaaaggaaatagttatcttccctgagacatgtttctcctgtattccacataaggatctggttcaagtttgggataaaaaaaatttatttttagtgatactgagaattttccaagcataaatcaacgacaaaaggaataagggcagtttttaataatgaaaagaagctaggaaactctgaattgcttgagggcaagcaaatgtcttagttctctttattttcccatttatggccccaattagcttgaagcttggcatagagcaagggcctggagaattttcattgagcaaataaatgagagaaagaaaattctaaataccaacaaggaccaaataaatactcacatgttaatcctttattctttaagagtcattactggcaataaatagatctacagtcagaatcaaaagattgtccctcctcaaaatggttcaggttaatgattgtgattgaaaagtgaaaaagcaaaatgcttcataattaggttcttcacaagacattatttgtatttaagtatagaaagacagcatagaact

SEQ ID NO: 35834 - DNA, 1048 bp, Bovine  19866881349843
  misc_feature (1)..(1): n is a, c, g, or t
ntcttcataaaaacaatgacttcatcatcagtcatagttcagcttttcacagggctcaaaaattagtccttgggccatgtgggagatagcaccaagtaacgcctcaccacctgtccctctccccagggccttagaacacaacatctctttaaaccaaaaaagaaaaaggaaaaaaaagaaaaagtgaggtcacccaaacagacacccaggcagactccagatcccagtttctgctcagccagagctccttacttcatttgtaaatatttaaagatcaccgcctcgtcaatgaacaacctgctattgctccatgaacatcctactggcatgcctacctgaaaattaagctagcagagaggaaagcaagtgaggagatgagaggcctcctcacctgagccctcaaccagcagtcacctttggtctccccggttgtatgtgccagtaaattctcatttttctttaagtcagttcgaatttggatttatatcacttgcaattgaaataaacttgactaatatactgataattatcaaattccattgggctatgtaaatatcattgccttgggaacttgaaacaacaaattcctgagatttccaacggtgaaaactacagcctgatgagtgatttaattaaacatgtacatatagatcactccccacgctatatacatagaaataaggagagacaaatctaaaggagataggggaaaaaaaaaaaaacttttgcgttttgaaacaacgtattaaggagaagacatgtgcccaatgtctaggactgggaagataaatgattccattttatgttgttattaaattgtattactcttcattaaatttaaatgcatttagaggaattaagcttatcaaaaacttggcagtgtgatataagcgatgattctttgtttatctgacaacatgctcctgtgagttgattcacaattttaattttggaagacagtatttctttgatgcggactgacagaatgatgtgaactgctgcatcattttgcatgaagtcatactgactggaaaggaaacaggggcca

SEQ ID NO: 35835 - DNA, 1202 bp, Bovine  19866881379826
  misc_feature (1)..(1): n is a, c, g, or t
ntgcagggtagggccgtgtccccaggagtgcctccccccagccccgacttttggggagcctcggaaggggtgccgcttactctgagtgcagtagagccccgtccagcccggagtgcatttgcattccccgtcgtaggcgctgcagaaggccccgttgtggcagttgcatgtatggatgcagttcgggccccagtgcgcagggggacaagctgaaagcacagcacagcgtggagagttcagtgcgagtccctaggccagcaccccacagagaggatcccacccacctgatcccacctgtccacagctccttcagtggacaggtcagcagtgagcatcaggactgagaacgaccgtgctccacacagggctcaaacccagatggcgatgctggtgccaacggtggccatcactatgatatgatattcattcacatgctgcagaccgaggtgggcagagcaaacatcatcccaagcttacagagttagctatttaacaaacccacactgagcacctagatatgcccagcgctgtgctaggtccaggggagacggcagataacaaggcagggtccacagcatcctctgaaagcttacatttttgtaggggaggcaggcaaaccaatcagccagccacccagccagctagtcacccagccagtcagctaaaacataagggcagtaaggactataagaaaaaataaaatagggaaatggggacaaaatgatgggagctattcctttatggaaggtatctctgaggagaggacacttgagtagagattagatgggcaatatggtgtgacttgagataagtactcaaggtcacataattctttgtctgtggtctctaaacctgcacttgtcactccactctagacttgtcctgagaggcttgttttaaacatgaaggctcctattttcatgtgagaacagatttactataaacactcttaactggatgaagcagaacataatcaaactaaattatcaggggtcatcgcctatcaaagagcaatgagaacctcagataaagtaacataagattatgggggtaaaatgatttgctttatattcataccaatgcttcaagaacataactacttaaaagaaggaacacttacaatttctatacggttatccagtagggaacatggcccccaaaagataatacataaatgtgaattaatttaaaaaaagaaaaaa

SEQ ID NO: 35836 - DNA, 1423 bp, Bovine  19866881734480
  misc_feature (1)..(1): n is a, c, g, or t
nggaccaagctgactgggaagacagggtcccagcatcatgaaatgacagaaaagtgtctccggaccaagaatcctggcctgaagtcaggctaagggaagactcagaatgactggggccaagcttcctgcctccttggtgggacaggggttcagagtcaatattcagataatttatagaaaataaagaaatttgtgcagacttgcatttgtagcctgagattcattggagctgaactgttaaatccattaaaaatgagaatgacaaagactccacccctccacccagaacatcttgctggggccaaccttccactgagttctgctctccaggaaacttatgaaaatccccccttgctggtgactccacatgtggatctgtggttctcaccttgaactactgcagcttcagagaggggctgtcacatctagccacactgtgaccgcctacctgcccctgccacgtatacctccaccctgataccctgatggactcagtcacagtcagaagcatctcccttaacctcctgaagcatagccaaaccatgcagtagtgtttaacaaaacttcattaaatgcttgggaataatcaagatacactgcaaaaaatcacatacagggctaaacttaggatcacaaattcttgtttgtcctcagtaggcttccatgtggcagacacagtacccttggcatttcacccttgttcagaaaacatcccattttcttcccccagagaaaggagcaggccttaaccttccctcttccaaagctgttcattttgaaccccaggatgattaatgatgacaatattcttcttctggagaaaattctaccccacccacagggtgtggtctcacttcatggactgcaactacatgtccctaaaaccgggaatatttaagcttaaataacactttttgcggcattcctagagtcctatagatatctatacttaggagaaaatggtctcgagatatacttctgtacagaaggctaagtatcaacctgtatgtctacattcacatatatggtaacttcattatcaagaagtaggcatttgcttcacattcttataattaaatgaccatttttgcaatttttataatataaaggaaggcttctccaaaggtgaatgaaaatcacaactctaccaatccagctgctgataacttatatggaatttcctgcacaaaatcaaagtctttttctctgccatagcaccctctaccattccaaggactacacagggtggcagcactacaaatcaaaggagaaatctcatcacagtgccatttttgggcaagttaccatttgttttaatagattaatagccagatacatgctcccttgttcactcaacaaatatttactgagcacttactatgagtttgtacttatcttatgctctatcaatcatatcagatgt

SEQ ID NO: 35837 - DNA, 1584 bp, Bovine  19866881905522
  misc_feature (1)..(1): n is a, c, g, or t
ngattttaagcactgaggatcaatggagatttgtcttctagtaagatcagctgcctacagcatgaagaaggggcaggaaggagctgacaagagacaggaaaccgggcaagaagcatggcagtcagcggcttagcgactcacgcagtgaccagagggataaagaaatgacccacatgcagtccactgtggagtgggctgatcctgctagctatgggcctgggccgagctcctgaaaaggaaattgatgtgctttcacgataaatcagtcaaaatatgtgtgattgggaggtaaccagaaaaggcagggaaaaaaaaaaaaaaaactgactaaaatgtttaagtcattgacttattttaaaaatataacaagccggaacttgaaagtggacagcaaataaacagataagagatagataaaaccaggaaagataaaggcaataaaaaagcatttaaaaaactttaaggtgcatttcccaaggaaaggaatactggctttgattcaagtcaacgagcaggaaaaagcagagaagaaaaagacttcagtcgcaaacattctaaaatttatcaagggtgacaataagcaaagtctactcttaacatgcattgcctagtcagtcatccatttattaattagatgctataaaaatcactggggaggaagtaccctgcctagagttcctaggataaattgcctttatgataaaacaaaatttcatttcataaaaattttgtaatgtcagatacagaataaactattgaaaaaaacaaaactaggcacacagaaaacaactttttagacttgcaggattcatctcccagtattagaacctacctttcatttcataatatcaagaaatttaaatgaataattctgtttctaataagtatggctttagtcttattagtactttaataaacataatttaacacaattaaataaaagcaatgagaaagaattattgaacctaaagcagatcaagaaagcaattacctaagaacaatcttctttcacaaaataagataaggtgatggttccaagatgagatttcagcctaactattattcatatgaatagtttttttttattgcctgtggatatggacaacactcctttttctttcagttttaattctttcaatctaagatccattctttaaaaaattacatggtgtgtttcttgaaatcctccaagctatctcagttggaaaggaatctatcttgttctgaaggtcccccaaagtaaacaagtcctttgtaactaggccctggttcatcagtcctaagagtaaggaaaatcttcattctatgtaagtcaaagccattattctataatttgatcctcccgtccccccacatctttttcacagtatagtcaatctagtatagcattgttctctatattataaatgattttactccttaaatgtaaatacatccttgatgccagtatagcccaaatatatactaaatactacaacttcaatactttgatgtattttttaaaggtttattcaatttcacacattttctctgctgaatcctctccaaaatgtccatattcctttcaacttcgggaacttcata

SEQ ID NO: 35838 - DNA, 762 bp, Bovine  19866882170039
  misc_feature (1)..(1): n is a, c, g, or t
ntgtgtagactgtcacctggtgtggggtaaaatagataaacactacagtgtattctaaatctccagcctttctgatactggaaatgtttgactcttctttacaatttgttggtaaagcagtatgagaggaaaaaaaagaggaccaagaattagaaacttgggttcatttcctgatttacctgttgtaactgtaagcagatctgtatgtcttattttgatgtattccattttaatgtttacatttctttattaggctctatgtaaggacaacatctacccagctttccagatgtttgctaaaggttatgggaaaaataatgaacctcttcgtggctacatcttaacatttttaattgcacttggattcatcttaattggttagtctatacatgtgtgctgatgtagattttggtgcatttatagtattaactgtcaacattgagtcattaagtcataaaatgttactttgcctgctatactaagtttctttttgatcaaaggaaaagagtttagaaaatactgcagataatagcattcattaaatatttgctcaaactcataccctcactaactccctattaggctaaagggaggtcctaggttcttatccctaaaacaagtatgatagtagcatagggtaaaggattatggtgtcttccatgaaggtagaacctctgctgatctttttggttcctttgcctctgattgggtcttaaagaacgtttggactttggattataccatggaaactaactttctcat

SEQ ID NO: 35839 - DNA, 4371 bp, Bovine  19866880360556
  misc_feature (1)..(1): n is a, c, g, or t
ntgttaatttctgctgtacagcaaagtgaatcagctatgaatacatgtatccctccttttttgggtttccttcccatttaggccaccacagagcactgagtagagttccctgtactataaataggttctcattagttacctattttatgcatagtagtgaatatatgtcaatcttagtggaattttgcaacaaaaaatcttgccccatgtgaaaggaatttggggagttcttaggcagtttggggaaatttcagggaggcgaagatgaagacaggcttcagtgatggggacattcactctacttagaaattagacactaatttctagtaagacactcaacttagaaattagacatttacttgacctaactataagtggttctaccatggtggggcagaagaccagaaattccagtatttcaattgctcagcctcatatgatgagccacgatgaataatatacactagctgatttgagtgtcttcttacagcccagtctgatagtaccctaaactgacattatcatctctcagtattcttctttccttggctctgcaaatgcaaagtgaaaaaagagaaatgaggcaaaaatgctattcagcacaaatacatgaagttgaagtggcttttggcccaaatggtccagagcattgtctccattctctgtctttttagcccagtggagaaaagctgttgccctaatggggaaatgaggaatcaatatggagctaatcctgatttggaaccttggaatgtgaaaatcacagatctttagggaggaaagctgtgttaaaatccaacttttattttacacatgtatagtatgtccttagtttcatgtatgtgatgttcatcttgcatgtaatcattctaaatgtgcacataatcattctaaataactagatctagatggcctgcaaatgtttgcgaggggagcccttctaactccataaatggtaccagtggatgtgtgacaaagcaaatgggttagacttaggaggccaaccgatttgcaatgatgcatgggttattgtcaacatggagataatcagcagtactgagtgtacctgaggcttaatctcgtctcaataatgatgctggtgggacagatacaaggatggtattgagagaagagtgacctgagacaaatattagtggtgctgtccacagctcattgtctgtaaaagcactgacttgactcaacttgacaatagttatcagtagaattctagtctctcagaattagcattaaggatattttcctcatggttggaagtcttcagctggaatttagctaaaagctggagacttttctgaggtagctacaatgacattttcaagtctgtggttgttggcggtcacatcgtattccaggtggctgaaccagcgtcgtaaatgatgtcagcattacctctgtattccgagccatgctactcatgttgtgccactgagtgttcagttttgaattcagtgttccctttgcctttctttgcttttagaagcaaagaaaggattgtcaaaatctttctcattttgtcattcattctgtttcattatcaagtctattggaaacaaatatatgccattgttattttgaccaaaacaattggttccacatcttgatagttacttcaatcttttatgcaggaggagatggaggctgagtgagagggtaaccccatgtaatgagaaatgtgtatgtaatcagatgtggatctcacaaccaacaaattttaaaaaaattacatctcaaagagaatgaaatgacacacattttggtcagtgctaagaatatagaacttcacctgtttctgcagactgcattgtttaaactctctgcaagaatgctttgctcccaggacctactcagtgctcagcatagaggacttgtaagggaaaaacccaccagtagatccttgttgagggggttgacatctagcagcaaaaaatgataatatggtagtcaatatttccaggtcatcctcatgtagtcattgcttcctttgttaggtaacaaagcaaatttctggatacatctctgaagttctagatcccttttcaggatgatgcaagattgaagataaaggcaggattagcaactaaggagaatggaaaaataagaatgaaatgaatgaatgaacttgactgaagcattgataggagatttaaattcatgccagcttctatgtcaagttcctttcattcatttcagctaatctctactacagccaggaatccgaggcaagaagagattaagcaccttgtctgaggtctcacagctgacaagtggatcatctcatctgctgacttcttcactcagatccaactgcctatccatagttaggtgatggcttttatttagttgatttcatgtactgctactgctaagtcacttcagttgtgtctgactctgtatgaccccatagatggcagcccaccaggctcccccgtccctgggattctccaggcaagaacactggagtgggttgccatttccttctccaatgcattaaagtgaaaagtgaaagtgaagttgctcagttgtgtccgactcttcgcgaccccatggactgcagcccaccaggctcctccattcatgggattttccaggcaagagtactggagtggggtgccatcgccttctccgattccgggtactacctgacagtaagacaccggatgtaacattctctgatcacaacaaaaccaatgaagtttttttctgattctgtctgttaagaagtcatcattggagtgtcagggtttacctctcaaagacattggtgagcaagtaataggaaaacttcaccctgttgtgtaaagcaacaagtgaaaatggtcaaactgggaagagtggtttatttgtgttgagttagaaagtcagaagtgtcggcatgtcctcaatgtgggctccacctgcttgaatgtctttcaataacattgacaggtcattgtgtttcaactattatttctttctaagcagtgcatggtatggtcattgaaatacccttatttaatcccaggcaagtttaccatgatctcacagagtctgatattaagaataccagtatgcagtttatatatggctttttatatttactccatagcataacttactatgaatagtatattttcagctagaccctcctccatgtctatcatataaaacaagcaacagaaaatcataagaagaaaaatatgcctggtgatgtgatgattttgttaatagtgagcctctgtgcctctgtgtgattgagatgcagtccgtttctgctgcacctctcacttactcccaggaaacagtcccagttgtctagagagtcaacacctcctgacaggcaccatctggtcggccattcattaactcccacgatgcggtctgtgaatctgcctctctccccgtgaccagtgacaccatcaagagctggtgtggcctaaagcaatattgcttccctgtttggatcacccagttaccaccaagcacgagtcctatgggcagtgtcctacttactaggtggatttgttgtatccctagatggactatttgatgacagtttggaaatttaaaggtgattgcaaatagcaaaagagtaagaagttttgatgggtgagcagatcatcaatgataaaaggattattgtttggtttggggagaaagaacaatgtagaaaattcttctttgagagtgcattttttgagaggtgactaacagagtcatgagttagattcattttcaacttgcattcaaaaaatcccttcttctgctttcttttagtaaggagtctagtgtctgctctgagatgctaagaaaggaaccaggagagtgacagtgaaggcaaagggaggggaaccatcagagacactgagtgtggaatagcaaggctcgtggtcattaccattaaattaaccacaagatccagtgtcagataaatgttccatcctgtctcagactcatgtttttcaaattcattcttccccttctagttctcctatagggaagtttgtcctattttattgtaagagttatttgatctgccgtgagtcttagaaggggtcttttgaaattttctgatgccaaaaatgttgggaagaacacaacctttctagagtgaatctcctagaatttgagctctacgaaggtaggaaccaggttgtcttctcctttgttgtatcctgagcatggtgtctgccatatcttagatgctctacaacatcttggtgaacgcaccaatgatcaattctgcagtgcagtgcaaacatgatgctctggtaaccgtaatagtagaaaacatttgctgaattcttgtaaataccttgcgctgggatccatgtatttcatgggcattatcgatttcattccttataagcaacc

SEQ ID NO: 35840 - DNA, 1882 bp, Bovine  19866880400764
  misc_feature (1)..(1): n is a, c, g, or t
nagaaaaatattgtatagtaataaatgtatgtggaatctagaaaaatggtacagatgaacccagttccagggcaggaatagagatgcagatacagagcatggacctgtgaacacaggggtcggagaagggagggtgggagactaggtttgacataaaaacactgctggtgtaaaacagatagtgggaacagagagctcaactcaatgctctgtgttgacctggcaaggatgggatgggtgtgtgagattcaagaaggatggtatatatgtggagttggcttagttgctaagtcgtgtcctactcttgtgaccccatagactgtagcctgccaggcttctctgtccatgggattctccaggcaagaatactggagtgggttgccatttccttcgcctggggatctttctgacctagagatgtgaacctgggtctcctgcattgcaggcagactctttaccaactgagctacaagggaagcccacagtagtaccttgctggctatcaattgaaaatatagcagtgatttcatgggttcttaggagactctcatcactgaaggactttcacctggagttcccttgatgctgggggaataccagctcattgattaccattatctctgcctctgaaatcagggaactgaatagattctttgcttatgtctatctcttcagaaataatctgttctttgacagaatcatagaagatccccagctgatattctatccggcatttggcccaaattcagcccacaggaaacactcacacacatttatctctgcaacaccagagaaggcagctatgcaccactgaaatcacttcttgcttattcatccaacaggagtcggtcagtgtctttcacccctgttatgctccttaggtcggagttagaccatccaatgagtctccccagcaggaagaacatagatcaacttacaactgtctcatcaaaagtcttcttattcaaccgaagaatcggactccatagtcttttattgagttgagatatggaagaactcacagaacacaataaggtctctctaaaaactctctctctcctcattctcttatttccatacccttttatatcccttatttaggagagggagttaaaagttctctgaataatttctgccatctacttttaaaatcttgctttaatagcacctattctggaatttggtttctgaaacattgtgagtgtgtgtgcatttacatataaagatatattcattcatgctgatttctgtacagaactattacgtcaccaggggcatcaaccaggtctgttgtagtcatcacagcacacacagcatttattcaggcacgtggcacttaataggcatccattacaatatttgtataatgaatgaatgcatgaacacatcttttttacttattcataaaaatatattaagataattcagaaagatcccctgcccagttctaatcatgaagccatacagtccccaaagagatttccatttattccacaagaaactttttttcatttttgaacctttcctgtaaatgcatcagttaagagataaacattatctccagagttctacacagttctgccaaaatgtcaatcatgccatgacataaacagctatttttttctaagtaaagcaatttacaatacaatcgtacaccaagtgccatgaattctcagttagctatacaaaaatatcagacctctctgctaatgagatgaaggaaaacataattgacagttatcttaggagatttcattgtaatgcacatgacgttataataaatctggttactggaaattctgtggtgcactctttttaaggtatattttaaaaagctgccttgaagtcagcttatttgaaattcctaaacatgtactataca

SEQ ID NO: 35841 - DNA, 1242 bp, Bovine  19866880425133
  misc_feature (1)..(1): n is a, c, g, or t
ntcatgtccattcaaatgaagagaagccccaggtgtcaagaaggtggaggccgtcccccgggcctcccagtgggtgggggatgcccaccaaatgtgggcagcagggggtcagtctccacctcctgggcttcctgccctacacggagctcctctttctgcctagactctccagtgccatagccaacagcagtcatgagtctcttggctggagaaccagcacttctgcacgttgagaatcgtgccctctggctgcaaggaggaaaagggccagaggcttggcagtcctttcagctctgagggatgacaacacggaggagatcaagaaggatgtggccccacagagatcacctctagagatggaaatgataataccgagaactgtggtccaagaacaaagctagtgaaagagaaaacactctaattctagaggccttaaagctgcgcactgttgcaattcttaaagcagatgcatcgtggaaaggaacctcagagaacactggcaatacaaccgctagtctggtctctgcagaaaggacactgtcaccaagagaaaatgacatctgtactttctagttggtacaacaggagcgtaaacaacaaaaagattttccatgtatcattattactactagaaccactaatactgccaagaaagtaggtaccataaaatatatatatatagggaaaaaagttctgacagagtgtttcagagactgctggagccaggattccctgaaaggggctttttctcggacactaacaaggacctcccgtgtataccacactcacagcacaccgtttgctttactcacaacggcagcgtcattcacaagcatgatacactcacctcaattttccagatgtttaggttagaaagcagatcccaagagaagtttccattcttatccactccgctgaacccaaagccagctgcattattcactgcatcagctatggtttttaaaacaacacattaggatgtgggacaaaagtcgcattgctgctttcaaagataactagatgtctgtctagctttaagagggagagagatggctgcagtttccttgagaaagaaaccaaaataaatttacaggatctcctgatactaccaagagtcagagctttggcgcttgggtgatgtcaacttttattcattcatttttattcattcactagcatttcatgagcacctgctaaggaagaaggaagatgctcacagaatgtgcagaatagaaaaagaga

SEQ ID NO: 35842 - DNA, 510 bp, Bovine  19866880506267
  misc_feature (1)..(1): n is a, c, g, or t
nacccggggaccctctgggtagaccgtctcagactcgtccctcccaaggaagggagacgcaggcatccacccagcatctctgctccctcgtgtatcagaattcagggctgctggtgcagccagttgagtaggcttcctcaccttgggagaaaacttcaagcagaactgtaggcaggtgctgggtttgcacgtggggtgcagcagccttggggagctctccagcacagctcctctgcagtcacaggcaagcggtaaggtggaattgtcagagtgctgtggacaaaattgcgtcaaatgccatttacttgcacgagtgaagtctaagatgaatggtaggtgctttggaagggatattaatatttttaagacctttgagtatacttaataccttgaagtattctttcttcaccaaagaatcgatgcttttgaactgtggtgttgggagaagactcttaaagagtcccttggactgcaagggagatccaaccaatccatcctaaatgagatcag

SEQ ID NO: 35843 - DNA, 1754 bp, Bovine  19866880542881
  misc_feature (1)..(1): n is a, c, g, or t
ntttcagaacagcaggttttagtgcaatatgatcgaaatttttaacaaatatgctgtttccacagtgtctgtcatgggttacatacgagccccatatgtttgttattttcttggaagaaccaattgacacaaaaatgtttcactgtttaaacagagtcccccttatcccagttaataactaagagcagactgtgtttgtctgtatatcagtacgctgaatggtctgggacaatgttggataaaagcgttataaatatatattcaatatatgtatgaacaaagttattattttttaaaatatatcttctcactccaaaaacaatgttctacctatctttgtgaatgattatatatttgatttcagttagcaaaacattaatgtatatatttaagctacagtgattagtgtaggattggtctctgtcttctatgaaggaattaaatgtagccttactcaatttccacattctctatacaacctattcctatgtcctgtcatgatgtatcatattgattacttccctgaataaagcacttcaaggagaaggactgtgtcttatcaaattccatatgaaagtcctggaggttttagccagctcaacagaataagaaaaagaaatagaaatacaaggattagagagaagggaataaactgcaactttgtaaagaagatgatatgattttctacttagaaaatttgaatctatatacaaataagtaaaattcataaatattttaaagggtgctacgtacgtataagatgatcagctcagttcagttgctcagtcgtgtccgattctttgcgaccccatgaatcacagcatgccaggcctccctgtccatcaccaacttcaaaagtaaattgcaacaaacagaatatgtaatgtataaaacaaaagagggaatgtttactagtgcaaaagaaaatataaagtacctggaataaatctaatcagaatgatcgaggcatttatatagatagtaataaaaacttaatcagaaacttcaaggtctgagtaagcagagagaaatactgtactcatggaacaaaaactttacatatcacaaagatttcggtcctctgcagacttaaaatttctctacaaattgagaaagtgactcaacacaattctaatcaaaacccaatggggtttttcatgaaactaacaaactggctctaaaatttacatggaagaaggtcccagattgtccagatgctcctgaagaacaatatgatggaacacctcattccaggttccaagactttaacacatcgattgtaattatgacattgtggtattggtccacagtagacatatagaacagtggaatgaaatagtgagcttaaaacagatcaacacaaaaatgataacttgatatatgacagagcttgatcagcaggaaaaaggggaacaggttgataaaaggttctgaaacatctaataatccatacagaaaaaaaaatgaaacctcacattctatctcacatcatatccaggaattaattctagatgagacagagttaagtataaagcaaaatttaaaaaaaaatcaaccaagatatccttcagtaattaaatggataaacaattgtgaaaggggtggcttccctggtggctcagtggtaaactctttgaaaaatatttctattctactccctccacaagtttttgtcctaacatgattgaaagtcttctattaattatcctatcatactttttcaaaacaaaatatgcatataaatgtaatcttca

SEQ ID NO: 35844 - DNA, 1204 bp, Bovine  19866880553585
  misc_feature (1)..(1): n is a, c, g, or t
ntatcaattttgtagaatacctattggtattgactaagaattcatcaaatgttaaatattattattgtctcttcaatgaaacaattgcttatattttaagtggtgattcaaatgaatgttacataatgcataatatttggtgatggagtctgatttcatacaaggtatttttcattgcaaaatttttttacttttttcattttgtatttttgtcagtaaaagtagagtatttgggggagaaatgtgtagttttgtagctcagctcagtaactgtatcccctctggtattaactggtagttacttcacaaatccatacgtttttaaaagaacagatatcctttcaagtaattcaaaaatgttttctaggtacttgtttatattcaaagtccgttatcttgcatgaacattcccccaaacatacaccaggaattcttctcatattttgagttgtcaatatgaaatgtacttaaaatttcccccagcatcagttttctttgtaagctcttcaacacatttcctatgctttgataacagataatgtcttgttttgcaattactttcaagaaaatgacttctatagttttctacctttaactcatattaaaactacgccaataagctggttgtcacacatctttgtatcaaactgaatgtagcatttgaagaagctaatgagaaaggttcccttcctgagcagtactgatactccgtcgcagaattacctgtccgggtagtattcccagcccttgctgtcttgctgaaatgacttgcattttgtggaagctatttggaccattacttgcaaggtgaggaaagctttttgagaggctctttgataataagaaaaacaggaactaaacaggtagatgttatatagtggaacaaatgacctatcatgataaatttgctagcagtcccttttttggacaggtatttgtgtgtgttgtttgcttacctttctgtacacttagaggccatattatcaaagtactaaattgtcatacaaatttgcaaattattgaaaataactttaaaaatatcaccaaccccattctcggacaatccctgtcaacatttttgtgtattatatcttttgacttcctgtgtatattaaaaaatcattacagtatgtacgtatcattttttatcctttcatctggcttttctagaatttcatctaaagggagtatatagtcctttgtg

SEQ ID NO: 35845 - DNA, 1468 bp, Bovine  19866880554429
  misc_feature (1)..(1): n is a, c, g, or t
naaattgaaagcatgtaggttagaataattttcaaattgccacctcactcaggagcttctaatagtccattagcacagataggaatgcttcaaactgtgtgatagttgaagattcttcttcaacttctgtgaataactcctttcatcctatctcgtttttctgcgttgtccaggctaacacttggatgatatctctgccttcccctggagtcttgcatttgccactgtctttccttgaatctgtgtctcagaataaaggctcattttatccatgatcttttttttttttttgccctaacactgcgcatcctggtcactcactttggcttgcttcaagttttatggcttataagtaggtattgcctgatgtattgctttgggtgtgcaacttttaatgttatcactggttttcagttcttagtaaataagaaatgaactgcatcatcccagcagcttctttttatagagcccttacaacaaggtatctttcatacattattaaatcccaccaagaagttgtccttattcctaatttgtaaatgaaaaaccgaggcagagagggttgaggaagcttgaccggttgtacttggtaaatggcagagctgaggtgttagtctcactcttctttgttgaaacacagatcattcacatttgtactggtctgtgtaaggagaaggtttgcttttgttgtcaaggatttcttttatgtgtcttgaaagcctagtaaacatgcatttcttaggacctgccctttaaaattagaaatggaagatttggacactattaatgtgacgggcatttgcaagcactgcttaattcatctcacatcagtctctggtcacatgatagtaatataatttcacccgttgacagccacacaagaaactgacaacctgatgccctgggaactgagtccttcagttaaactcctcaaccctcattttgaagatttatgctgtcatatcatgaacatgaattccatagcagcaaaaacacaaaattgtggtagttattatacatttctgcttattgatcacatacggatggacagtcagacttgtcagcatcaagccaaggatacaccaggaaatcaaattaaaaggaataaaatataactttctaattgcatttgtggccaagggacctacattatacagcaaccagcgtgtaacaggtgtacttcatgttccgtgatttaccttgctgataattgctttgcactcctaataaattaacccacagaaaatctattcatctgcatcttctttttatgcagagctagaggaaaaaggaccaggtatagcaatttgaggtggcaatcatgcactgatttagcaaagaaaggtggcatggtgagagtcttaagcattctgaaagcatttctttgtaagaaaagaggaaggagaaaagaagagagggcttttgttaattaagttctgtgttttttatcgttttgttttattcgcta

SEQ ID NO: 35846 - DNA, 1204 bp, Bovine  19866880607379
  misc_feature (1)..(1): n is a, c, g, or t
naagatcagtcctgggtgttcattggaaggactgatgttgaagctgaaactcccaatactttggccacctcatgtaaagagttgactcattggaaaagaccctaatgctgggaaggattgggggcaggaggagaaggggacgacagaggatgagatggctggatggcatgaccaactcaatggacatgggtttgggtagactccgggagttggtgatggacagggaggcctggcatgctgtgattcatggggttgcaaagggttggacacgactgagtgactgaactgaactgaacttgcagttcaataggggtgggagttgggtaaggggtctacaaaagaaagtataaatggtaaggaaacttctagggttattactatttaagatgatggctctgttcctagtttaggtgaattataatgttttctataattttttaaatgtcttttattttacttctttttttctgtttgctcatcagttcattttggtccgccatttgtgttttaaatagttgctgtttcttttaatttaggatgccatcccatgaaaaacagtttttaaaaaattctgtgccctggacacagtattgctgatttttatttatttatccatctttatcctgcctgagggaaaacaaggatttaaaatgcattgttgtctgcatctgtgagtagataaatttagtatttatttgctgtagtgccagagtgtactttctcactcttaattttgccaccagcaattatttggccacaatcttaagcagattgtctattctccgaatgtctctgcagagtctcactagctacttagtcatggtaagatgggtaagagtagaacaaactatggaaatggacattggataatgaaggttaattcttaccagagagtaaatctggtttcaagttttagctttttagaaaatgactatattaaaaatttcctaagttcatctgtccatcaaaaatctagttagtacagatcagaataacagattaaagggaaacatgatttctgagtggcaggaaattttgttctagatggagctgatgtctcatccgtacgtgactgacaggttcataatggcacagtacatttactctcccactcctcttgtgtgtagattaaaaaaaaaatcatttacaacaaaggtagtcacatttccaataacgcactgttaactcatcgtgtaatgggaag

SEQ ID NO: 35847 - DNA, 1945 bp, Bovine  19866880619486
  misc_feature (1)..(1): n is a, c, g, or t
ntgaaggcttaaaataaagactgaggtctcctgaggagggaggattcagtcttgaggctgactttggactctgtctgcagcatcggctgttccatctccaacctgataacctgctctgcagactttgaacttgtcagctctccaaatcatgtggaccaattccttaaaacaaatctctctctcaacaaactattgattttgtttctctggagaaacgactacatcagtatttttttccccccatggtttagctgccctgatataatactttataaaattcagttgatatactcagaagccactcagtcatatttttctgccttggtcccaatctctttgccatccctgccctcaactttccactgcttgatgaaagagagtatttatttcctctgtgctgtttcatctttttcactgctggagtctcagagaaagaaatttgtatttttttttgattgataatatgagttggaaatatcactttcataaaagatgctcaccccacttcagcaacacctaaaaagattccagctaatttagtgcatttaagcaccaaactgtagttgctactcagtgagttattaattcttcctctttcttctttttcttatttttttaaaaacaatatcttgacctattctcactccttccttctgcctcactgtagaacttactttttccagagatggaaatgtaaaatggatactctttccaaatgtttcatttgttttctttatttcatagaaagcttaatttcacagaaatatgagtaaagacacatttctagagtctgcttcagagtaatcttccatcttttgaaagtaatgaaaacagatagtaagcatgctaaaataagagctgttacactgtttatgccaaaatttgtaaatactgggcagctagttcttctctacttaggagaactattttgggctatgtcttcttgctctatttttgaccatataaactcactcattgaatgttgcttggagccatgcgcctgattacagatcaagaggtactgctggggagtgagatacactttggggttttgctttatgttttctaattaggttctatttttttcctcatattttgcacttttgaagttaacatatattcactgcaaaaaaaaaaaaccctgaaaaactaaacaatgtcagccataatttaatagcatataaataattcttaatagttatagtgtgtcttcttcttttcttcatgtgtgtatatatctatgtgtgtgcatgcctgtgtgtgtatatgagagagagagagaggtctaaattgctcttcacataaaagtatctcatgtttctttctttttttttggccacaccatatgtgggaatcttagttccctgaccagggatcaaacctgtgccctctttagtgaaggcattgagtcctaaccactggactgccagggaagtccttcacattgttaatactgctgctgctaagtcgattcagtcatgtctgactctgtgcgaccccatagacggcagcccaccaggctcccccgtccctgggattctccagggagaacactggagtgggttgccatttccttctccaatgcatgaaagtgaaaagtgaaagtgaagtcgcccagtcatatccgactcttagcaaccccatggaatgcaacctaccaggctcctctgtccatgggattttccaggcaagagcactggagtggggtgccattgccttctccattcttaatcctgggtacaatcaaatttcatttgactctgttcttgtccattacagcttgaagtccaatcttggttattttctgcatctgctcccatctttcttaggttggaacagaatggcaacatttctgtgatccaggaaatcaggaagaacttctgttctttagtttatttagagactgcctcccagagtcccttgccctgttccatgtggggacttg

SEQ ID NO: 35848 - DNA, 1190 bp, Bovine  19866880621870
  misc_feature (1)..(1): n is a, c, g, or t
ntcggattgcccatgggccaagatgacaggctgcctcctgatgtacgtggtacccattttgcagaagagaacaggccagtaccttcataggacttaatgtggtccttgagagacccagttaaagcctgaagatggtgtagtacgattttaggagctccacatctttgccagcttacctcagattctaggacatgggcaggacagtaggtgacaataagtctatctttaaacagtgaagaaaggctggtgggaaagttacaaaacttaccttaaatatgtcaccgaggcccatcatggtataatgatggacttatacatttctattataaaaggaaacgttgaaaagaagcaggtgcttgtgaaaatatctgaaatcagagaatctaggtttgacacctgattttatttatcaactctgtgattttttggttcagtggcaaattttgtttatgagactcaccagtacatttaagctcaaatgtaggtaacttatagagaaagtactttgtaaaccgctacttgtagtagtactacagtagcgtgagtattagttgtggcacgatctctgccttggggtaaataaagtagcaagtatgattttctcatgaacccaccggccctccccaccaacaattcagacacagataatactagaggcaatttttaatagcactgagggcttaggaacagtgtgtccctttgagaacctggggaccatttgtctgacaggcttgtctgtttagcctcagtgggatacaatgggatagatgattgtaattgtatcttgttcttttcatttttctcctttcaacttgtagctggtaaagatctactgttttatatcagctcaaaattaaggagatgagaatatggatggttgactttttatttacaagagagaaagggaagcaaatgcccagcaacctttctgtattgtcaaaggcagagaagcaggtatgaattcgtgtaaacgtacagaggaatgaggttgactttttgctttctttcatcagaaagtgcttttttcagtagaattatatgctataatatcaattttgaatattaataagaaggcatttacatttttaagaatattttttataggactgattcactcgtattatttctccacgcctgcccaattcactaactttccttttctttcagtgcacaaaataaagcaggagata

SEQ ID NO: 35849 - DNA, 1663 bp, Bovine  19866880626040
  misc_feature (1)..(1): n is a, c, g, or t
nctgattgtagattcctatgaaactgtgctttgttcgtgccctcaaggactctcatgatctatttaaagaaaacaaaaaaagtgtaaggaaacagttataatccagtgtgacccatgttatactggaagtacctggtagggatcagagaaaggagggtgtatggctgattctgggcattggaattaatgtgatgggaagaaagaaaatgttaatcactcagtcgtgtctgactctttgcgaccccatggactgtaacccaccaggctcctctgtccatgggatttcccaggcaagaatactggagtggattgccatttccttctccaggggatcttcccaacccagggatcaaacccaggtctcctgcattgcaggcagattttttttccatctgagtcacctcccagggttaatgtgatggtgaagattacagtttagctgagatttaaatggctgtccatgtggacaagggaggtacagaggagaaaggactttccgagcaaaggggacagaatgtgtgacatgatgcacgtttcagtgccatgagggatgtgtggaagtgcacagagtgtgcggtaaggagagttgggagaagaaataaggagggtggttgcagcccagcccacagaggtggcattaacaggacgcactgatgtcgtgaccctgtggttcatgcggccacaggagtggcatgtgctggaagccatgtgcctgcaggcaaaaggcaagcagtggagaagacagagtcaggcatggtgactgagttgctcgaggtccccagaaattacttagagagctgcatcttgggagcagagtgcagtgcagctatgaaaaggatggggaggacctgggagggctcaaaacaattcatttggaatatgggacctcattttgtaccacaagttggtgaataactcgtgatctcttgatgactcaagagctacaggtgtaaatctttcccaagtttataccaacctcaaagttatggaatctgattttatcatgttttcctgtgcatcaaagtggttttgagtctcccttgttccttctctcccattaattgattataaacatgattacttggaggtgtcattcagtgtcaagtgatcactttcaaaaaagagcaagcacgtccacctgtgacaagtttgtgattaagcccagaaaacacaagccttttacaaagtgaagagttgtgggcgctacagttcaccggtgttggggactcaagagcttgaatacctgcatgtctttattttagaatgtatcaacctatggtcatgttgacgactcatttcaattcgtacatgtaagttaaacataaaatacatatttcataggtaagctgagacaataatggtgggttatgtcaagagaaggaaaggcgatgaagcgaaaaagacatttgggaagtagaagtgcaaggtgagactggatagaccctccatctgttcacacgaaggagcaggaacacacacaagcacggaattcccccgaaagcaagagggtgggttgggagaaatattgtttcaacagcactatttctttagagcgtgttacatgaaaacatttgtttttaattctcaaggtaactgaggtcatcttccaggatcacattcggttattcagaacagtattgatcattagcgccatgatcattag

SEQ ID NO: 35850 - DNA, 895 bp, Bovine  19866880634643
  misc_feature (1)..(1): n is a, c, g, or t
ntgtgcatgctccttgttcttcctcgtaaagtacaaactcgctgccctctgttgcaggctctttatttcctcccattgtgctcatcagaaatgcttagctgctttcctgctcagatgctgaattaataaattacaaatgcctgttatcagagatttggaggttttgacaagtgatttagttgatcacaaatgcaaggttgtgttagggagaacctttgttttcggcctatagaatgtagatgagccttgaatctgaaaaataaacaggcaggtttgatgaactgaaattcatggcagggcttcttaatatttcctgaggttctaatcaaaggagcatcttaactggccccagagggaaatggaagatgaaaggcactgacattgatgcccactgcaccttgcctcatcacaactctttttttcccctccttccttttgcctgtttctaaaaatatctgggcaggtaagaattagcggtaggatgttatttagtcaaaaacaaaaaacccactgcataaggcaccatatctttaaaatttttaacatctatgaaattaaaatcaaggaaattgacatagataggatgaaagaagacacagcacctctagcttatgccaactaaaaataagaattattaatgaagctcggctttcttctgctgtgcacattaattatttatgataataatactccgcactgccatattaaagaattttcttcacccagcttcccagaaaactctatcttcttggggggaaaaaaaacggaaccttaacatgttaagcccacaaaagaatacattcctctcggtgtatttattatacaggaagatgaatatagtcttgggttattaaacggaataaaaacacatcttattagaacttacaggtatttt

SEQ ID NO: 35851 - DNA, 1162 bp, Bovine  19866880716736
  misc_feature (1)..(1): n is a, c, g, or t
nggtgccattgccttctcctgcttaatgatgaggagagtcctttcctgttttgctgcattgccacagactctgaaagccctgggtgctattatttagtttgtttctcttcagtcacctcatatcatagttacatggaatttaagcttcgtggaaacaattacttctggtaaactcacacgcttctagctcttataaggtgtaaaccaaggttaaagagattcttatgaaaagttacctcaagcaatgtttagaagtaaaacaccctgagattttttaaaagttacatggcattaaatgaataaacttccaacagatcagttactttttctttatattttaaactatggaagtatgataacatgtttacaggagacttggagaatacacaacaaagtcacatatagttccactatatattacagtttctttaagtagaaaagttaagatttttagttggattttcaatatcaaactctcaaaaatagaatgaatagacagcaaagtagaaggatatagtagacataaaaagcattataaaccaattcaacatagatttatacaattttcacgcaacagcagtatacaaattctattcaagttcccatagactataaaccatgagacataggaacatatccagggacataaaataaggtacaaaaatttcatcatctaaaggtattgaaatgctacagagtcccaacagatcaattattaagtagtaaacacgtactgtcaatgggctactaataagtctctcttgtgttaattatttgataattattctttggtttttactggtgtacttatgtgcatgcacacacacacatgaagttgtgcattaaagttccatttcttacaccatttacttttgggtgtgccagtaggaacttctgagggaccacatcacggggatccaaggaaatgggagaaaagctaatttttcaaccattttattgttgctctcatgcctgccaaaaaagcctatacagtagcacagggcttcagggcaaagctcactgcaatagctttctcttctaagtccatctcagagttaatcatttcctccaaggaggtggtgctataataaagataattaaattaaatttaatatagtggggcattgcacgaagctttatatcagatacgggttcagagaga

SEQ ID NO: 35852 - DNA, 2564 bp, Bovine  19866880745350
  misc_feature (1)..(1): n is a, c, g, or t
ntatctgtgtcagcaaagtgacgtctctgctttttacattgccatgataagacctaggtggctgtagttggagcagtgacagctcagtcccacctatcattcaaaaactcctgaaatattaatctgtcattccagtaagaatattttccctaccttctgagcatgtggaggagattgcttcccaattacagttcatgccctcttccctcaccttcccactaaatgtccagatgctttcacctaatttgtgagttaatttcatttaatttggagaagggaatggcaacccactcaagtcttcttgcctggagaatgccatggacagaggagcctggccgactacagtccatagggtcgcaaagaatcggacacgaatgagtgaactaacagttcaattaattatttttattgcatgttctcaatatttactagcatccacttgattgacaattcagtcttccatctgctctattcattctttcaaagcatttctcacagatactccttcagcatctgcttgcaaacttctgctgaaactggatcactaccttcctgccatgtaaaggtattaaagggttctactagaagaacacaattctttattttagaaatctgacctagagcaagcttgtgagatacatgaatacactgtggcaacctggatcggtataacatagatataggtggtttaatcagcagaaatttattttctaactgggagcctgggagactgcgaagtccaagatcaaagccagcagaattcagtttctgatgaggggtctcttactgacttacagatggccgcctgctctttgcattctcacttggcagggagagagaattgttcagtgtctgttcttataaaggtactaattccatcatgagggtcccactttatgacctcataaacaactacctctcaaaggcccccatctcctaatactgtcacattgagggttaggattttaacatgaattttagaaggacacaactaagtcaagagcacaacttataaaatgactcagaactgctttttgtatttgagatcagagatttttattctttagggaatatttttattctgtatccctttagggagctcatctctgatgccttggtaattacttttgccaagaaatgatcatgaagtaaagattctttctcctgaactctggcattttctgcctcaactctggcactgtgtttggggtgatggtatgaaaagtgaaagtcactcagtcgtgtgcaaccccatggacccctgtcaggctcctctgtccatggaattctctaggcaagaatattggagtgagtagctgttcccttttccagggaatcttcccaacccagggattgaacccaggtctcgtgcactgcaggtggattctttaccatctgaaccaccagaggttgatggtatgtatactgtgggacagtcttcgcttccacgaaacagagaaagcaggaaaattctcattactggatgctgcccccgattcttcagcatatgagtaatgagttagtactatttacctagaaggtttataatgattatttcatgttttaaattcaatcttgatttttctgcaaatgcagcattcagaggaaaagaaagaactcagctgtctgtacaaacatatggaaatcaatgataaatgggcagagattgcacagtatatttattaaccaagcttgtataaatcataatttttcaaccatttattaaactaataggattgttttgggaacatcaaagaaatctttattaggtaaataatcatgtttatccactcagttatggggaaaagcaaatcattcacactgcatttactctgcctcatcagatttcatttctcttaaatgtcagccgttgataatttttaccaaacaacttaggaaaaaagccaaaatttccatcacctctttagtgcaggaaaaggattgctgtttgtttctcagattctcatttctttcttaatgattcttccatatggaactcaaatttaggtagttggctttgctggccagctctctcttccttctttcttgattcatcctatgccagtctttatattatctaactacccaggcacatctcagtggctgctttgttaattaagcatgagccagatcccctcagcacctgagacgattccctctgtttccactcttctccatcatgtaaccagatgatgtgcgctgagagaacactgactttttccagtgttaatagggagaaaacataattagaaagctaagtcagctgcctgacagggaagaaacattccttatttgttattttgatttgtaatatcaatgttgtcctgaaaaaaagatttttataaatcagaattttacaaataaaactgtactttagccatatcaacatgtattgtgggagttagacatttcattcatttagaaaatagttattgatccctcgaagaccagtcattagacatagtgggaaatgtgaagattcattgatttacctgataaacatttgctgagtaccagctgtgtgtcagacactgtttgagatactggggacaagaaacacaaga

SEQ ID NO: 35853 - DNA, 1831 bp, Bovine  19866880770160
  misc_feature (1)..(1): n is a, c, g, or t
nttgtgaaaaaaggttgatccctctttacattgcttttgcagtatttatcttaattttcctgggttagagtatatgcataaagtgaagtcactcagtcatgtccgactctttgcgaccccatggactgtagcccaccaggctccatccatggaattttccaggcaagagtactggagtggattgccatttccttctccaggggatcttcctgacccaaggatcaaacccgggtttcctgcattgcaggcagaacactttaccgtctgaaccaccagggaatcccagagtatatgcatacaaaccctaattgttctgagaccatggtctgccagacaagaggaactgtgtcttatttatctttgtgtccagcccagagctttgtacttattagtagcttagtaaatgttgtttgaatcgaatagctctgtgcagaggctgtgaaggcagataatagtaagcaagtttttgacttaattaggttcaatcaatatatcataaaatgcccagggaaattcaatgatagattcaggctatgaaggtaagagcagtatctaaaacagccaggattattatctgaatcttttggcattcagaagaagttgacctccatatccggctatctgcaggaggtacaaaaaggatctggctgggaatttaaggaagagcattttccagtagtgcctgaaatgcattttagagaatactccatacctttggtggctttttaggagcagaaatgtccaacaaagaaagtatactgcctgtagagcttcctgccctgactagatctttgatatggcataaaatataattaccagtctccggaagtcaggcacatcacataaagaatatctttttgcctctgactgcagcttattataagattgcatgacaacagggataagggtgactgaaccttgacctgcctggctagtgaaaaattacttttagtttcgtgaaagctctggatggatgataatgtctcagactcctgtcttcttccttatttgattattgtgatccctgacacctgaatattgggtcaaagtttacaaatctacttagctagagctacctcctgttgttatagaacccaactgatgacaagctgtcatctgtttcaactgtgctatttttcatggcttcactgtttaccgatgaaagtgggctataaactccaagactttggctgaagcctgaacatcttgtctggggatcatctcatttgttaattcattgaaaatttatttattgagcatctagtaggtgctggacagtgtgtttggtgctggagataaaagaagacacgattcttcccctaaggaattcacaggctgttaaggagacaattgttgttgagttgctaagttgtgtccaactcttttgtgaccccacagactgtagcctccaccaggctcctctgtccatggaatttcccaggcaagaatactggagtgggttgccatttccatcttcaaaggatcttcctgacccagggatcaaacttatgtctcctgcattgatgggcagattctttaccactgagccacctgagaagcccattatggagacagaaaagccagtaatcatgctttagggtcatcagggctacaattaaggcgtgaattgtaggcattaattaattaagaggattctgaaagcaccaaaggtgaggaggaaccctctcataggagatgacctttcaagtggccattcccacttacctaagactcaacatttcagataaaaaatgtataattttctctccccaactctcgttgcatcctgatatttccctttctgtaaatagtactactatttatcttccca

SEQ ID NO: 35854 - DNA, 1616 bp, Bovine  19866880777828
  misc_feature (1)..(1): n is a, c, g, or t
ngggaattggaattaaggagacattcggggtagaagtgagggttccttgatccctgggtgtgttggacgtagatgctgggttcgtttgctaggactgtcctaacaaagcacactgatgggtggcttaaacaacggaaacgtgttctctcacagtcctggagaccagaagtctgagatcaagctgttggcagggttgagtctttctggagcctgagggaggagctgccctctgcctctctcctggctgctgcagtttgtccattaccatggagtttcctggcatctggatgcagcacacagatccacgccttcatctccaggtggcattctccccttggacctgtgtctgggtctaacattccctttttataaagatagcaggcagattggattagagtgcacccccaacgacctcattttaccttgataacctctgcaaagatgctctttccaaataaggtcacattctgagggtaaggactccagcatcttttctgggaggaatggcacagttcagaccctgatggacactgagtacgaggattcatgtaaatggtaccttgtgtctctgggcaaagggaacgtctcccgctcactcctaccctctttgtggaagctttcgggatgaagaaggtgggcctgatcctgaggacggcgttggcagtacagctggaagaaagaaagtgtagccaagtcaggctcgttgttgttgtttaatgtttagaaaactaaagaaagggaaatcaattatggggcctacctgaattttatttcctcaccaaaaaccaaattactcagcaaacttatcgcttgctattgcaggctttggtattaaagaaaacaatcaggcgggcaggattaatctctgacagctgccttatctttaacttgcacctttgttattttctgatgagcttctccttttttgctgccacgttgtaccataccctcactggttcctttcattttatcatcaggcaagagcggaggacctttcagtttattaaaaaacctttatttgtgaagaacaaagagtgggggaaaaggcaaacaatgaggtcagacaatctccttccagccaggagtcactcacctgttatttagagtgttatcagttagaggagacttgcctcgtggaaaatgaggctgtgacgggcgattcggttacacacacacacgcacacacacgcacacacacacatgcacccaaatctgactgacgcacatcaacctccacaaaaggcccttgactggcagagcagcaatactttcgtttctaagcttctaaaaaaaattaaaaagcctaacaagcctgtccctgtttctccccactttctctttcaatgcagttgaggcttcctggaaaggataaagccctgggcatttagtgaccatgtcctgtgtatgagctggagcaacttggctctcagaggagttggagtgtctcttttgcatcttatttgctgtttattaatttggggatcagttgttggcacacgccatggatttctgtctggaagggcagtggcacacgtgccattatttgttaggtggaagaacctgtgctttgtcacagcttcctgaacggaaagaatgttgcaatcccctattctctc

SEQ ID NO: 35855 - DNA, 1429 bp, Bovine  19866880818798
  misc_feature (1)..(1): n is a, c, g, or t
nttagaaataccatgagagtccgcagcaaaaagctcagaagtccaccaaataccaaagacaagaaaaggaaaaaaaaaaaaaaaaaaaatccctgcttctcctttctccttcttccccacctaatcctctcacctcccccaccctgcgagccctctgcagcaggaatgttctctgattagaggccagataaaatagcagagcagtaacgttttatttctgttctgttgccaatgagcttgtgctacgtccctcttatctcctctcttcacataaacatctcaagcccgaatagggcagtgggattagagtgtgtgaagtcagggtaaacacacacatatatatgtatatatacagatactgttcctctcattttcactcttttacaagtgcaagggagttctttttatgctctaatacttttaaaaataatcctgaataagataaactactaactaaacattagatgacattattacacattacacggagtctcctttaagctttttaggttttgtatttttttgtcccaaggaaataaatgttgtcattatggtcatggactcttttagctttagcgggcattatgaaggccaaccatgaaaagtaggataaatatctattgatttcaaaaaataaacaggacattgtgctcctctgatcaagacagaaaacgaaagcaattgcaatatgtcaaaagaaagaagtcatagctatttggcaaagggaatggctaagacaaagttgaatctctccaagaagagttatgtttgattaaactttttcctctgattcatcctaagaagctatttttccccaaggcctggagtggacttctgaaggacacatgtctgttattgatattgaattcagcttcagtgcactatttttaaagcagtcacagtcgtagctgtatgccagtatgtgtatagccttcagataagcaattgaccgtgaaataatagtacatggcttttaatatataccctctggttatgggtgtgcatactaaacatacagtatttttaaatatatgcctatacgtataaacacacaaaccctgtaagttaaagctctctatatctaaatggactggcagctgcttgaaatttccccctactctcccgaaggtctcaggtgtaggattcatgagccaatgtctcagctagaacaggtgtctatcgctgggtaaatagcaattaggcccaaatttcagactttttttttttcaaatccctttcggaggaaaagcccaggaataaatagttgctgtaacggccaggggtattgtgtagcattatagcctccagctggtctattacatactatagacaggcaaagaatacgagcacctgacagatgtgttctgttagcttcattaggaaagaaacaaagaaactcctcaattaatagcagcggagccaaatgggg

SEQ ID NO: 35856 - DNA, 794 bp, Bovine  19866880829501
  misc_feature (1)..(1): n is a, c, g, or t
natggccaaagatgatgggccagggtctttgtgatggaaatgtaattgtaaatctttatggccaactcaggctgtgatgtcttgatgctcttcaatttttaaaatatactcttggcttctatttgtattttccccctcaaataaaagctgcagaacaagaagggctaatatctgctcccaaatggacaggaataaaaaggaaaaacagcaagctttcctgaaagcaaaggcatttttcaccccctagtctctttgtacactgctgatatttcacatttgacacaaagagttgaaagcatgtaggaaaaagttcagaatgtgaaactgttctgtttagactttatgtcttgtggatcttaatctttagagactagtaatagttgtagtttcttttcagaggcaatttatagaaacctttgttaccaaaggttggcagagcttcattaaatgcactcattccattctaaaatcagatttcaaaaggattcaggaaatccacaacccctcatgaccaccaccaaaggatgaggtcaaaagtcaaaatcatgaagacaatcaacttaggacaagctgacaaattatcatcccacctgtgtatttgaatcataaaatacagtgtacatcagctcatttagaaaaatgtgctttggatttttattattttcctttctcacttcaacaccgagcgccattttcctctttctgagttttaaacaactcagaagcactggtgtccatttggtcccttgtactgtaagcaccggcagccaggtagatgtctgtgtaatttcctt

SEQ ID NO: 35857 - DNA, 1487 bp, Bovine  19866880899484
  misc_feature (1)..(1): n is a, c, g, or t
nctaacagatttgagtcctgtaaccttctgaaaatgctaatgcataagagaagggccccaggaagcatcaaaaaactgacggtgactagggatgtgtctgaacctgtgcagagggacgcggcatatttatcaggcaattttccaagcatgctgggtctccttgaagatgccacaggttcaggagctcctggatgtcacgaatcttgcgtttaatggcaagattattttcagtgtaagtctcttttgcttcactgtcttctgctacaggttgtccaaacaggcacaaatctgctttttctttggaggttgtttctggaggaaggagtaggaatggggcaagaaaggcaataactaacttctttagctcctccttgctttacatattttgctcgttttctacctttgctctttccttgatttaaccatttcctactatctcacaataactcacagaatgagaattgagaagaaccttggaaaccataagacctgaccccttcattttgcaaataagaaaacggaagtccaatgaggagaaacgagttgcctaaggtcacacctgtacaggatggagatccccgccagacagaatgctcttaccccacccaggttacctaggggccagcacacctccccacgctctccgctgttctcctttccctcagcacttggaggtccagatggcccagacatccctactgcacctgcgatgtgatgcagtccttctctggctgttccacaaatatgatcaaaaacaaactcgcaccttcgagattgttcagaaattctcccaccccgccccctcaggtttctagctcgtattgggtcccaagaattgcacgtggcccttgggaagggcagtgcttctgtacacgggtcttacttccccagttagaccacaagaaatgggagcactcttccttccctcctcttcaagcagaattcagtttgatggctgaattgaaatctgcaatgaaaagaatccaaacaagtgaactcagaccactgcacaaagggagggtgtgcaggagggggacgatgagaagggggggcggatctctgcagggacccagactacagaaacaggggggtttggctccagctttgttgccataggcagagattctccttacagtgctgctgtcctcacaaagatggtttttgcttcacctgatagacatttttgtcagccctccacctccgtcctggggctgaatccgacaaagcacatgaaaggcataccagcataccaggactcgaggattccctaccctggaaacaaatccaaggctgttgcatcctgtggccaaagcacagcctgaaaaaaatgctgcctgatcaccccatctcattctgttcaggccgctggacagagcacttgccagctccaaactcactttttgtgcaaagactcaatacacctattgagatcatgtccaggaatggcctttccttctgctgcctccaggcagaaagcccagcagact

SEQ ID NO: 35858 - DNA, 1073 bp, Bovine  19866880934829
  misc_feature (1)..(1): n is a, c, g, or t
ncactgacttggcaaatatatatcatctccccaagccaagcatcggactggctccctccctgacctctttctggggaagtggctcaaaaccaataaaaacaaagaagagcctgttggccttggccccaaccagcccggccttggtcactcctctgtgatctgaccgcccagaatccatgcgggcctggctgccatcctgactgcatagcacctgccctcccaacaacactggccctttgtcaaaggagatggcttgtggggacagccctggggagaggaacagctgagcagaccaggctggtgccacgtgggacaggggggcttcagcaaacaaggcgtcctagagagtggcctgtggggctggagaaggatcagacagtaagtccaaccacagtgcctgatgagactgaaacaagaatcgaggacaggaggctgagcaacccccgagccttggccataggaccctccccagacacacacctgccgccacgcagactcctctctctccctcccccacctctttgctgagcccagccctcacggtgactctgccaggtctggctcaggggtgactggactggcctctctgatccctcaacaggcaaagagagcccaagggtggcccttctgttcattgtttgctcagagcttaggggtgacagataccccctgaagtcagccccttgtgggctctatggctgggatgattgagaggcagatccgggctgaaaagaaagtcatttccaccctttctttgtgccaggcatggtgtcaagggcttgacttgcagcatctcaacagacctcacaacaactttcagagggtcagactcaacttgtaatagggttacatccccataaacacatcttaagttgaaaatcctgagtcaaaaatgcatttaatacacataatctaccaagcatcatagcttaacctagcctactttaaacataagtagatcacttacattggactacagttgaggaaaatcatctaacactaagcctattttataataactgtgaattgctcatgtactttctttctttctttctttcttttttggccagcca

SEQ ID NO: 35859 - DNA, 2566 bp, Bovine  19866880940086
  misc_feature (1)..(1): n is a, c, g, or t
nggaaagatcccacatgccaaggggcatctaagccccagtgttgcaactgctgagccctcgaccccctagagcccatgctcttgcaataagagaagccacctcagtgagaagcccgcacatcacaactacagaggagcccccactcccagagtccacataaggcccacatgcagcagcaaagacccagcacagccgaataggtaaataatttgtttttaaaagtcactctttctcgtgtagtctaatgaatagcaacaaaataaaatgagatactaatatgtttcttaaatacatttgatatgaagattggcctggtagaattatttcttggagtatacagccctgcctcaagatgctgttctgtttgtactgaaacatttgtgtgcaatatataaagccatgaaagagagccctgttttatattgtgtgttgatgtgtatctgtaaaaaatgaattttttttcagtatggagcatttttcatttaacaagacattacaagtaaccttgactgtactgagaaggcacacaacctctgcaaattctgcatcttcctgatcctagtctcaattaggtgccaaacgtaactctaattcttatgttcttatgtagtgtttaattgtacggattccataaaaattcacttaatataaagaaaacaaatactcttttttattgccacactaaatacttttgccagcaaatgcttttgggggtgctttttatttatggatttttcacaatgccggagagcttttgtcttttttagtgctttatatttatagttgtgggatgatcattttctgcttggtttcacattgagctctttcagaactagttggagtagtaatagtttcatactgtttatactttctccccttgagtcctatgttaaatctttttcactctatcagtgacatcgcagtatattatggtatacattctaaggctattaactttcggcactgctaatgatttcttttatatatatatatacacacacacacacacacagcacataaaacatgtaaatgtttcttattcaaacaagaaaactcaaagcataatcaaccccaccagccaggaggaaaaaaaagaaaaggagatttccccgcccccccccccccccccccaatgagattgcaagagaaaaacaggtttgcaaaatactggtgttggaaaacaaagtaaattacaatagacccctaaagggagagatttccttttcttaaaaaacagcttgtttagtattctattcctacacttattttttttttttaagtaacacatttgaaaatcaacaatcacaatgtaacagctttcttgactagaaggaaaggtctgagtctttgtgacaaggcaggaaggaagaaaaggaaggaaactcagagtgaccttgacttctttcttcatcattgtgctcaggcatttgtaaaggagcctggactaatagctcaccttctgttctaggagttcagagactttgagggttgaacctggaggtaatgtatgcaaagtggctgggaaacaaacactcttaggggcaaagtttaacaacagaagatttaagggattagggtgattcagcaatggccccccaaaataggagaaatgaaatttaatagggcaataacaaccagtgtttgtgtctgcacaatgaggattgcctgatcctaaaaagaagtcttggaagccactggattcctggcttacttcacattttggcttcctttatgttccagctttttaaatttaaaagaaagaatatttgtttatttatttggctgtgccaagtcttcattgcagtgcgtgggatatttaattgcagcatgctaactctcaattttggcatgtgagatctagttccctgaccagggattgaacccaagccctctgcattgggagcatggaaccactggaccaccagagaaatccctacactttcatttgaaatgtttttctcattgagagatttattggaaacacaggaaaatatttaatgactattcattaaactgctgatctgaatatataaaagcgaatacactcttagacacgtgggaaatacaaaataatcataaattctgcaagcctacaaagactttacaatcccacactgggagatatagtaaattccttgtaaggtgactttgtaaatttgcttgggtcagagtgagaattgagaagtggtagtgaaaggagggccttcccaggtggtacagtggtgaagaatccacctgccaattcaggagacacaagagactcaagtacgatccctgggtggggaagatcccctggaggagggcatggcaacccattccagtatccttgcctagagaatcccatggacagaggagcctggcagctactgtccgtggagtcacagagagtcagacacgactaatcgagcacgctatgagatgagttagaggtaaaagcctgaaaataggtggggtttatttacagagatgatggattctgactagctgtttgtacaagagcctcagtctatgtgaggttttttgtctttccaacttgagcatagcaatgtgcgacctcataaggaa

SEQ ID NO: 35860 - DNA, 821 bp, Bovine  19866880946847
  misc_feature (1)..(1): n is a, c, g, or t
natgaccctgtgctgtgctatgagttatcacgagatgataatccactcctttggaaatgggtccgtgaatccacagacacttcccaccaataacagactgcaggcttttgagcagacacgtttataccccttttgaatgctgtttattaaatctgcagagaaactggctgattgaaagagaaaactataccagataggcctgtttccctggctgtggaaacagtttcttcttcctcagagggaatagtccatgagaaacctgagtaactttaatgagttttagacaatccagccgtccatgtatggttcattcccaagccttctttagtgttaaggatttcaagagcaacagtctaggatgttctaaaaacagaactgatgaacgatagacactttgtattacaacccagtgtccccataaggaaatcatttaccaaatatatacatatatatatatgtatgtatactggagaatcatttttcatgctctctttgtctcttgggatgtctacagtatctgcttgcatcagtcagggaggcccaaccactgtgcattaggaggtaagggatttattatgggaattagagcgtccacgatgtgggggaggtggaggtccaagtggggagttggagaagctgtgagccagaagtcaagtgcagccagtcacccaggtggatggggagcgggaaggtcgtggaggagtttggggggctgtgcctctgtgtagtgaccccttctgtggatttactgccaagtatctggtggtgaactcaggctcccgcggtcaatagaggcagctccatagactcatagatgcaga

SEQ ID NO: 35861 - DNA, 3405 bp, Bovine  19866880952044
  misc_feature (1)..(1): n is a, c, g, or t
natcatgtctgtgctgcttttctatttctgccctgaaaggctattattaggtgctctctctcttttctacatctccaagtattgccttcgtaaaacattccaaaaagtaaacattagctttaggccatttgattactggtttcccagaacgctatgttctgtcctgtttctctccatattcctttaatattaaaaataggaagtgactgaaggcagttgaatggctctgccttagaggctgttcccctagccagcctctcaagcattgttgggtccttaccctctaaaatccatttcgtccttattatatagacagtcctctgccaagcagaaaaaaaataaaatagaaactgaacatttctttcctctctaccaattactattttttctaagtgccttttgctttgtttaacaagcctccttagctgtggttcattttaagtaaggctcattttctttttcgtgctggattagcatctgaatggggaggagagctggctctggcagtgtctttgaacaggtgatataaacagagcctgggataagaagaaagcacggacacggcccccgcgggtggcacccaggaagtgatctgggctgatagaggtgttagctgtgtttaccgcagatggcactcttattcacacactacttccttccagctctgagctgacccaggggaaatggtgtgtgacatgccttgtgtaggaaccattcctgggagtctcacagggcagagaaacagctaggaagacagactgagtatttctttgacggtgaagatggatatgagatgaacataggaacctgtgttccacataggaattcctcctacactcctctaaagcaacacggagtaaagtttgtcccagttagtttatttttcctcatcacacacctctaaagcaaaatgcaaaaaaaaaaaaaaaaaaaaaaacccacagaaaacgatcatgcagttaagccaaggaagaacttaatcctgaaaccaaaatcattttaacatagatttaaataacattttaggggacttctctggtggcccagtggctaagactctgagttcccaatgtaggggcccaggttctattcctggtcagggaactagatcccatgtgtcccaactaagagttcatatgctacatgaaccaaccaagattgaagatcccacatgctgcagctaagatctggcagacccaaatacctgcattggcaggtgggttctttaccactagcaccacctgggaagcccaataaataaattttaaaaaatatttaaaaaaaaataacatttcagaaaaccttaaatcatacatgactttgcattcttttgggggcttcagtaacattaaaaaatacatttgtacacagttataattgttacctttttcttccaaaatttaacactagttcactcattttcatgaactatgtatcaacataacccatgaacttatttgtgatactgatatagaacacattctttcatttacttaatcactcgtcaaatatttatgagtgctcctagatactggagacctatctataaccacaaaggagattctgaaagataactcacgagggttgcttttcagtaggttctaaagccaatctctttatattttattttgcaaagtcagatttccacatcactaaatgcagacagttttttccctaaagaaaaagtaagcatagaatacaaaatctcatctcacttggctgggccttcacttctatgcaaaatgaagtaggggtaaatttaatatctaagctccctccctttttttcccctggaattgtatggtctgggtttaaggatatagcaagaagataacatgcatagtgtcatcaaacatcttataaatgcccttaggagtcataatgctttttctaattcatcagcgacaattaagcaagaacctagatttttatttcttagagccctgctaagtatttagtttaaaataggcatcttcggaaatggagaccaggaatttaggaactagagacagaggggctgacataaggaatacaatttacttctgtttgtttcactatgatgaggaaagaccaaacaagacttgagaagactagaacaatcccattacaggatccaaagagaagagtgaaacacatttcctccttaataagtgtgcttttgtgttcattccagccacctattaatccaaattaaaaaaaaatgttcttgacattcccgtctgagcccatggctgttctgatatcccactgagatctacaagtaatcaagagctcaataattccaaatagtgtttataggaccacttccttccataacttgtaagctgttctttagtgaagacagatggataaagtctgtaggaccctgtctttgaaaactgtctttaagaactttcgacaaccagtggggatgcatgtctgtctctatttaattgagttcattatagttaatatttttgtgactttcaatcattgctcaagtgttacatgttttaatcaaaagtgaaacgctttatggcacaaatactgttaaaaatcccaagtttgactatattatttttggaaaaaaatcttctggagcaagatactttttaaaaaagcagggaggggcacagttcttatgattttcttttgctgaaatcaatgtaaatggaataataaacaggcccaagttaccttaagaatgaagcattgccccttgttactttcacagatctctttctttagtaagccattttctggtctggattttattttattggctactagtttaaaagacatagtaaatatagtacatctgacattttattgaccaaaattatctagtaaatggcgcttctgagtttactagcaaaatgatagttgttacttacacggatgatagagaacagtgggccataagtcaaaaagtcagatggaaaccaaagtggtccttgggggcagggaacattagaaagtgtcactcatcgaagggaagaaaatcctctttattgtaggacttcagggtgtgattctggggtatttctaatactggaattaagaagccccttttgatgtgattaggaagtgaaaatttagtgtacacttgaaatgacaacctatttgagacactcgtgataaggaattgccatggcaaacagatctgagaggcatggccctaaacagaatctaggaacgtagagttgagggtgtaagaaattttcaactgcttgttttcagtgcaaagataaagctcgttggaatgctgaaagtacggtgatgtgggccaagcaggtaattggatgcaggtaatgcagcaattcaccaccacgccatggaaatgacctgggagatctctcaactcccgtgtgttccataaaccagccagagaatcttcttttttttacttaaaatttatttatttat

SEQ ID NO: 35862 - DNA, 624 bp, Bovine  19866881113113
  misc_feature (1)..(1): n is a, c, g, or t
naaccaatggatttcctctatttcttccttcttagcagcatggcaaatgccttcatctcatcagaaaagaaatctttattggatttttatccaaaagcttgtgtgtatggagggggagagagggaggaaaatttgaggtgaaaaatttaaacaacctccttaattattaaagtttgttgtaaaggtagacatcacttaattttgaggagtagaataaataccttgattgtttcatttcatatgcaattgtagaaagagcccaaatgtgtttgaggaatgtggatttactttgtcttcacttagtgatctgggaacaattaaaaggatgaatagatgcatcataagtagatcaactgtaaaaaattatacatgtagatacgcttttgagaactttatcccagaagtattcggagacattttacacaatctaccttcaaggatggctacctggtttacggtagacatctaataagtattcgtatgttgttgtttagtcactaagtcgtgtctcttttgtgaccccatgcactgtagcccaccaggctttctctgttcatggggttctcttaggcaagaatactggagtgggcagccaatcccttctccaaagtatttgtgtaaatg

SEQ ID NO: 35863 - DNA, 1414 bp, Bovine  19866881203126
  misc_feature (1)..(1): n is a, c, g, or t
ntggactcattgtcacaggcctctgggtccattttacacacaaaatcaatatactactactaataaataggattacttttccacgactcctggtgggagctcagctggacttgtttgggaggcagtttcaaagttctccgaagaaaattactttcacccttaaaacccacagaaggcacctgagagaaactgaatccagaggcaaccagcagtgggacagggcgtcttagactggtgctcagttgctcagtcatgaccgactctttgcagccccgtggactgtagcccgccagctcctctgtccagggaattttccaggcaagaatactgaactgggttgtcatttcctactccaggggatcttcccaatccagggattgaacccgtgtctctgtgtctcctgcattggcaggtgaattctttaccactgcgccacgtgggaagccccatagattggtaggtagatggatttagacagagagagaaagcatccctatttaaacccttctcttaggatctctgcaggcctttgttcctccaacacgtgctgccctttctctgaaactgtagaagctcccagagtcctgtctgtggcctcttccatcaaaatgcctctcctttaacatccaggactgtgtatacctcacctctgtatgatccatgccctgacccaaagatgctctcagagccgaggatgagttaaaccagtatccagcctaagaagcatctgctaagtgatttctctcctctcactttctatattttacactgtggccccaccttgactcatcctaaattggaaaaactactcttggcaaagccaggtctttcaactcttgctgccccaatgtttgagtccttaggagggatcttgttaggtcttcttcacacaataaagactgcttaagtgccatcaactgccccgcagaacatggaaacacttgataacccacccccagacaaaggcctgtaggtatcccatgaagagactccacgtgtctaggggtgggcagggagcatcagagttaagagagaggtttgaagtcctttcgtctggaaatgtagctggggacaaacagcttaaccactgagcctcaccttcccccttgacagatgagggagggttgctttacaagatgaaataatgtatttaagatgctcattgccattccttgtgcacaaaactattcaatcaggttgttgtggtggtggttcagtcacaataaagtaggcaactgttatctttcttatggccccaaattgacagtggagaggggagagagaaccccagtctgtacaattgcaagaatgaataatgaaaaccaataatgactcaataataaaaagcaattttaatgaaaaaaccaagtataagatgaaaggggatgggatttttccaatttatagcaaaaca

SEQ ID NO: 35864 - DNA, 1351 bp, Bovine  19866881230810
  misc_feature (1)..(1): n is a, c, g, or t
natttcggtttagctcttattatagtgttcctaggcagcctgattgagtttagatatttatttttaatttggttctatagacccctgtgggatgaacatatttcccaaaaggcaacaaataatgttaattccaagggacttcacactcaatagcaaagcgttctctaaaatatgagatgataaaggatactgaaaacttgcgttcctttttcctgtctctctgtaaaagctcacaatgagatgtgcttcaggctcttttctggactcacaaagccctgggtggtctggtctctgtgggtcgttaccctgcgtttccctgtttatttactctgttgtgcctcttcgctctggccacaccagttttctcctcccctcgtgtatacagagtgtccctcctacctcagggcctttccatttgctcttcactttacctggaatgcccttccttctcccatttcaccctgttcaatcccctaagaactcaactcaaaagctggtctctaggaagatttctctgatatccctgatgtgaaagtgtacgtgtgtgtgtgtgtgtgtgtgtgtgcttctgtaggctttgtggatggaaagagtagggaaagaatagtttctcctaacacttgtatctctcattttctttgcacttttcacaatgtctacatttgtttcatagctgttctatttttacgtctctgccactaaactctaagaccaacaaagatggaaatcatgtctgtatttgttcactagtttctctaatactaggaatgctgcccagagcataggagaacctcagtaacatgagacacttcatttgttgaatgaatgagtgactatattaagtgtaattattctctgtattttaaaaatcataattgataaagggaaagggagaaagtcacactgagatatcctggtttaactaaaggcaaatagattaaaaagcaggaaaatgactcgggcattttccagctatgtgatcttgagcaaactatttaatctctctgagcctcagtttcttcaaccataaaattgtaataatgtcaacctcaaaatattgctataaagactaaataagttacctatgaaataaaaactgattgattcccattccttttattatcttcttatatttggctttgcaaagaccaagtgttaaactcagcaccatgatatgctcaaggggacccgttcaactggtcagtgtttagagaccccctattgtattctgcttctcttcacagctgagggggaagattttcaatagagcaggacacagaacagagtttccaaggccaaaccagccttaggagttagaggcccatggtggactactgtctccagttaaaga

SEQ ID NO: 35865 - DNA, 1085 bp, Bovine  19866881247584
  misc_feature (1)..(1): n is a, c, g, or t
ncaggcaagcccagacccaacagaatggaaagccttcctactatcagccaaagcaaatccctcaagggcaggatgtccagtgaattgccctggttcccagtggtgctgtgccaggcagcagtgctcccttggaccccctaagattctcagcctttcgggaagtccttgttttacctcctttgggttttgggtcacatttctttggatggtttgcctttggcaatgagctagaaatccagaagttgggacaagggtaggtatgggataccggtgcaccttgcccacgtttctggggtctgtgaggaaggacttgggatgaatgcaatgtgcgcggattctgtaggcagctcctgattctgcaggtcactccagctacaagaacctttgcttgtgctcaaccacctgcagcagtgtttcccaaatgttccagaaggccagggcacgtctctgagggtagagaaagtgcctggaaatctgcatctggaacacacgctgcaggcaattcttattctcgagtagctcagaaaaaaaacattggatctcttctttttgacaggtatctggggtccgtactatagaattattaccataacagagaccatagaggataaagaccaggaacaagcagaccttggagccaggctccttgggttcaatttcacctgcctcactcctcagtggagccctgagctagcctcttaacccctcactgtctgcttcttcctgtgaagaataagcatgataatgacacccacttcacaggttatacggataatgtgctaatgcacgtagagcacttagtttagtggcctccacgcgcgggcacttgataaacattagctattattatcccatagaccagagactgctgagaggcagagctaaagccagatctggcctagagacctattttgtttggcttgcacattttcctttttaattgagccaacatttaaaaactggtagattcctggccattttaagacacttgaagacctggcaacaaatgcggcctgctttcccctctggcaaccatcacctggggcggggtcccttggcactcttcagaaagggcatttctttct

SEQ ID NO: 35866 - DNA, 601 bp, Bovine  19866881284545
  misc_feature (1)..(1): n is a, c, g, or t
ngtgggagggcagtgaaggaggtgatatttcacatctaaatatttgaaatgaaaaccttgtgtatatattcacatataggcatgcagcatccccaagcatgtacatatattctcccttgatgtacgatctcagtaaaatatcagagagaaaaaaatgtcagacatacatagcatagcaatcaagggctaatgaagatccaggtattaaatcaattaagaagtatcaaaagctacctaatcatcaaggaacaaaattggcaccacaatatgtagtgagtatgggaaagcctaatttactaaacataccctgcagtcacataattgcatgtaattttaccagcataattaactaatttaattaccacttctcaagtgcatcaattattgacattacagagttttcagacagcagaattactgtgtggtacatccagagaatgcaaaatgctttgtacactgattttcccagtcacagtcaactacagaagaagaacgtggagttgcagggagaaaattcctgtgggggagcctctgttgggcaggttgaaagagggagcacccccaaatgtgtctgatgtgaggcggagacgaggaggaagcc

SEQ ID NO: 35867 - DNA, 711 bp, Bovine  19866881290458
  misc_feature (1)..(1): n is a, c, g, or t
nccaattaccgcaccacaccgaaaacaaactggtttcagataaggtgggaagacagtcacggagtcacccacacatcatcagagcaaactgggggtctgacagagctgccctaacttaagcaagatgaaaagcctcagcactggtgaggacgcaccgtgctgtggggctgggggcggagtgagggtggaaggaacccagtggaacaaaagacaaacacactgcagctggcatgaagatgtaactcaagggaaaggaagatgtgaccttaccagcgtcgaggacaaggcagacccaggcagcaggacctttgagagaggagagaatggaggagaggagaaccagccagaatgtgtccacctgagacagtgctgaagacccggctggggagccttgagaccttattccttcatgaaattcaaggaagtgagccagctccagctttaggactaacattgaacccttcaagggcttcccaggtggcgcagtggtaaagaatatgcctgcaatcgcaggagacgcaggagactcaggttccatccctgggtcaggaagattgcctaggggaggaaatggcaggccactccagtattctggcctggaaaatcccatggacagaagagcctggtgggctacagtccgtgtggtcacaaagagtggacacaactgagcatgcacgcatgcacacacatacacacacacacagacactaa

SEQ ID NO: 35868 - DNA, 1203 bp, Bovine  19866881291651
  misc_feature (1)..(1): n is a, c, g, or t
naaaaagatcaaatatattcaatacaaaaatggtaagagaaggactttgctggtggtccagtggttaagattgtatgctctcaatgagggcatggaattctatccatggggcctgggttcagtccctggctagggaattagatcccacatggtgcagctaaaagagctcacatgccacaactaagacctcatgcagccagataaataaatattaaatatatatatgtatggtaagaagaaagagaaatgggacaagaagaaattaatagaaaaagttcataagaacaacagtcaagataaccaaatggactaaactcaaaggttcaagggaaaaagagtcacattggatttaataagtatgtgaatcctaaaggactcagcccaattgtaatcaattcacaagggcttcccaggcgacgcaaataaagaatctgcctgccgaacaggagatgcaggtttgatcctaggtctggaagatcccctagagaaggaaatgacaacccactccagtattcttgcgtggaaaatcccatggacagaagagcctggtgggctacaggccatgggggtcacaaaagagttggacatgacttggcaactaaacaacaatcgactcacaaacaatattacccgaatcactgctgttagcatcagcaaacaaaaacaagaaataacagatttagactcataaaaactgcagatgtttaactcagtggagatacttcacagcttcatgaaatgatttaacaagtaaaatatttgaaaatatttgatataaagttgagtattcagcaagaaattattggcaatagaaaaaatgctagaaaaaagtctcctagaaattaaaaaatatatttgttgcaataaaaaattctgtggatgacttaaacatcagttttatgcaataaggagagaactggttaactgagagatatacccaaaaattttgtctggaatataacaaaaagggaataaggagaagagaaaatacaaaaaagaattttaaagactttggaacataaaattataagccccgcatagacagcataaagggactttttcttggccacgactctggtcctgtaagatcttagttccctaaccagggatcatccttcaccccctgcattagaagcttagagtcttactgctctaagggacctccagggaaatccccaggcagcagacaggaaggaggaaagg

SEQ ID NO: 35869 - DNA, 1260 bp, Bovine  19866881426007
  misc_feature (1)..(1): n is a, c, g, or t
nattagtgctgagtaatattccattgtttggatataccactaaaagtaaactttttaataaacatggtgtagaataaagaacacaaaatcattaatgcacagcttgatgaattttcataaaataaacacacctatgagctagtaccccagatccagaaataaaccatttcagcacagaagacccctggtatccagttcaagtcaatggccccctaaaggctaaccactatcttgatctctaacaccatgtattagttttgcctgttgagactagtttggatgtagactttggaaacatttctttcagtcagtaacccagaaggcaagtagtgatttcctcctacaatttggcataaagctagtttagtttttttgaaaggaagtgttagtcactcagtcatgtatgactctttgcaaccccatggtctgtagcctgctggggtcctctgtccatgggatttcccaggcaagaatactggagtgggtagcaagccattcccttttccaggggatctttccaggtttaattcctgggtctcctgcgttgcagcagattctttactatctgagccaccagggaatccatagttttaacaactatattatggttataaaaggtgataactttaggagaaattgaaactgggggatattgatagcttagtgaaaaattgtatggacaaaataaaagcataagaaaaaatgacatagatgagaaacatgactcatgatagggttggttcaaaatgaggatttgtttcaggcattttagatgtacccctgaggaatgaactgagaagcccttgtcacctgagactttcatgaagatttaagaatgcttaacaaattttaacactgttaaaattgttcatcaatttagggcaacctactgacctgttgaaatttttttttttttcagttaggcaaggagatgagcagtgtctgtaaaaaacatatgatctcatatcgatgctcagtgccaagaacatttctcattcactttactgagtcacagtaaaaacttcaagtgtttctggatgaaaccttcaatctggggatggcatgcatgactaaaaatggcttttcaagttagcatcttttgtccgtccttacaaaacaagctcacttcagtattccaagtataggtcaaagaaaacacagtaattctaatctggagctgagggatatacactctagggggtgagttgggcaacttccatggtctaaacctcctggttatatgcttatctgatatatttg

SEQ ID NO: 35870 - DNA, 893 bp, Bovine  19866881558763
  misc_feature (1)..(1): n is a, c, g, or t
nactctagagtcagacagatatagttacagattccagctctgatacttaatagctatgtgacctttgatagaatgtttaccagcctggtaagaaaattgtgcacatagcaagtgtttaataaatacagccgctgccaccaccatcatcaaaaccatcattattatcaaaatcttcatcatcatcattatcataaaaaatttgggggaagaaggagtatgatccaagctgtgcctttggagatgaatttggcaggaatgcacagagtgagctggagagctaaagcaaaccagaaatactcatggttctatttagaatatctctatcttgtccatcatcctctttgcaacacccccacacacccacaagagttggagtagaaaacctaatactaccacacaaatgaggcaaggctggcatttcggcctgaagtgagtaatagccaaggatccagacagaagtcttaatattccctatccccgcttttctcaggagctcaggactaaagagcggacagacttatctccgggctcacacctagagatctcacccacagcattcacttgcgatgctcctccatggtctctgctgcctgcactgctggccatctgttacagtggcatcgtgccagcttacaggatagctcgccggcttcacagaagccccggggccaagaaatggtttcaacaggaagcccttatgtaactcacaagagtgcctggagagaactcctgattgcctcttcttttccccacacagcaatgctgatggtgatttctgcttcatgacattttatttcacctgttgattaaactagtagggtctccaatctaaatcttgaaatctggagaggaaaaacacgaaccatgtgtagatacctgggctgccaaacaga

SEQ ID NO: 35871 - DNA, 987 bp, Bovine  19866881706034
  misc_feature (1)..(1): n is a, c, g, or t
nctaggcaaccttatggacaggtaaccccacaggctccgttgtccatgggattctccaggcaagaatactggagtgggttgccatttccttctccaggggatcttcccaacccagggattgaacccaagtctcttgtcccatgagttggcaggcaagttctttaccactagcactgcatatagataagtcatttaattttcatgattctcagaggtagcccctcaaaatgaaggaatgagtgaaattctttagcagttacagtcaacagaataaatgtagattaagaaaatcaagagtaaaacttcaatcagaggcagatagattaataatctatatctatatatcaataagtagggggtttcccaagtgactctggtaaagaatttgcctgccaatgcaggagatacaagagatacagttcaatccctgccttgggaagattccctggagtgggatatggcaacccactccagtattcttgcttggaaaattccatggacaaaggagcttggtaggctatacagtccatggagttgcaaagagtcagatatgacagcgtgcatacacacaatctataagtgaatatacatactcactttcagaagcctaatcactaatcgttcatacgcatgctctatttttaagcttagaattaagccagggatgattaagggaagaaactgtcaaaaaataaatacaaaaagaatcagagcagggtaaactggttctccaaatatagactcttaggactgataggaggagtggcgtttgcccagccaagtttcactttggaggagaactcccaatacagtgtaaccaccagggcagctttggcagggctgtttatcatagccagcaaaggggagggtggagccctttttctgacaatgaaaactcttcacagagttcggtgagaacaacatgagctcactccctaaagatctcaaaattcaacagaattataagtcatgaaaaatatgttctag

SEQ ID NO: 35872 - DNA, 2915 bp, Bovine  19866880560006
  misc_feature (1)..(1): n is a, c, g, or t
naatgcctgttatgaaaagaggattttcttcactgttgaagaactcaccccctttactcttgacctccccattcctgctgcataccttcttccttcctgtctcttcctataccttcccttctaccctcttcagtttctcaacattatcactcaatctttctccttttgctttcttcgttcaatgcatacaaatcataactctattcaaaaatgtcttcttagatgcccttctctcacattttaaaaattaattattccttcttttcccctgtatcttcaatcttttcctaaccaagatgacctatttaaaaatatatatatatatatatatatatatatatatatattcctccttccctctaatatatatcttggagaaagaattttgcttctggttaccagttgaacttaacccatatgtgagataatatttaggcattagatcagaattagatgagaaatgaacaatatcactatactcttgaacttagaattgtatgaaataattatatgggtttagaattgtggagtctgccacccttttttaattggaatatagttgatttacagtattatatatttcacctgaataacagtgtttcaatatttttatagcttatactccacttaaaggtattacaaaatgatggctatatttctctgtagtacagtataatatatccttattgcttatgggtttgcttcctttggttcacatggttatatatgaatgaaatttgcattgaaaagggaattattgcattatatttcttggaggaaagtttttcatttggaagtttatgtacaggaagaatgttttatgtgtatgtcgagcagccaagttatggactattatagtcattcattttaggtctattactcagcatgtcaacagattacctattgtaacttggtctcctattatgttattttgaactattcttctgcttataccatggatgaataaagactcacttttttcagctcttagagagttataggctcatgacctacagtcacccatttaaatgctcctatttttaactttacatattgaaagaatagcttaaaaataaatggctaatcacagcaatggtatagagatgagagtagaggtgatgctggaagccagtgaaggaggagtattgagagcatccaaaagaatcagtttctgtgaaatgatacttataagtgctacattgcctaggcttcatttttcctgacaattttctaaacctttttatttagtcttttcaataattctctgagcctctagataaccttccaataagttcctttttattgcttaagttagttacaatatatttctcttgtttcccaaccagtgcccaaactgacatacactaaaaagcatgtaagtagctgagaacctaaataaatggcaatatgtgagtgttgaaaactgattttatctcacatcatgtagcgtactcaaaccaaaggtaacttcatgatgtaactgcaggccacgtatcaaggaaacaaaaatatgggaaaagcagtataattctaggaacaagaatttatgtgaaggacacaggcagaagatgtagactctagaatagactgaggaacagatttactaaataacagaagaatagagttactacactttccaggtatagaagttaaagaagaagcaggagagcttcaactttaaatttacttcaagaacaaatcaatattttacaaatctgcctgagtataaaaattacatgggagtcttataaaattatgggtacaagaccctccattgtaaactctggtgtattagtgttaggatggatctaagaatatctatacttttatttaagttgctagacaatctcacaatccaaaatgcctgggacaattttggactaaaaataattttgtatgaatgagagtgctaattatcaacagatgtttgaaatgtagataattatgatttaaaggctacatttgcttataataataacacagtcatgcttttgaaaaagtttagagtgagagtttttgaaaaagtcacccaattttgaagtgttgtcttcggctcaatacactggagagatgtaagttgttttattatgttgattgcaagtagcttcgccttaaaagtgcagaaagggagagttgattgtctgtggcatcctgaaatagtcatatattgctttcaaactcagttggcaagaattcagtcagaaacatctgcaagaatttagactgagccatgtactcagtgatctttctacctgttactctaattactacactataaaatttttatttttattctagctccctctgatgctgctggaagaccatagagtaaactcagcagggtaaaggagtctaagatgagaaagagaaagaggagaaataaggcaggaaaacagagaaaatgaacagagaaaatgtcatgctatacagaataacaaacaaatcctccacgtcttatggtttctgattcctgtatagcctcaaaagtaatgaagttgcttaacatatttggtagacagtatggtgtcaagtaaatatatatatatattaaaagaggggagataaatttgtaataatgctacatgaacttgtatacatttccttcacttcctgctcatttgttttttttaagctatattgcaaacagacaatagtatgagacctcttaatgttatattcaattatttctgaatttgaatatatttgagtccctggtggtcagaggttaaagcgtctgcctggaatgcaggagacccagatttgatccctgggtcgggaatagcccctggagaaggaaaatggcaacccactccagtactcttgcctggagaatcccatggaggcaggagcctggtaggctacagtccatggggtcacaaagagtcagatgactagcaacttcactttcactttca

SEQ ID NO: 35873 - DNA, 2409 bp, Bovine  19866880642779
  misc_feature (1)..(1): n is a, c, g, or t
ntagcctcacataggcacaagtaagaagagttattataagatatccattgttgattggattttgaatttaaagcctgtaaggaaggacaaaggtcagaattcagcatgctgtgatttaaattctctgtttctagcaactgatttgttacaagacatcctgccatgtctacaaagacatccttctaattttcaacagcaaataccctaagaaggactgacatctgagaattatatacgaggctattgaaatataaccacaaaaatatgtggagatctttaagaaagcatataacttttcatacaccatacaaaacatcttccaaattaagctaattttaagtagtattttcatatttagttttttaaaatgtcattatcagggcactatctcttaatttaacatcagaaacagcatatcaagtctgaaaatttctgatctgtataagtagaaagttatattaccaaagtattcccaaagatatttgagtttttaaaaatagattatcaattttacagtttctccctatggtgaaatttgtaggttctctccctaaaacagacatttcagttgattgcttccagctttttggcagaaacaaaaaagtgaatagctaacacctggttactagctaccagccaaacttgcagtgtctgcctctgtggaaatgaagtttgaatcttagaaatcaaagtaaaatgaaagtttaaaagctttagtctgtttcctcaaatacaagggctatatccacagaaagagaattaaggggggaaaaaattcagagcatctattgtaaaattcagctttaatattttaaccctgaaagcagaaatacaaatatcaccaaatagttataattgaaattgaagttctcattatccattgttactttagtttattgacattttaagataaaatcaatgaggagtcagtgttttaactgatatataataaatttatttaacatggcattcttataaatatttcagaatggagggtgattgagacttcattccagatctttatggaagaaactgttctgggaaagggaattctaatattttaactttttaaaataaactttatttttaagagcaattttaggttcatagcaaaattgagcagaaggtatggagatttctcatagctccttgacctctctacacatgcatagcttcccctgttatcaacatccttcctccagagggtacatttgctgaaactgataaacctacaacggtacatcatcatcactcaaatttcacactttgcattagggttcattcttagtgtcgtgtgttctgtggtttgtggacaaatttttagtcacatgtctccatcatgcagagtaatttcacagctctaataatcctctgtgctctgtctattcaacctcttttctctctaactcctgaaaaccactggtgtttttattgtctccacagttttactatttccaacttgtcatatgattggaattgaacagtatgtaggcttttcaggtgggcttctttcacttagtaatatgcatgtaaggttcttctatgtctttcatggcttaatagcttatttctttctagtgctgaataatatcccattctctggattttctacagattatttatccattcacttactgaaggacatgttagttgcttccaagttttgcaaataataaataaagttgttgcttctgctgctgctgctaagtcatttcagtcgtgtccaactctgtgcgaccacatagatggcagcccaccagactcctccgtccctgggattctccaggcaagaatactggagtgggttgcccatttccttctccaatgcatgaaagtgaaagtgaagtcactcagtcatgtccaactcctagggaccttatggatcgcaggcctaccaggctcctccatccatgggatttccaggcaagagtattggagtgggttgccattgccttctccaaataaagttgttactagtattgatatgcaggtttctgtgtagacataaattctcagctgatttggataaatatcaaggaatataattactggattatatagtaaaactctgccaaaatgccttgcaaagaggctacaccattttgcattcattccagcaatgagtgagagttcttattgctccacatcttcactagcatttggtgtgattagtgttctggcttttggctattagatgtgtcattgtattttccagtgttttttcattgttattttaatttgcttttccctgaggatatatgatgtgaaaaacaactttcttttccatgcttatttgccatttgtttatcttctctgataaggtgtctaatgagatctttagtttagatttacaataacacgctgaactcacataaattcattcttgcatttggtgtaaaatggtatata

SEQ ID NO: 35874 - DNA, 711 bp, Bovine  19866880716821
  misc_feature (1)..(1): n is a, c, g, or t
natcctccctcctccctccccataccatccctctgggtcgtcccagtgcaccagccccaagcctaaacatttatttctttatgacaatatgttgacaacacattaaactgaagttttcaaaatttgaggatatatttttcccaatgtagtgttggaaatttaaatctaatatttttatttctgtgccctaacagcctattaaaaaggtcaaaacagaaactatctgttagagtttcactactttgaaaatttgccatgatttttcactgtatctattcttaatatgaagtgacagcatagcaaaggaagtaatttcaacacattttcttagtatcggttgcacatacttttccttgtgatctctccagtgatttaaaaaaatattttatgccaagaatttcttcaacatttgaccgaatttctctcttgacataattttataaaccttttttatttttcttggtatactcattgtacttttttctaacttctagtatctcaaagattctacgcactgttaaaataagatccaagtaaactgccagaagtcattccttttccttcaggaggttccccctaccacccggttatctgctgatttattaattgatccaaagcataatatgaagactctaagatatttgtggtaatgtagtcaatattgaaataaataagcaaagagctgtatcaaattctcttagaagtaatatt

SEQ ID NO: 35875 - DNA, 1184 bp, Bovine  19866880745748
  misc_feature (1)..(1): n is a, c, g, or t
nttaaaaagaaacacacacacacacacacacacacacctttcaagtcccagaaattgcttcctcacacaaacgaataattgtatggacataactctggaagggtacagcaaggtttacttctttaaaatatcttcatattgtttattcagatatgaagtgttacttgtctaactaatgatgtataaaacctgagaagccccagtgtatcctctgggctaatttgcagacaaacaaccctcaactgttaactcttttcccctgacttattctgtatatgattatctgactccctcaccctcattctttctataattaaaactaatgttactttttttctccacaaacatataatttattggatgatcttcaaaaaatttctatacttgaataatcaaatggacttagagtcaaagtttctgattcagaagtatatttttattcatctcagaagagttttgagttgatacagaaaatgcctatgttctgtgagtgtgtttaactgataaactggcataacaggaacgattatgtcagaacaccttagtcctgaagtgaagtgaaagtgcaagtattagtcacgctcagtcatgtctgactctctgggaacccaaggactgtgtagcccaccaggctcctttgtccatggaattctccaggcaagaatactggagtgggtagctattctgttctccagggatcttcccgatccagggatcgaattagggtctcctgcattgcaggctgattctttaccatctaagccaccagcgaagtcctgtctcaagctttatcctgatcaaataatatggcctctttatatctccgatactgtagatacacaagcaaccctatatagtattgtatttttcaattattgggaaaaaaaagtttggttgattttatttcagtaacttctgaatacatgtgttgatgtttaaaattcatttctatgctcatagttaataattgattagattctatgatagtaaatctttccatagaagaatgacaaaggatgaaggtagcaggtgtgagcttctttcaatttggatttgattgctactgaagctacttaagaatcaagaaactgaattttatatctgtgtgccttctctatataatgaagctaattattctaaaaataattgagctgacatttctgcagtaataccatcaaacctga

SEQ ID NO: 35876 - DNA, 1568 bp, Bovine  19866880918820
  misc_feature (1)..(1): n is a, c, g, or t
ntgatattgttgactcctctttcttcctataagctacagagacactctgtttatcttaaaattgaccagtgatagattctgataaccactgtcaaagaagctggggaaaaaaaaaattgctgcctagatgttctcatcactctgtcattcagtttgcatttggcaagaaagggaaaatagaagaggtgttacctaggtaaataactaggacctattaaggaatagttgataaagaagaataatcagaataattcattctcaacttttgaaggtaattttctgccctggtctgaattttaagaaaaattcaattatttatagtaaatacttgactgtattattttattctaatgttaaatatgtaatttaacctactttgtactgtctagtttcacaatactcttttattcttttctaatgagtcaaattcctgttttgaataaagattgaaagacatatgcattttattttcaatacctaaggataatctgtcctagaagactgaaaattgattatgagaaaaccaggtctatatatggcacatatggtttattgaatgttaatgaattaaaatcccagctttcctgaatacattgtatgtgtaaggaaaaaaaattaatttattcacagttgtaatgattcagaatgactactggcactattaggttgttgtttttttttccccgtgataattatgttacattaaaataagccaagtggtacaatgatgttattagaagatatattcataaaatttgaaatagtatacaaatacaattataatatccagaggcattgaatggtaattcaaattatgttttttagtttttagatgtaaatgtttaacacaaagatgattaatttgccaagtcaagctaaattatctttcatttggaaaagcgctaatgtaaagcactaaaccattggttctaaaattttgcaggaagcttttaagtaacttctttatccatttaaaatttctataacagtaaatatgtattgtataaattttggaacagcatagtacattttttttaaaaggactgacaactatattcagactatcatattcttaatttcaaaaatgaacaaaatatcaaattcaaaagtgctgtttcatttaggaacagatatgctgaaactggaattgcatctgttcaatgtgttagaatgggactcttaagcacttgtggtagattattgtttgctggataaaatttaagaactccatctgttaagctttatgtacaaattttgtgactcaaattttggatgtaataatgtaattaaaatagatgcagcagcaaatcatattattgcaaatgaaacagattatatgatgtgtttagaatatgaaatatttctattccataacaatgtgttaaaaatatgatgatacagttttttcatgaaaggcactatgcctaattcatcttggtagactatataatagagtgcaaagtacatttaaagacccaaataaagggtttgatatataaaatatacttttaaattaataaaatattttatttgctcaacagcaatcactttttctagaaaaaactagt

SEQ ID NO: 35877 - DNA, 1704 bp, Bovine  19866880958129
  misc_feature (1)..(1): n is a, c, g, or t
ntagatgtggtgggaaggatggtttaaaacacaggataattgaaactaataaatgcagaataactgaaagaactaaaaaagtcatagttttgcagttcctaatatgatgtttgataggcaatggtgtgatttatattacttattgttccaaataaagaagtagggcttctgtggtggctcagcagtaaagaatctgcctgcaatgcaagagccgccggagaccaggagacaggggttcaatccctgagttgggaagatgcttagaggaggtagtggcaacccactccaagattcatgcctggagaatcccatatacagaggaaacttgtggactacagtccatagggttaaagagtcggacacgactgaaacgacttagcacgcacccatacaaggtaaaacagtaaagatagaaaagaagaaagagttaattgcattctatcccataaggttttaatattttttaatctaaaattaaattcccttcacttgtgaaaagttctatgctcagctaggaggctgctatgaaacattaaacactgtcaattcttactgtgatgctgcattaatactgcataacatcaatattttatattaagaatgttaattatccctgagattctggaatgcctaacagtgctgaagtactagtgcactaattttatttttaattcattttcttttttctattggctgttctccctggccctgattcttctccctgcagtgagaaatgagttaaatcagctctcactgtcaaccagaacagccttggaactaagttaatccatcacctactgacaaaaggttaaaaatattgaatatcaatatccagaatgttttccaactcacagcaattgtttggcaggagctgtctaagctctgggactacagtgcaagtttttggcattttccgtgtccctggagttaccttctgaatgtactttatgtatgaatataaatgtaagcttttacttttaatgtagttcatactagatatataaaatttttgaattaagataatacaacaataaaatgtgaatatctactttcataataaaagcaaactttcacaactgattttcagaattatcagctggatctattgtgtacagactcatgcttattcatgattatctgatcacacattcagactcgtcacctacaaagactgaacaataggatcattatttttttgaatgaatttaactcagttcacatgtgcaaagaactctgttagacattgggaaaattaatgcaaacagttctgtccatgaacacatggaatcagtattctaggagttcaaggtaagatatatatatatatatatatagtatgtgtgtgtgtgtgtgactacagatgcattatagagaaaaatacattagagatatatgacatcttcagttcagttcagttcagttgctcagttgtgtccgactctttgagatcccatgaatcacagcacaccaggactccctgtccctcaccaactcccggagttcactgagactcacgtccatcgagtcagtgatgccatccagccatctcatcctctgtcatccccttctcctcctgcccccaatccctcccagcatcagagtcttttccaatgactcaactcttcacgtgaggtggccaaagtactggagtttcagctttagcatcattccctccaaagaaatcccagggccgatctccttcag

SEQ ID NO: 35878 - DNA, 1109 bp, Bovine  19866880959499
  misc_feature (1)..(1): n is a, c, g, or t
ngcaatgcttgtgtaaaatatgtgtattgtactttatggtggtggccctggagaacgtttttccattttaaagaaatcagctacaaaacaagccctgtcaattatttgcatgcagttttcacagatttcacaggaaaatatggacatggagtatttgtataaaatattttgatatatacatttggacaactaaaatgtttcataaaacactgtgtgtaaaaagctcactgttcattagacagatttgtcccctgtgctgctgattcccatcttcaccctaaagatgaacaaatggactaattcagtgttccatcaattgatatatacaggtttaaatgatcatgaatgctgtctcccatccattatgttcttatatcaccatgaaatccctcagttgcatatataaacatgagtgtctcaccttactgacgtaacacgcacacatacacacctggaaatgcaggtataaatcctgtaaatatttttctgcaggcccttttacggttctatttcaaaactacctttaacacctattacttcaaaatacactaacattaacaattctttttgggtatagaatatggttcgatttttttttcttacagttattaatctcctgatagtttaactccaaatttcaaatgtttaaagaaatcttgctttatactgtcatcagtttttccttttgtatggaaatatataggttttatttctaagagcagcaataacatagtagttggaaacattgcataatgtatattattaagcctgcatttaaatcacttttcagaggcattgaactctcttctctctgatcatcacctccagtagctatgcaagggcaagtagagaaggttatctgaagagatctatgttgattataactgcatggagggaatgtactctttcaaattcctcccttactttattttccaaagtacactatagtgcagacagacctcacagcatggtatcagttttccctgggtcaaagaatagtcctgtggtatgcaaaatgtaattatgttcagcaggataacagataattgggataggcatagagatatatttttatcacatcctcctgctgtatacagtcttgttatttg

SEQ ID NO: 35879 - DNA, 776 bp, Bovine  19866881255105
  misc_feature (1)..(1): n is a, c, g, or t
natgtaagagcttatttaaaatttaatctggaggataatatttaaactgatacttaaaggattactaacttgcatgaatattgatttttgtattttcactatgtaagtgggcactttagtgaatcttatttgttggtgtaatagcttttcaattgatttctctaaggtttaaaggtagactattatgtcaactactgataatggaaattttcatctcttttgatacaaattattgaaatttccaggaaataattaaatcatatcagtaatagtgggcatcaaccttttacttttgcctataactagagaaagtcaagtcatatctcatttgtgtgatgtatcttccaatactacttttaatgaaaagaatatattctgactccacattatttataagttcattaaaggtagcatcttatccaagatacatatgaaagagaatttggattcaggattcttaaaatgcaggcaataaccatgtacttattatgtgaagaaaagctgttacttttcttgttttaatattcctaccaataagttaaacatgctattcaaaatatattaaacatctctgaaacaaacatttttttcccctattgtatataaactgtacaaatgttctcacaaccaaatgaatgtaagatgatcatgataaatttgtaccctgtcctatattcatacaagactcatctttaaatatttgaaatagtcatattttgtattatatttttaattttacaaaaaaattttatcgattggggttactatttaaaatt

SEQ ID NO: 35880 - DNA, 1349 bp, Bovine  19866880348408
  misc_feature (1)..(1): n is a, c, g, or t
ntaaatattaataattcccccaagcttgaatttcccttcattagaataattatcaggatgccaagtcggtttctttttacagcatttattaaaatttcacaatatagcctagcactggttcagtttaatgcatcaataaatatagaaacatctgttaaaacatttgaaatcctatggagtgcaaacaaaattgaaagaccctctagaattatgatattacatcacagctagaagattcctctatgaaagatcatctggtgtcaaccccccgcccatttttatgagtgatacaatttctttgctttttatgcttgtctctatttttccatcgtagactgacttggtcatttctttggagtctcttttggttgattcaaatcagtgtctgcatctccagagtattcatagcaacacattttcctcatcaagttattcttggagtaattggtggtaaatatggtcacttaccttttgttgtatcattgaaagctttagtgtcctttgttttatgttgtcagattctccctgctaactgattccccaaactcaggtaattctatcaagccactgatatttaatgctgccctaggagcttaagtggttcttcatatctctcaaattctccatacaggcaatggtacacattctcactcaaaagtataagtgcataacctcttggtgacacggttgggcttctctaaagtgtgactagtgctgagtccaactcccaaaacaccacgaaggacagtgtgcttgtgtcttggtttgggagacttaataatggccttccaacctgcacaccgtgtcactctctcagaaacacctgcagtgattattacctaactgtggacttcattcagcagctgctttgtatttctaccagcattcacaatgatggagtttccgcttttcaactccacatatctttcaaaggctctctacattaactggctgtggcaattgaaatattaattgcaagcacctagatcagttctccagagaaggcaatggcaacctactccagtgttcttgcctggagaatcccatggacaggggagcctggtgggctgctgtctatggggtcagacagagtcagacacgactgaagtgacttagcagcagcagcagcagatgttcagagacaactccagaaaccctccccatctccattctgcaatttcctatcaacgctaatgacttgaagacaggacaaaaagaagccaagggtgcctgagacagagggaagtagtcaagagtgagcagtggtccaggcagcagaatttgtcctgagactcttggtcaaaggaggcaggggctgtccatctgtggttcccaaatggtggtccctg

SEQ ID NO: 35881 - DNA, 890 bp, Bovine  19866880406792
  misc_feature (1)..(1): n is a, c, g, or t
ngaacctcgaaaaggtgatggtggcagcccgtctttttaccaaaaggagtttgattcaaatgagtccagtttggattaggtaaagaatgagattgaggagatgtgttctagaaatcagccaatttcgcagcctggggcatggtatttgtcatcagctgagtcatactgccctgggattagccagctctactttctgtttcaacaataaaaagtcttgcaaaactgctggcatgtgagacagagggatccagaaagttttggcatcttttccagcagcataacgggttttagggaagagacttgtgagagcatggtccatgcactccaccaccagggacagatccacgttcacaaaggatgcagtgcctttcaattgttctaggcctgtaaaaaaagagacagaagcacatttaccccgtggaagaaggggaataggggaatgtgaagctaggttgcaaaggggagggtgcagtgagggaatttattttgattttgccattataactcggtccgcttgtggtgggtttttatctattcctcagaaaaggatgcagcagtgatttctttagattgttggctctcagacttgagtgagcagcagaatctcctagagagcttgttcaaagccagaacccaagaggttagtagttcgtatacccatggtggtagtaatataaacacagcacttcttaaaacaaacttgatataggaaatgtgtgtacacatgcttgtgcatatatgtgtgcactaatatagcatgtgcctctataattcagtgaataaagagagactcatccactaaagccctgactcacaaagctaaaggtgtcctggttctcagcaaatgaattgtgtgagtaatgagctaagatacctttaaagaggcaggg

SEQ ID NO: 35882 - DNA, 1837 bp, Bovine  19866880504060
  misc_feature (1)..(1): n is a, c, g, or t
nactttatctttggttgtgacaggtctttgttgcttcgctctagctttctctagttgcagagagtggggctactctccatctgggcttctcattgcagtggtttctcctgtttcagagcacaggccccaggtgcatggcttcagtagttgctgcttgtggactctagagcactggctcggtagttgtgacgcatgggcttagttgctccaaggcatgtggaaacttcccagacagaggttgaacccctgtcccctgcactgacaggcagattcttatccagtgtatcaccaggcaagtccaaggaaggagaatcttgatggtgtttagtgattgtaagtaaatggagggtttaaagaactgggcttccctggtggctcagatggtaaagaatccatctgcaatgcaggagacccaggtttgatccctgggttgaaaagatcctctggaggaagaaatggcagcccactccagtattcttgccttgggaaattccagagatagaggagcctggtgggagagtgggacatgactgagcagctaacacacaaagaactgtgggtctcaactgagatgacaaataggtatggaaggaggaaggaggtgagaaaacaagatgcatgggtattcccaaagagccaatggagtagagcggttccaggtgaaaataagacctaaggtgtattcgtgggtagataacttaggtgaattagacctctttggcattagaaagttcaagaatgggttaagtacaattttctgagcaataaattgaataagaaatagtaagtaaatgtggttttaagggaagtatgggagtttttgaatgtttcatatcagcactatttgatgtagctgcaagtaagagctagaagcaataaattagataatacaaccaccaaaatttactcacaaggaaatgaaggtagatataaattgagggtcaacactgaggttccacagttatttgttactgcaactgggggtgcagagtactttttgctttctctcaaagagagaaaaaacctctctgaaaaaacctcagtgaatctctactgaacaagagacacagctatattgaaattgctagaagaggtaaatcgaaaagtaatagccagtttttaagatatcagttttggaaagaatttcacagccagtggggactttcattcttactaaagaatgactcatgaagtgacaatttagggagaatttctcattgttttggaaaggatggtctgtaaatccctgtttttctcctcaggttacaagatgagaagaaaggtggtagcagtcaagttggcttctttcgattggtaataaaactatgctgattaatggcataggttttgcaactgtgagttgttcagatcatggagaaaatgttaattttttagtcatattggcaggtgcttaactatagtgatcacttgtttcagtcataaactttgtctacgtgacaacatgtggattagtaattagaaactattgctgattaaacacacattctatctggtagatcagaaaagtgttctagaagataatctctaagtccctaatgatcattttagtgaggaaaattgtcacagtaatcatgttatgcatattttttcttatgatgcctttagaagttccatagtgtaggtattttcttcaaatttgcaaattggagacatttcggggcacaagcagatgctcttcatgatcaatatcagttctgggagccaatttctactattgctgaataagccatatggagcatctacacggcaatagcatcagtgtcaggatttttttccctctaagttggggataaaagctaagaactaaagtcagctc

SEQ ID NO: 35883 - DNA, 1735 bp, Bovine  19866880553928
  misc_feature (1)..(1): n is a, c, g, or t
ncaaaacaaatcccagcggctgtagcagaacaaattcctggagtatggctggtgtcacttttgtaagagttgtcagagggtcaaggctgttcatggagtttgcatgttgaccaacttcttcctgcataataatatagtcctctctctaaggtcactctagcacagtgtgtttctctgaataactatgagttgaatttatggcttcctagtaaaaaaaagtacactttgaaatttctacctcctccctttgtcaacagctttcctagttccactgtataggttccccttactataccaacaatggttctgacaaaggaggagcgtaattccaaatgttgttcataaaagcatagctaggcttggtcaaaaccaggaactctgttttttatctggcatttcctgactgtcccaacagtaagatgaagctggggtaatcatttgtttctctacactgtaagatccttaggtataataataataatataataataataataatgagtcatgggtacagttgatagattctttgaaaaaagattcttatttgcagaacacatcatttcagctgaaacaagaggtcttagtttgaaaggtggggtgaagtgtattttattggtgagtattatccttcaagagcaagagaagatgggtgagaatggagggaaaggaacagaagaactggggattcccagcaacagagagacttgtgagaaatagcgtgggggtttagtaagaaaaatgtgactctcacagagggtaggaagtggttactccttctggtgtgaccgacacacgtagagcattacactgtttttattccctggcttaagaatgatcctcttactaagtttactggtttcttcctatccaagacaacttccttttcccagaatcttaactgagatgataaagaatcaaatgaaatcaagagcagatgcttcataaatcctattgtgtaataggcaagtaccatccagtaggaaagaactcactaggaaccaggaaatggagaagagttaaagacaaccttcagcagttagagataactggactcgaaccctgttttaaggtcttctggaatgtttgttctgtgccagcctgtgttaggctcatgaggtgcaaggatgactgagtagggcctttcctattgaggaatcactcatcattcatttgttaattgtggtttaaggaagctcatagagcgtcttcttctccttgaatgccccttgctggctcccaacatgtgaccctcatctgtgactatttttcattccttgagactgttttagattgtcagagaaagggtgagttcatcccttgctggtggacatgtgcgccactacagccttttttgaaagctgtctggaaacatttattaaagtaaaaaatacgaattcctttttgagccagcagtcccactcctgggaatccattctacgaaaacaaagccagtatgaacttatgaacacgatgtggcaacaagatccaggaacaaagtggtggctactaagagtgggatggctaagtaaattgtggtagatatgtacatggaatgttattttgaagccatgaaatataacaaattatggctctgccatttggcatggaaggttttccatgacctcctttttgtaaggcagacaggaatctctatatgcatgtgcataaagatatttaagtgaacagggagaaaatatggagggatatgccctgagttgttaatattggtcacttg

SEQ ID NO: 35884 - DNA, 1097 bp, Bovine  19866880565229
  misc_feature (1)..(1): n is a, c, g, or t
ncatacctcttcttgttggtcagatgcaatgtgctctacccagataactattagcaaagaacaatgcttgacttctgtacccaacttcatttgtcacagagggaatctcaccttaagtccatcaattcaaaataggagtctctcatcttgtatataaactagaactaattttcatattttggtttttaacttctattgttgaaaatttcaaacatatacatgaggagaaatacaataaagaccccaatacctcaataaaccctcatcagcagcttcagtgataatcaactcacagtcaatgtgttttcatccctatcttcctctccctgcttaccttaaattatttggaaactaatcctcaacataatattatttaatctataaatatttcaagctcttggaaaaaagacctaaccacaatgctattgtcacacctaaaacaggaacaataattcacattcacccaatgagcccattttgatcctgctgcagaaatggatctcgttaaacatctccctgtatacagctcaaaagccctttataaactgtacacgtgatgactgactattacaatgctacttgaagggcgaagaaaaccagctcgttccctgaatgctgcttcatactgaactcagtttttggggaggggttgcatattttaccccttataaggtaaagaaaatggtcattggcacccacactacgggaacaaccctgacagccactttttgtacactgcccagggttacaaatgcatgtaattgcctgctggacttcagctgtacatgtgaacaactggttttccacacagcaaccattcattttacaatctcacatctcccctaatgaatttcctatgaatactggtattaaagaacctgaaagaggaaagacctctttttaaagttaaatgccatatttttcaaaaggttgctgcagaattttttccttacccatcagataaaaaggacatttatgcaaagaaatgtctttctgtgagcccaatattgaattttccattgttggtgctcagtgtctcttgggaggctcttaatgaatcagtcttaaaggttttcttttgtttcccctcagaccct

SEQ ID NO: 35885 - DNA, 2677 bp, Bovine  19866880594166
  misc_feature (1)..(1): n is a, c, g, or t
ntgtatgggatgcctcactgctgtttccatcttatccaaataaaatgactcatatgcccagggctctgtaggacacagtgtcccttaaaccaatgatttggaataatctgtgttgtcccttgggccacacatgtggaggacaatgggaaagtgagaggacttgggtcttggctaagtgtccctagtcctggtctagagaccagtgtcctggccacagtgtattcatacagttgtgtctggttagactcggatttcagctgtagaatggtcaacagtgaggaccggctgttggcagtggctagacagcctactggcatcacccaggtccccggtgatgctctactggcattactatatctgtgcagaagtcagccacactttgggaaggcacagctcctgagcccaaggggtgcagtccatttcttgttgaacttttcactaaagcatcacatacatacaggtaagagcacactgctcaaataagacaacattaccatcaccaaaagtgactcttttagtcccttccggggactatcccccagtaggaacctctcttctgagtcttggcggtgagattagaacagtttggcctgtttttgtacagcatgcaaacacgatcgtgccctgtgcactgtggttgtctggcttctcttgtccgtggtgtgcacgtgaaattcacctgcgttgcggtggctgtggtttgctcgttctcaccgcgggctagtcacccactggcgagtacagcacaatttgctttaccatcttgctattaatggagtagtcagtttctgtcttttattgttgatggctgggtactgtccattttactctttgggtggtttccagtttggggatattataaaagtgctgctgtgcacattcttgcacatgtctttcaagtgaacatctgtactggatggatattctgcttggggatattcttaggggtgaccttgctgccgtagtgggtgtgtgtgtgtgcttagtcgctcagttgtgtccgactcatgcacccccatgaactgtaacctgccaggctcctctgtccatggaattctccaggcaagaatactggctgatggtgctgctaagtcgcttcagtcatgtccgactctgtgccacccccatagacggcagcccaccaggctcccctgtccctgtgattctccaggcaagaacactggagtgggttgccatttccttcttcagtgcatgaaagtgaaaagtgaagttgcttagttgtgtccaactctttgcaaccccatgaactgtagcccaccaggctcctctgtccatgtgattttccaggcaagagtactggagtgggttgccatttccttctccaggatatcttcccgacccagggattgaacccaggttcctccatggcaggagattctttaccatccgagccaccaggtttgctgctttaattgattttaaaaagtagtcttgagacattcctggtggtccagcagttaagactctgcactccccatgcagggggcccgggttccttccctggtcaggaaactaggccccgcacattactactaaagataccccggctgcaacaaaggtcccgcttgctgcagccaagtaaataaatattaaaaaaaaaaaaaaaaagcctactccctggctctcttacccctggttctcccctttccctaacctctttcccaaacccttatgtaaaagtcggtctcccttaaatttgaccgtaaagtagctcatgcgaccatttccatctgagatgtggccattgcacttggacagttatgagacacagctgagccttcaggcatgccttgcctgttggccagtgaggcaccaggacctccagacagcaaactctcgtcttgctgatgtgtttcttcaggcttcactagaagtcgtgaatagattttcctagtgacccactttaatgtgatatcagaatatcttcacaacaaatctcaagtctttttcgcttctagttttcctcctatcatcattcatttgggacagcttttctgtcacagaggagttgggatttaatcacaaaatgcttttctgcctcccattttcactgtggggggaagaaagagagattactgatagcctagataggcgaggtaagagggggactctttacagactgcacagactagcttgtctgactgtggtcttaactacttgaaagaggactaaagtagaacacacgattaggtcattgtggaaacttgtcatgtgtgtggaaaggggcagcagaggtgcagacacacgagtatctcctcttccaggccagtcagaggtgtgtgtgcgtgtgtgtatgtagggtccttgggcatgagagccaacctctcccaaatctctagttttctcatctgtaaagtgaggcgtcataatagcacttaccataatgttgagattatatctgataatgcattacagttcacagtcacataaaaagtgtttaataaacagtgtgtctactattttcaatggactgttattcattcactttctttctactttaactgattttgggttcatctggtacctttggaaacttccttggcaatttacagaagtacaggtggtcttacttcacttccagctgaaatggaagtgcaattgttattttaaccttctaggagcttcccagatggctccgtggtaaagactctgcctg

SEQ ID NO: 35886 - DNA, 3277 bp, Bovine  19866880633612
  misc_feature (1)..(1): n is a, c, g, or t
ntatgtgattctagatctacaataactttgaaaggtgcacagcagcagataaatcagcatttccagtattttaatatagtttttaaaaaatgtgttctagttaattgtcttttgtttgtttctatatcagaccatgacctcctttcaaaaaaaaaaaaaaaatgccaagaataaaatcatttggggaatattcttttaacttatccttttacaaattttttaaaaatgaaattttcttactcataaaagttttacccttttcactagcaatttttgtttatgaacttttagcatcctcacccatgacattttctttaaaaccctctatgatattgtacagttattaggtgataatcatgtacaatggctatctgttggaatatctttagtaacctgaggctgctttaacagcttacctggacctgtttcgcatgtagtggggaactgttcaaggcatggacttgagtgatttgggtaaatctgagtttcttggacccaccagtaaggccgatgaccaaataatatcctgtatttaaagaaatataaatatgcatatatatttaaacacacagttgttacttaattggagactagctattctctcctataaaaatgactcaagcagactgttgatgaggaaagctcattattgagagactttgaaagaatttaagttctggtctgtctctcattatagaggatgagtcatatggagtttgggatcctagtttccaataaaaacagggacttttttccttgcaagggaagtctttcagtgctttggacacttagactgaaaatatcaaagtggtctttggaattattaatctgttcattatggtgcaattcgtttaactcacttcttggttaatcataccatatatgttataggcttttggaatttacttctaagtcagataaagtatagacttctatgcttttttgtaagttctgtttacgaataggtgtttcaagttaaccagtatgtttgaaagatcatccaagtaaaactatacacatctgaaatgtgatcattaagccaaagctacaaatttaagaagaagctttatgaagaatgaaacaaaacagaaggcttaccatttaaaaataagattgaaccaatccccaatgactgctacccatatcatcttagttccaactgtctgattaagttgaaaccaaagtggaaaataaatagaaaagatattccggggatctccaacattagacataaaatttagaaaattgtagtaagctcggtagtccttctgcaaatgctgaataacgagcactccattcctatgaaggaaatccatcttgaaagagaggcagttctaaacatagagtgagcggagcctgaagtgctctgagttctaccatttttatacgtttctctcttggcgtgtccagccattactgtgacatgtgatactgaccatctgtggagagggcatgtctgtcctctgctgaaaagttcaactactttatgattttaattgatgctaaagaggtgaagtaaatgtggatcggtggcaagtcgaggggaaatttgggtagagacacaatgcatttcttatacagtctgtcttttgtgtgaacagttggatcatgtttgcttgaaatttttgcacggttcatttccttcaagggcagagacattagcaatttctgtgcttcactagaagactatgtaaataattactgcatgtcaaatagcccttaaagcaatgcattttaatttaaaatagactgtggctctttgactattttattgggtctttcaggaaaacagatgagtaaatatctaggcatgaaaagtttatatgatatgacagtattttctgattgcagatgtttaaataaaaatattttactatttccttattagcaaagagaataatatgagagatatggaacagagaagaaaatacatggagtttatgaaatctggaaggaaatgtgttatttttcgactgtgaggccagaaagcagacatggagattactgagtagtaggtctactagatggtagaactcttaggaatgaggcatatttttattggctagcaaaaacaattgagagcatgggagagttgctcgtatgacagagcccaagaaaataaagtcagtcactgtttccattgttttcccatctatatgccatgaagtgatgggactgcatgccatgattttagtttttgaatgttgagttttaagccagctttttcactcccctcttttaccttcatgaagaggctctttagttcctcttcactttctgccataaggatggtgtcatctgcatatctgaaaagtgaaagtgaaagttgctcagtcatgtccgactctttacaaccccatggactatatagtccatggaattctccaggccagaatactggagtgggtagccttcccttctccaggggatcttcccaacccagggattgaacccaggtctcctgcattgcaggcagattctttaccaactgagctatcagggaagccctgcatatctgaggtaattgatatctctcctggtactcttgattccagtttgtgcttcatccagcctaccatttcacatgatgtactccatcccactccagaactcttgcctggaaaatcccacagatggaggagcctgagttggacaaaactgagcgtgtgacagtgacttcactttcacttttcacttttgtgcattggagaaggagatggcaacccactcaagtgttcttgcctggacaatcccagggacgggggagcctggtgggctgccgtctatggagtcgcacagagtcagacacaactgaagtgacttagcagcagcaactctgcataaaagttaaataagcattcaatatgccagcaaatttagaaaactcagccgtggccccaggacttgccccatcgtttaatggcaccttattatggggatccagtgtctacaggtacctccctagactctttgcttctcttggaggaaatgttttgactgaccagtcttttgggggtgttttttaaaaaattctatgcctttcccagataaattaaatttctggttatggaagttaggcattagcattttaaaaatactttccaaatgattgcaatgtgcagttagggttgaaatcattgatataaagcaattcatacatagcttgttctccttttggccttaaacccctccctctgccaaaagtctacctgaaagaagctgcactgacatttaatatgtcaactattgggcttaatggatttcccattacattaga

SEQ ID NO: 35887 - DNA, 853 bp, Bovine  19866880641010
  misc_feature (1)..(1): n is a, c, g, or t
ngtgcaattgccaatgcaggaatagatgggatgctttatttctgggactcctgggaaaatgacacccacacttgtcctcccttgtttttccctccagctgtcttgtcagtgcctgggcctgggtctcagagggcatgaagtctgcaggggacctgcatcagtgagtactcacagcccagccttgctccaaccccaaagggagtcataaatatttaaagcgggcgtactacaaatactcccgtgcaaacttgcactgagtagatatgctgtaatacactattttatttcctcagaaaataatttggaaggtagatataaatcctaatactaggcttgtgtgtcttttatgttctatttccagaaaacttggcaaagcaattgagttggaagcaataaaaccagctcatcaagtcctgagtgcacatgaaaaaaagagaaaatcagtgagtcaaaatatttcttttctgccctgttaaagcaagatttctgtctttggctcaagagctaggtaatcgaaaagtgatactaagttttaggaattttatcataaaaataaacacaaatccaaagatttatgtatgaggatgtttgttaaagccttgtttatagtcgtgaaaaaatggaaacattttcatcttccaaaaataaattaggataaattcaagcaatggaatgtacccattaaaaatcttttggaagaatttaatggtatggggatatagtgctaaattaaaaaagaaagtgagcaaatctaacaatgtaacttcaattttgtaaaataaatgtgtgtatatatgcataggaaaaaaactagatgcaccttcccagaatgattatctctagatagtggaat

SEQ ID NO: 35888 - DNA, 2583 bp, Bovine  19866880679355
  misc_feature (1)..(1): n is a, c, g, or t
nctgatgcactccttttcctatttggaaccgtctgttgttccatgtccagttctaacagttgcttcttgacctgtatacagatttctcaggaggcaggtcaggtggtctggtattcccattgctatcagaattttccacagtttcttgtgatccacacagtcaaaggctttggcatagtcaataaagcagaaatagatgtttttctggaactctctagctttttccatgatccagcggatattggcaatttgatctctggttcctctgccttttctaaaaccagcttgaacatctggaagttcacagttcacctattgctgaagcctgtcttggagaattttgagcattactttactagtgtttaagatgagtagaattatgcggtagtttgagcattctttggccttgcctttctttggaattggaatgaaaactgaccttttccagtcctgcgttttccaaatttgctggcatattgagtgcaacactttcgcaagcatcatcttttaggatttgaaatagctcaactggaattccatcacctccactagctttgtttgtagtgatgcttgctactgctaagtcacttcagtcgtgtccgactctgtgcgatcccagaaacggcagcctaccaggctcctccatctctgggattctccaggcaagaacactggagtgggttgccatttccttctccaatgcatgagagtcaaaagtgaaagttaagtcgctcagtcgtgtctgagtctttatgaccccatggactgcaggcctaccaggctcctccgcccatgggattttccaggcaagagtactggaatggggtgccatcgccttctccagtagtgatgcttaactttccctaaagaacatcaagaaaccttttacctatattttcattttgtgttcaggctttgtcttgagagaatgacattcacattgagagctttctccaggccatgcggtggaaagatttcaggacttgtaggagttcatgaagctgtaatggatttttgtggaaggaggaggaggtgcttacgtgaattcccaagtatatgtggtgacttctgccttactgagtaatacttgctcttaggtaattatatatacaagggtttgtggagttggtgttttatcaaaccatgaatcttatcttttcagcttccttaataaaataccaactttgtagaaactttcaaaataaaagttgacttatagttcagagactactgaaataaccttgatttaaatatgatttcattattaaatagtgccctaaaggcatagacttaaacttctcaaaatgtttagagctcaacttgactgtgaaaaacattggtcctcatttatatgctgtaacaaggttagtgctacaggcttcctttggctgacagcagtgcctgagaactggcttgcattagtattcgtctcctgtttccgtggggaaaagaaaactagtcactctcagaagagttcaggtaatttgatatgaaatattgatccatgtttcaaaatctgtacctgcacgttcactttgcattagttgaagcatcatctgacacttaaaattctttactgaattcaaaaagggtttctttttcttaaggttttttttttttttttttaaagtaaaatctgagagctaatggctttcacatacaatggttatcataataaaacattgttctcatcaacaataatgaaacaaaccagattctttgctttaaaaaacagcagctttctgggcggagtaataagatgttctagttctgcagccaatgttttgtctcttcagggaagacttgatcttggccatgagaggtggggttgggggtacttattgcaaggattgggtgtgaagcagagctgaccagcccttgctctatctagagctccatgtgtggctctgagaaactggctcaaggagcatctggatactggttcagctacagtttgctgtaaggtgggacacatggcctagggttttgtttttgccctcttctccatcatgaatgcacgtgggaatagccctcctgctagagaccattgctgtcattattttaggattttttgcacaacagtctgtgataccagtcaccttggaatgatttttccaaagcacagggaagatggccattttgtcctcagggaatttaggcttctataaagcagtgaacagtggaaagaataaagtttttgttttcaggcaaaattaatctgtcgtgatagagatagttgtatgggagtgggcaggagagagcctgctggaatgctaaaagtattctagatcttgatctgggtggtggtgacatatatgtagacagttgatgtgggtgtatacatatggagacatagcgtatttctatgcacttagatttgtgcactgtaactgtttgtaacttatacttcagtgagaaaaattaatgatggtgtttggtcctcctgtagctccatataaagcagcttctgctggtgctgactgcagatgtgggcacaagacatttgaggatcaaaaactgttgtttaaagggctcttccaagagcttggcctattactgttgggagctactgatctctcttca

SEQ ID NO: 35889 - DNA, 2488 bp, Bovine  19866880746212
  misc_feature (1)..(1): n is a, c, g, or t
nttccctgggtgattcgatctgctgcaggattagaactactgcactgaggtaagctgctcaaacctacaaagcctacagcaaataatgtgccaagtgaggaattctgcaaaaaagcagtttgtctccagctgcttcatctgctctgcatgttcccacctttttgtgaagaatgatgttcaggttctaaatacctcacatgacttgacaagcaggggagtagaaagtcacacttggatggtgattttactgtttattttagtaaagatactttccagaatggcaaccatatagcacaggtatcttgaacatgaaagagacacccaataggaccagtgataataggcttattctgcccattacaaagacagttttatctatcctgagcacttgcttataccaatgttactctcccatttcttcctcagtggtagaaggccaattttaaattgagcacattgtctcttcaatataaacaaagagatacttctcagccttcttgcagctaagtatctagctgtgtgtctcagttctgatctatgaagtagaaatggtatgtgagatgttcataaaggctacataatgagagacaactcagctggcaaacaattttttacctattcacctctccttctttggggaaattgtttcactgaagtgatggctggagttccagcagccattttgtaacaggaagtaatcttcaagatagaagctgtgtattagcatcctggagcaaaaagatagaatatccctgtatcctaaacgatggggccatcatttcagatgccaactgcctccctcagacttattttacatgacaaataaactttttttcttatgtaagccactattatgattattattagctatatgctccaaagctaagcttaactaatatcataaaaaggaacaccatgggacatataaagttaaggagagattccaatggtgtatagaacccatcctgtgaattcttaatatactgattattgctgaagcaataaactaaaacactttacctaatattggtgtattgaagaataactagtataaattaacagtgctaaacttgataaaagagtagaattgaaagtggagagcaggagatgagctagagtgccaggtcacagaacgagccattggcatatgctatcttgctgaccatggagtaggagataaagaggaagtgaggatgacccccaagatctccagcttgattgaccgctgcagatagtaatgcccgtaaataagatggggaataccacaggaggagtaaagcggaaaggaagagcatgagcttggtgctgaccttgagaagcttttgaaatgcttatggatacaaatgcaaaatctagggagaaagttagaaaacaatctaggaattcaggttcacttgttattctgcttttgagaaacatttgatgactccacaccaattactcaatgaagcccaagctccctactttcaaggccatttatgacctggcttcaacctagcttttcacatctctatctctttgccccacaaggccccaccaaaaacaaatgcaagccttatgtttaagtcacatataacttcatggttttgctcaaacatgcttcatagaagttcatgcatattcctttcacaagaaacatacccaccttgctacaaatatctctttacctgtctgcctcccacatgggacagaactattaaaggacctcaccaactatctcggatagagcacattgagagataagtactccaatacctgcttcattaacagaagctcacgcagcaagcatccgtgtttttgcttactctgctttccttatctgggacacagaaaggaatcaatgatgacccagagtaatcagggctgggtgaataatacagtggtggcttttatctgctgagatcagatcagaaaaggatagaaaaaaaaagaaaatgcccaacagctagcaggagtaggggaattttatataaagaggaaacaaatacactcgagtctctgataacttttacttcatgtggcaaaagccatccagagcacgggatggatagttcatgtttagtatagggagattgaaggatgacaagggagaaagcaccagagtgttcaagaggaggagtgggttggatcctgaaaagcgtggtaggaaacctccacaggccaccagagtacaatagccacttcactcataaaaccagtcccgttagcagaagagggatacactctcccctcagtggtcttcagctgcgcttgtgaacctgacaaagctcattgttagaaaaggtctggaacattctcactgaaaggttttccacctgccactagggcatcttccaataataagaacctagggtttgacttctgagttgggaagattccctagaggaggcagtggcaacccacttcagtattcttgcctaggaaatcacaggacagagaagcctggtgggctacagtcccaggtgtcccaaagagacagacctagccg

SEQ ID NO: 35890 - DNA, 2605 bp, Bovine  19866880752794
  misc_feature (1)..(1): n is a, c, g, or t
nattcattttttaggaagcttcttttcttgacataattgccaacggcttccagtgtcacatactttcaaatttaacctagaagatagtagaagtctccttcccagaaacctcagggagaaacaaaacaactcgaatcacttcttatatctgctctatactgtttatgtaactagtaaccctatctccagacttctctttataccgttctgtcaatcagcaatgccctttcctctagcctacagatacccacagcctaccttagccacctcctccatgaagcttttcatggtagcacctgacatatgttcttttatcctttaaatttccatactgtttatttaaacctgctttatggcaacccactccagtgttcttgcctggggaatcccagggacgggggagcctggtgggctgcagtctatggggtcacacagagtcggacacgactgaagtgatttagcagcagcttagcagctatagcacttatcacattcttccttatattaggttggttacatgcgttgttcttctataaaacttgaagtgccttaagggagaagtctgtaattgtccagtctttgtgtcccctcacagcacctaactttgatctgtacgttgtaggcgcacaatcatcttttgttgaatgaatcagtgaacacatcaagctaaattatatttcaataatatatttgttaattaaatccatccctaaaggcagtacatagtctggagacatttccactagggtccctgtttcctcctactagtctatttgtgtccaggtagaattatgctaaagcaaacatcagggagagagagaaagagagatatcaaaactcatcctgcagtcctgagggaggtaatagtgatgggccattgccattagagcaatagcagaaccatgtgggttggggatggagttgagtcttggacgctttttttcttggtggactagtgaaacgacttcgccccctctcctcctccctctgtgtgtgtactctgaatcagggtttagctcggcaccatggcaaccagactgaacgttgtgtcaaacccactcaggaagtgcctgcacctgacaggtgatgtagactcggaaccaattgagtcctgttccacaagccacagactaatccatctttctttttacttacagagcttccatccgacaacgctccaagtctcagctttcttacctgggtcatgaatcgtcactagcacttgtagatcataagtctactcatgaacaagacagaaaggtcagacgccagtggctcatgcggggatggaagaagtctctcctggagactatcgtatgccctttaagcttagaatctgagttttcaaggcctttatctagtaatgtttcattgctgctgccgctaagtcgcttcagtcgtgtccaactctgtgcgaccccatagacagcagcccaccagactcctccgtccatgggattttccaggcaagagtactggactggggtgccattgccttctcctatgtttcactaagtcaaactaaatgagaggctccattaagacgtgaacgaaactctaaattttatatcatgttttacataatattttaagagaagcataaataataaaatattttaagaatacatggtaactaagatgaagtattaaaagttcactgattattcttatgtgagccattctaataaacacaattacatgtacttagcagactatttgattatgtaggaatccctttcaagctcttaagactatctgaaaacctgtctttgtaaaactttaaatctctgtcttaaataattataattataaagtgtttaatacaagttactgcaaaatttaaattaatggggactgattaggttttacagacatttgtttacttaatacaattttataataattgttttagggtacatttgaaatgaacactattaattttaacactattcaaagcaacataaaaatgaaataggagaagaatcaacacatatagcaatactcaactttgttcatcaggatgcccactgctgcagtgggcacagtctaactttcacataaggtgaccatccctcctactcagagcctttcttaatcactgaactttattcttcagccctgatcctctcattttcaatcccccattactcttcatttcagtcttttcatggcaattttcttattgaggcttatttcagatcatgttgtcttatcctgttactaaattacaagcttcttaaagttagtaactgttatttgtgtttgtatcaacttgggcatcttgctttgcctggaaactcctttatctggttaccattagcctaccaggctcctcagtccatgggattttccaggcaagagtactggagtggggtgccatttccttctccaggggatcttcccgatccagggactgaacccagatctcccacattgtaggcagatgctttactgtctgagccaccagggaagttctggttaccatgagacctagcaaacatttctgtttatttgacacatgtaaacctagaaccaaccaaatcctgttccaatctgctcataatctacagactctttcatctttctgtttagttagagagctgca

SEQ ID NO: 35891 - DNA, 2567 bp, Bovine  19866880777933
  misc_feature (1)..(1): n is a, c, g, or t
nctctctatgaattaatatggtggtgatttcagtgcttcaggagtcaggctatttcatgtaaagatggtgttgatctggagaaggaaatggcgacccactccagtattcttgcctggagaattccatggacagaggagcctggcaggctagagtccatggggtcacaaagagtcagacacgactgagcgactaacacacaatcatacagtataagaccatttgagaggagccttttttcactcggcataatacctttgatctccatgttagttatttcatatatcaatcctttattctgttttctctgagtagaattccaggctaaggatgtaccatgatgtgtttaactgtctaccccttgtaagatatttgatattcccccataggttttgggctgctacaaaaaaaaaaaaactgctatgaacaaaaaaataaataaataaagatggtgttgatatttgtgggttgggccaaagacatgcaaaggaattaacaattgatgagccgtttttagtgctcagagcaggagggaaggctgtaggaaacaaggaataagcttcgttaatgatttggtggtgaacaggcaaacaggacaacagactggaggacatctctcctctggctctccaccaggactactggacaccacttggcacccgcggctactgcccctgcccccacgagacaccagctcagatgcctgcaggaaagaaaacggaacactgaggtatccttcccaaatggacagatgtttctttggcttttaccacctattcccctaatgtccgaattaaacctggaacaagtaagcaactacagctgaagtattaggacggagaacagcagcgcctttttcaaaagtttgcattcctttttctttttccccttctctatttttgaaatttgccttatttctcaacacaccttactgaatacgtcatagccatcagtttaatctcctcgacctcacagacagatagtagatctggttcaacagctatttactgagattctgttttcaggaactgacctttggtgtttatcataagactgagaaaggacataagtaaccatgtgacaagtagagcaaacaagctctgcctagtccactatgggggcagggtgctatggggcaggggaggcaagggcttaggacagacagcccagagggaagagaggaagggaatgggaaggaagaggggtgaagctcgagcgaagacttatgtaatcagtaggaagtagtcaggtcagtaaggggtgataccatttataccaaccgctggcaaacaaacagagttgctagcagggggcaaaaagcagatcattcccattaggaaatgaaatgttctactttctagtacagtaagttaaaagctttttctgttgaaaaaaatataaaaacaggatttctggaaactttatacttatatacattttagtagaactttaaacccttttcaaactaaaactattcttgcattttatcatttctctcccatctttcctgccataaaagatccacagtaaagacatagtattatatcagtgaatagtgaattgcttttaagaatttaactggaacattgaaatggagtatttttactgagagaggtcatttaacagtgatgaatgtgggcaaagactcactggacctggggctgaatgccagctctgctacttaatgttacttaacctctttgagactatttcttttttctcttttaaataggggtaataacacacacatcagaaggtcagggggacgatcaattaagtagcgcaatgcaggacgtagcacggaagaacacatggcaggagtctgagaaagcatgtggctgccagggctgaatacccttctttctttcaaagtcagctgttgtctctcccctagatatcacaggcctaaaagtatatttttaagttatttgtattatggactaagtataactttttaaaaaaataaagagcagtttttgtcctcttaccaaaaaaaaaaagtattcactaccttcattccaatgtggatagcccttgttttcttttttctcctgaactgtggtgttggagtggagaagggaatggcaacccactccagtgttcttgcctggagaatcccagggacgggggagcctggtgggctgccgtctatggggtcgcacagagtcggacacgactgaatcgacttagcagcagcagcagtggtgttggagaagactcttgagagtcccttggactgcaaggagatcaaaccagtccatcctaaaggaaatcaatcctgaatatttgttggaaagactgatgctgaagctgaagctccaatactttggccacctgatacaaagagccaactcattagaaaagaccctgatgctgggaaagattgaaggcaggaggagaaggggacaacagaggacgagatgattggatgccatcaccgactcgatggacatgggtttgagcaagctccaggaggtggtgatggacagaggatcctggtgtgctgcagtccatgggatcgtaaagagtcggacatgactgagcaactaacaacgataactaagttata

SEQ ID NO: 35892 - DNA, 745 bp, Bovine  19866880904688
  misc_feature (1)..(1): n is a, c, g, or t
natgacattacttacatgtggcactctgaaataaaaacgatacaaatgaacttatttgcaaaacagaaacagactcctaggcagagaaaacaactttatgattcaccagagggggagaggaagaggaataaattaggagtatgaaattaacagatacacactaccataaataaaatcaacaacaaggatttactatagagcacagggaactatatttaatatcttgtaataacctataatgaaaagaatatagatataaacttataaatacatgtaaccaaatcacttttctgtacacctgaaactaacacaatactgtaaataaactacacttcaatctaaaaaaaagtcagctatatgccatcacatgcactctttgaacaaatcatttgcccaagacttttgccctctgtctaaccatactttactcaaagcatattttcccatagataatattcttagatgtgtcttgtgacaaccgcttacactgtctaaagttccaaagcttatctaggttgggcaaatacagcaattgagaacattatttgcaatatgttgaaagattgtcaaagcattaccccaaagacattattattctatcatcaaaatgctcacaattagaggaggtttttccattcatccatcctaatgtttctcagttcttcccatctatgaagttctttgggacatttaaattcattctctgaacactcaatagcctatttcttttaagcttttctctttt

SEQ ID NO: 35893 - DNA, 936 bp, Bovine  19866880944601
  misc_feature (1)..(1): n is a, c, g, or t
naaaagcacacaggcattccatcaagggcaagttttcattgggtttaatttcaagactctcaagctctcaagagtcctggttccttggtttttgacacgtagaaaataataaacagaaagtgacctatgggttatatatgttgagttagaagcagtagtatgcagaaaacttataaaaatatttaagtccaagcaatgttcatcattttaataaaaaatattagcaataatgagttctaggaatccttgatggttctgaatgatttgtccctgataattggactaaattttggatattgaaaagttaaggaatagagagaaacaagaatttcaaagagaaaataagcagggggtatccatatggaagaagaatcaacaaggatgtggtaatatttaggtaaggtgtgggcactcagtacgttttgatggatcaatgaaatgatgcagttataagaatcaaagaagagttgagaattttttttttttgagaacaaacaaataattttccaggaactggaggagaaaatgagctacagagaaaaggaaaggcttatctagattcctactttgaaaaattgtctatggatagataaatgctaatttttaaagatgacaacatgttttttaccattgttgttttggattggataatgaataccttaaggcatacaggtcacagtctcattaggataaactttaaagatgcccaaattcctttggttatttgttttgtatattacccaatattactctgaaaagtggaatatgagatggaacttggaaattctttattataaagaactttaatgtaatggtgtatcttatagtagcttttatgcaattaactggagaatcttatctcagactgcctaataatttatgattaaagtgatgctcaaaattattttaatgatagttaaagtatatcagggaaag

SEQ ID NO: 35894 - DNA, 1634 bp, Bovine  19866881012172
  misc_feature (1)..(1): n is a, c, g, or t
ntgggttgtgaagatcttttttgtacagttcttctgtgtattcttgcctctcttcttaatatctcctgcttctgttaggtccataccatttctgtcctttattgagtccatctttgcatgaaatgttcccttggtatctctaattttcttgaagagatctctagtcttttccattttgttattttcctctataaaatctggtccctttcaagtagaaaaaggaaaaaaacctaagtaacattttaatagtaagttgacagtgtctctttaacctgaaccctgagccctcaactcctgaagttacagttaaagcatcatgtggatggagtgtgctgcaacagtcaatgctactcttgacagtgttgagaaaaaaaaaaaaaaagaaaatccattcatggccatactgagcacctactatgaatgagacagagccaggtgctacccctgagtaagacccagccctcaccctcaaagactgctctttggtgagaaaaccagggagcttaaatacactcagtagtgttcctccaaggcttattattttcagagctctcaagaatagaccccttattaatatgttaatatatatatatttatattatgaattatacatcagaaatctaaagtatatgcttggaaaaggtgttaagttccctctatacactgaaatttagcaggctttaacagtggcatggaattcacagtttaggtggttcagaaaataatgccaaggaaaatggaattcatacaagaagcctgagaaaaatatatgtattttccgaagcaactaaatgtagattttgattcagcgtgcctaaagcaaatcaggctgtacagtacatagatagataaagacaacattttattaggcttataaagattagcaacagtattaggtagatcatggatatcaccacatcttacattacaatgataaaataatgctttggggctcagacctgatagatgttcttccaacaatattttgtacctaaacattctcactatgaaattatagctttacaggcaccccacctcctctccaacagtcatttttttaaggtgatagggagaaaagggagagggaagaggagggagagaaaaagaaggaagtgggatggttacacaagggaatggacattctgcgacagaaattcatcaattatctaaaatatatgaaccagggtcttcaatgaaagttttcagttataagtaaaactaaaggaacagactgattgttttaggagaaagtataaaatgaagatagagaaaagtgaagaattgaaccttatagtacatacaaaccatcagtaccctcccccacctcatgtgttttcacatatttttttgtgatttgattaaaaacatctgctctttctaagaagagtattatgtctatcttacaaatgaggcacagacagacaaaaagtacttaatagtacaggcactcatcacttttatgatacagttcattcctggaaaccacactgaaaaaatcattaagtggactgcgtggaatttattaaaatcatttactagaataggtttgaatttagcaaagaaagctagtgacaaataagtggataaatacaagagaggtattttaccggcccttatttttctatatcacaagg

SEQ ID NO: 35895 - DNA, 971 bp, Bovine  19866881020546
  misc_feature (1)..(1): n is a, c, g, or t
ntatttctaaatctgcattctgattaatgaacacataaagtgtgttgttgtgataattcagtgagctataggttttaagtatacttttgtgcatgtttctgtatgtatgctatacacagaataaaaagtttacattagaaaaataaagcacttttctaacaatgccatataaacatttgttaagcaagtgatgattatgcatttcagtgtcagatttacagcaaatactcattaggctgggcttcccaggtggctcagtggtaaagaatctacctgccaatgcaggagacacagaagatgtgggttcgattcctgcgttgggaagatcccaggaggaggaaatggcaacccactccagtattcttgccgggggaaattccatggacagaggagcctagtgggctacagtctgtgggatcgcagagatcagacacgactgagtgactaagcatgcgcctacacacccattagggtattagctgaactggggttccaccaagatggaattttaagccaaagtcagggtgctacgcttctttttgttgtacacacctagcggagagtccctgtctccctccctccttttctccctctctctactctctctctctctccctctcactctcagtctttccacaaatgtaaacactcctcaggaccaaaaagatgtgtttagtttcacctgcaaagataagtataatctgtgtcaaattccaaaatgtatcaccatacattatttactttagcagttcccattcagagccgtttcctaactcttctagattggctttttaaatagagccataagaagtttctggcagctaagtgcatccaatttagaaacgctttagacaatttgaaaggactggatgtcctcagatttgacctgagtagagaattagatattggctgggaaaatggaaaggagagaaagttctccttttaacacaacactttaatctcatcttcaa

SEQ ID NO: 35896 - DNA, 1570 bp, Bovine  19866881035392
  misc_feature (1)..(1): n is a, c, g, or t
ntaaaaagtaggctagaagataaaaataagcagtgatcttagttgtgcatgcagttattttcagaaaaaggcaatcttttgtcatcctccccaaatctttgaaggatgggtagaaatcaagttaaaaagaaaaggagaacagtcactgagtcagtatgtctggtaaggtcacccaagccctctgccctctatgtttgaaagagggcgttgtcccaaacactagctgcagcgtggcatgtagggcgcacagatgatgcagggggattagttagggtatgtgggctcaggagatgaggggtttaaagtaagcattactctagcattcagaatatttctccttgattttgggagaaagaaaatgaaaagaatgatattctattatattaaaataagtaaacagactacctgcctgcagagaacacatttatgaaagtgaattctgaattaagactaagaataaatcaaagctttattgtcaagtaaatcagcaaacttaacagcataggagcagtgagcacagaactgggcatacaaatggggattgagacatggtcccagccctgcttggaactcactgctgagtggagaagggcgacaaggaaattaacgatcaccaaacaatagaatagaacagtgtttctggagaacacagagcaattgctactgagagtaggagactcaaacatctaattaaatttttgagtgaggtgaagaggacacaattgaaaacaaatgcaatcctacggctagtagagcaaagagggttgagctccatgaataattcgctactaagagatagtcaagctctgtttcttctgtactttgttgatgcacttgaacctattttgtgaagcacctgacttatttctggaagatattacagacttcatataagaaagggtcttcaccctttttaataaagtgctgactttgcaaactatgctcctaacatcagccagtgttctgaagagaagtaatttaagagacttgtacacagagaaaaactccttcactgcttcatgttagcccttgaattgactgactgggatgtgttcacagggtactttgaataacaactgaaagtattcattgctttatcgaggtgtttgccctttagtagcggacaaaagacagaaaacccttacatgtccatggaataagaaccagtaaaatgtggtgggctaaaatcctgattaatggaaatattctagttaacttaatgataaccagaaaattctccttattttgttttgttcatttattattagtcaaatggcataataaaaaagtcactgaaaatattttactaatttttgatggttcatagtgatgcattgcttcaatacactaactatgattgcagagtacaggtgagaagacaggagacttattttggaggctgtttgaatagccctggaggctatttggaaaaataatcctcaatatttccttattttagtatcagatactaccaggcaataggattatgctactagactatttcattttgcaaatacatttttattacacttacatttcaattcagaagataacctaaaaatgttaggta

SEQ ID NO: 35897 - DNA, 925 bp, Bovine  19866881082077
  misc_feature (1)..(1): n is a, c, g, or t
nttgttgagaaggaagtgccgttgcttcttcttgggaatccagtgtggtttccccctcctcctcctctccttctctttggtcttttgccccgccccccactttgcactcacctcctgcctggtgctgttgcagggccacttgccttctgcttccttgagctattctcccttctgtggttaactcatggtggccacattctttagccaggggcagacaggaggtgtaaaagaatcctctattatcactaatttagctgtaattgtcttaaaagttggccttcccaggtggctcagtggtaaagaatccacctgccaaagcagatgtgcagaaggtgtgcattcgatccctggattgggaagatcccctggaaaagaaaatggtaacccactccagtattcttgtctgggaaatagaagaatctggcgagttactgtccatagggtctcaaagagtcagaaaaactgagcaactgagtatgcacacacatcttgaaagttgaaacatagcctgtgactcctgacatttgattataccaccattgattatatgtaaggggtaagtgagtttctctgtaagatggtgatggtggggagggtaggtacttggaacagaacaacaggaggtccagccttgtctcttttggaaagatttgagcagattccaagtgactatcagggaatcaagtctttgaggtttatttgcaggcctccccaaatctaaattcataatgagctctccatgtgattagaaacttagctaaaagcaattaaagctaattattttcattctaaatacaacttgagttgctggctttgtctttagggctgtcaggatatgagcaaactattttagaaaaatcacttcaaatttggccaatttttcttagtttgcccctatacgactcagagcagagcagttgcccac

SEQ ID NO: 35898 - DNA, 689 bp, Bovine  19866881114150
  misc_feature (1)..(1): n is a, c, g, or t
ngggatgaagaggatggaaagaatttttcctctcagctggggaggaggatatgggcacttgcatagagaggtagagaatagacattcagcttcagtgtcttgtcctctcctgccctccctgcttcactctctcttctaaactcagaaatagtggtggatgttttcatacagggagactgagtccctgtggaaagtggatgtggggaattggaggaaagcaagcttgactttcttttttctctagaattccaacccaaattctgtaaactgaacccatattctagatttcagttatgggcgggcttggtgttatttaactcttactaaggaagaaaaacattttatcttttgccttctcatgtagagaaataataaattccccctactctccattcacttatgaattccaggaagttagttttagttataaagagaaatgagttaatcctcatcccctacctccccctgtccccccaaccatcctggcactaaagctttaatgacaggcttcttttgcttgggagggaaactgtaggcaagattccctgcttatgtcataatttttgtcttacttttttctgaaaatcattgtccaagagcttgaaaactacaagcattcatgttaagtcatttcagttgtgtctgacttgttgtgaccctttggaccatagcctaccaggctcctctgt

SEQ ID NO: 35899 - DNA, 1389 bp, Bovine  19866881217769
  misc_feature (1)..(1): n is a, c, g, or t
ngtagggctgcagtccatggggtcgctaagagtcagacacgactgagcgacttcccctttcacttttcactttcatgcactggagaaggaaatggcaacccactcccaggtcttgcctggagaatcccagggacggcagagcctggtggggtcacacagagtcggacatgactgaagcaacttacaccctatctaattatcctcttttcttttttctcttttgcttctttggttgtttaccttatttctcataaaaaatttcagtagcccatttcctccactatgagagatattatctttcataccatatgacttaataaaagaattcaaactcaaatagtgttgcagtgaaaagtaaagaaaaggaaggagttttttttctttttctttcctgaggacaagaagataaagagaacagtgagaagacctgaacaatcctagtcttttttttactttaactgctccgaactctgcatatctataactaagcttgcttttctgcccccttactctgcaagagttacatatcgcacctactatcctttgcttaccttcgcaacagcctcttccccttgtagttcttgtatcaggaggaaggccacagagccagggaactgccaaactcaattactgggttattgacgctagcttatgtttttgaacaagatcctaacacctttgtttctcatcactggctcctgactgcaagccctcatcttatataagcccctagactcctcatggagggggtcacagttcttgaggcatgagcctactgtgttactctctctgctggctgagaattaaaggcagctttctatttcctccaaactccgtctctgtattttcttattcagccccagtcggcagacaaagtgacgattttggccagcaacaacagtactggatctcttatgtccaaatctttttgttgaaaattcttttctcctgggggcaaaacttgccccatcgtactcatcccaagaagtcatcaactatgagactttcttaggcatcaatacattgtcaatgccagcttgaaataaactttaagcaactacacagatgtgattgttgttttctttccctacagctgctctgtgtttgaagtgattttattatcatcgattaaaaccactgcattgtggcctgttttaaacattttaacttaagctgctgttgctaaaatatactcaaatgttttctcttcacaggtatgagaaaaatcttgtgtttgcccagcgctggggaattagaaaagggatagtgatgggattctttactggattcatgtggtgtctcatcttcctgtgttacgcgctggccttctggtatggctccaaacttgtcctggatgacgaagaatatacaccaggagtcttgtccagg

SEQ ID NO: 35900 - DNA, 1375 bp, Bovine  19866881228498
  misc_feature (1)..(1): n is a, c, g, or t
naaggctgtgctctaaacaaaggctcaatttatgacttgctcattcaagatagctaattgtttattgaaaaatggttaaagaggcttaaaatataatattctagaaacaactccaagtagttcaaacacagatttatttacttttaatgttcaaagagtagttaactgggttttatgcgttaggggttttatttttctttttaaggacaggtctattcagaaaatttcaagaaatgctagtttcattgaaatttttcaggtaataaagcaatagttcaaatgtaaaagctataaaaattgccaaaattattgggtaatttttaaggacatctggcataaattatttcaccatgttttttctgattggaagaaaaaaattataaaggtcatcagaatcacagtttgaagatatatactaacttcttaaacccagaaaatgactaggcatctcttttgatcactaagttaaaggttgcaaagaggaatgtatctcatggtgaggtcaaaagaaaataaatattttcttaatttttcagatgaacagaatttttcccattctaaatagtttacttacagtttactattaggcccagataactgttttaatataaacatttcttatttggccattagttcttacaaattctacattttggtgactagggagagaagcccagaaatacaacctgtacacagaaagtagctattaacctcctacagagaaagatttataggtttgagtaagaaggtctgttaaaaatatcttattgtgtatgctgacagatttttttttaagaggactaattgaaatgttaatttgtatcttatttcctcggtctgatgcctaagtctccctttagtaatatattttagattcaagaacaatttccatggatgacaataatttcctaagtaataatgttgagagagagagaacatatattcccaaattagctgtttttgcttccgatgagaagtggtgcacagcttctgaggaagggcggggcagccgttgcaggtttctgaaaaggggagtgacagaattctaacgctcgtgtttatggcagaccagagcgggcaggtcgggcccctgccttgcacccatgctgttcatggtctccttggtgcagcttatgccagacaggtagaatgctggatgaatgggcaacagggaacgagagaaagagagattgaagaaacataagattaaagtagtagaggggataaggattgatgtcttccctgctcagaactgggaggtagtcaactattttgatgccctcttctccacatactcttaccttgtctgccaatgctctgagtttcttttttaggcccataaccttcagtctcagccctctcttgcactagctct

SEQ ID NO: 35901 - DNA, 1071 bp, Bovine  19866881303511
  misc_feature (1)..(1): n is a, c, g, or t
ntcttggtaaaaagaatattaaaggtttttttttttttaaaaaaaaaaacaactatcccaaatagtaagaactatgaggacttggaaaatcccttcccctactttgggcatcattttttatttttaatgtaaagtgaatgagttcaaaaggtcacggaagcctttctggtgctaacatcctgtaattgtataaaataactgcttgtgaatgaaatgacaacaaaaagcaaacattcatgaagtattatctattttggctgtgttttccttcagagaaatagaaaattcaaggggaaaaaataaaccctggtggcaacgaaacccgctgactaatatgaaggattttagattgtctaatgtagcgtatagatcaagagggctgccctctaggatacaaaacttgtagagaatggaatgtttgtcacagtctaaggcaggagggaaaagaaagttccacaagtggtcagatgggggcaggcgtggggaggaaagcctgagctggagagactggcagcccttctaccgtctccaaggaagaaggggccagcacccacacgtgccctcatcactttcacatgtggggctctccagtgtcagctctgcttctgcataaaatcagcttcctccccataagtctttaatttcctccatccaagaagcctcagtgggcaatatacctcatgagtgcctttttatttatttattttcttattatcttttattttttaatttttttaatttaactttacaatattgtattggttttgccatatatcaaaatgaatctgccacaggtatacatgagtgcctttttaatgatgttccattttcctaaacacctgctcatcctttgaggcccacttggaggcttcacactcctcgaggccttcatgaatcgcaccatgcctgtcctttgatttccatgacacaactgtctcctcattctcttcctgcttctcacctgctcctttttacttctctgactccaatttttctcccaccttcgaacttcttagagcacctaatgtctcaaaagctcattcagaaatgtaccatatatgtctcagaaat

SEQ ID NO: 35902 - DNA, 1207 bp, Bovine  19866881330482
  misc_feature (1)..(1): n is a, c, g, or t
nttatttactttatatagaaacagaatttcagggttggaagtgactttatatgttaattaatgagtacaatatgctctctgtgtccatcctagctatgattaaaaatctctgttgacatggagctcactacttaatgtactgacccattctatttggcacatctatgactattagaaaataccttaagggaaaaattaccttgaggattccagtagaatctccttaggtttcacatttgtaaaattggggctagtattttaatgttggctaaatggatgtagccaatgattagactcctgtttcacagcattaccatggaaaagatggagcactggatatttgaataatctgtctaagagagacacggtaatacctctgagtgaaattccatgtcaccttggcattctttgcctctacaaacaacaacaataaaaaagtttaacttgcctatagaaccatcaaccacttgcctaatgatctacataaaatgcaggacttctttcaatttagacattaaaagaatgacaagattacccctgaaaaaaattgtaacaggtatacatatacatgggaatcccatacacatgggaatcatttgtcagctgtggcggtacaggaaaaagtgagaacgcttgaaatgtaaatactatgatcctcatgcattctacagaacatgaatgaccttacagcatatagtttcctgaatgaaatgtgaagacaagaagagaatagaaaggccatgttagatgtagaagctgggtagttagctatgtacactgataagctaggctatcttcataaaacagagttttttggggtaattcccattcatccctcagcagagttaggagttaccatgaacctattcctatagtaataggcctattgagtttctttgagaagaattacaactctatcaagtccaagatggatggcaagaatatgccatgctgtaaaaagtagggattgcaaactccagtgtatttagaggccaggcaggtaaataacaataataataataaatggaataggcctgatgaaagagaaaaaggaatggactggaaattatacaaccatgcaaattctcccttttctttgtgtcttctttttctgttgttttgttttacatttttatgaaaaacaatggatgagtaggcaagcacatatgttggctacatttacaatctttgattacttccttgtttt

SEQ ID NO: 35903 - DNA, 1772 bp, Bovine  19866881348662
  misc_feature (1)..(1): n is a, c, g, or t
ncctgggttctatccctgggttgggaagatcccctggaggagggcatggcaactctccccagtattattgcctggagaatccccatggacagaggagcttggtgggctccagtccatagggtcacagagtcagatgactgagtgactaagcacagcacagcataaagacaaaaagataatgtttactttataattctttatggctgttgaaatgtacttcttgactacaacacaactctaacatcaaattatatgatgtcaagacttttgaggatgaccacgctaatttaaattagaggttcagttccacatagcttcaaaaatcttctcaagctcaaacagggctccttctgtcttttttttttttcctaacttccccacccacccccaacacctgacaaacacttattaaattcctttcggtggtagagatacaaagttgaattcaatataggcctttcctgggggcaattccagggggtccaggctcggaatagcctggactatgtccagcctgtgggcttggaagaattgggttgagactgtctccagctacaaattagctggtgacttgattccccatctattctagtccattctgtttcaaattcatcctcttcttgaattactttcttttcaagtctggctatatcccgcccatggaagccaggccattcccagtctggcaccaattttatattaataatgtgagaggatgagaaagcaagtcacaaagcaccaagtgtttaagtaaatgtctcctttgctttaagcgtaatgaagcagggtacgtgaaatgtttctagaaaacaactagaatgagctgcaaaggacatccaaccagtgacatttccttctcatagcagtgacatttgcaaaaagacatattaattctttctttcacttaatgtttgtggaatacctctggatttaaaggtcatattttgaggtcatctgtgaatacatcaatatttcaacattgctttatttatttaaatgtatttatttatttaaatgtatgttccaacattttttattaataaaaatcttactctatctactgagtgtgttactctataattgacaacaacaattacaactacaacaaaccatttcagtgcttaaacaagtgaaaggtgttttgtgtgtgtttaacaggatggctgggggtaggcagtctaggttgcaatagctactcaatggtgtccaagaatcaggctcagtctgtcttcctgctctgccatccacagtgtatggcttctgtccaggtggccacagcatggtcactgtgcatccaggaaagaagaaagggggaaagcaaatgtgttttcttcaacccaggctttattccagaagggaaagcctccacagagacttgtgcctgtatttcattgaccacagcagtcacatggtctcctctagctgcaagagtctgggaaggtaagtattttactttccaacctctgaaacaagcatgcaaggggagagggtgtaggatttgggtgtcaacttaactccctatgtatataacaacaaatgcaacttagagctgccttcctcctctgcaacctatgaaatggtttcacaataacgaaaattatgaaggcaacgtggcttctaaattatgaaatgctttgtgaatgttattacagggtatatttacataatccattgaattttgaacttctaaggaattttatgaaaatattgttcatctgttatgttgattccatacttgatctatcagaagtatatactctcatacctatgat

SEQ ID NO: 35904 - DNA, 1358 bp, Bovine  19866881384199
  misc_feature (1)..(1): n is a, c, g, or t
naaattgaacaaaagcttaatcatgatgctacagggctgtgacctcacagttgttcatagtagatgtcactgtaaagaaatctttaaaaaacagtacagaaaatggccacattttggagctctccaattacatttatatagaaagagccaaaaaagaaagatgaaatgcgtgctagggactgggataaactttagaaatagcttcatacatggatatccaaaacatgaaggtctatgcagtttggatgggtgggattaagagacaaaatctggcacactgtactagatgacttcaaagtagctcagttacagtaaagacgtgatatcaaagatgcagatggaggctctgaataagtcatttcctgaaagtgaatggaaaaagacattatttctacataaacatattaaataatgttattaatatacatctcatattattctacctctaaaagttgatatattcaggctggctttatcttattattgggaaccaggggacctgccttatatctgagggcaccctaccgtcatgcatgtataggtatctatggaaagaaacagaagctaatttctcaatagtgtgaaagtgaattagtgataagttagaatactgacttactagattcaagaaagagcaaagatgcagggaatagagtattatattttaaaggcaaaaggggacactatttatcacttttgctgtcaaaaaagaattttcccactctaatcttctacttcagcaaaagccaaataaaccaaaagttgcaccaacaccagaacatttgttgttaactaaaaattttgtgtactaacggagacacaaaagttcaatggatcaagaaaataaaataggcattaaactgaattgtgagtttttcctttaatctcacattttcccactccctttgtactctgctgaggtcactcttctgcattttcctgaacaaaaaaagtattctagagggagactgggaagtcaggtaaaaactggttctagaacccaaactccccccacccaccaaaacctattaagttctcactttgcacaatcctataatcaacagtgcaatgaatgccctcaatcagatcaaaagcaaaaccactcattttatgtcaaactgagtttcttccctttgtaactcatgaatagaatccaagttctattagccagatgtgtgaagacttatcaactaatattgagctttggcagctatcatcataataatttttaaagtcttgctactttgggcacccttccctcacatctggaagaaaatatgagacccatttaagtctacttgcattaaacaataaatgctgccaaaaataaaaaaatccataaaattccatttaatctc

SEQ ID NO: 35905 - DNA, 624 bp, Bovine  19866881403041
  misc_feature (1)..(1): n is a, c, g, or t
ngggatccgacccctgcttcagttcccctaaccccaggtgcaggtccggtcctgctcatcctcctctttcccccttccttcctttgtcctgctgagttttggatctatatattcctttccagtgatcagggactcctgtctgctctcagctggtgttctgcgagatcttctgcatctgaaggtgtattcctgatgtatccacggagagagatgtactgcacatctggctactccttcgctatcttgtcttcctctgcagtcactcttttcttttattttctaggttgttttttttttcttgctgtgaactgcaattgttatgtctgactcagtaattcttcgcagtgtgaagaaatttggagaggacaatcatggttttgagtcagacagctcatgtaagtggccttttatcttattgtctcttgtacaaaaaacaaaacaaaagtggaacaaactagtgaagatattcaaggagcagagaaaattcagcaacaataagtagaactattacctcatattcttcttgcacaacctgggtatttctcccaagaatccatgtaatgtaactgctgagagtgctaggtaagaacgtataaatcccaggagagtgaaagcatctcacta

SEQ ID NO: 35906 - DNA, 3550 bp, Bovine  19866881409273
  misc_feature (1)..(1): n is a, c, g, or t
ntccatatgggtccttggtgccagcaattgagtcagggcgttgactttggtagcttgggttgttggcttctctgtgtgttttccaatttatctcacagcatttattggacattgtatttccaatttatctccctgcttagtaggggtacaaatctctcagcaagaagtgcctaggtctgtcagggtccctctagcacccagggactgtgagcttattgattcatcaaggccaagaacggagtaagagaaagcagatcttcagcccctaaagctcaatgcatgaggtagggtgcaattctgagcgtatgtcctctgaacaggtcatggagtgttttcttcagccaaaatcaacactagccaatttgccagtaaaaatttagaaagcaaggaccaaagtcacacacacacacacacacacacacacacacacaagagacattaaatcagggtttaggagctgaggccttggaatcaggcagatcaagtttcaggttcagttcctctaccatcagagggcctttgggtcaattgtcatattatcttcatttccatttttctgtctgtaaaatagagataacttctaccttgaagagtgttgttatttagtcactaagtcgtatccaactccttgtgactgtatggactatagcccgccaggctcttctgtccatgggattctccaggcaagaatactgaagtgggttgccatttcctcctccaggggatcttccagacctaagaactgaactcctgtctcctgcatatcctgcactggcagagagattctttaccactgagccaccggggaagcccaccttgaagagtacctggtgaaataaaatgactagaggcctgacacacaggaagacccttgtcatgtggcaggactggccgctgtatgcattgctcatgtcttagcatggggttctcaggctcagtatttttgcagttttggtcagataattctttattgtggggggtctctgctgtgtattacaggatgtttagcaccaccctggcctctgccacttagatgccagtagtcttccccagttgtgacaaccaaaaatgtctccagacattgccagatattcccctaggaataaaattcttcccagtagagaactgctggtctagtgtttccttgtcttggaggtccagaatggtacagcattcaaaactgctgaaaactactgaaaacccagactggaaattcagtctttgtttccttagtagtgacatattgacgaaagtttatattttttatggtcttaccagaaaatttttattatttataaatactggatggcatcatcagctcaatggacatgaggctgagcaaactcctggagacagtgaaggacagtgaagcctggagtgctacagtccatctggtcgcgaagagatagacatgacttagcgactgaacaacaataaattcatagcctgctgcagtaagcattaacgtctatgattttataaagtttcctaggaactcgtgtatttgagtccacgtgatacaactggaaattttatgcatcgcaccacagggatctcacatgctgcaactaagagccgaggcagccaaataaataaaataaatgaatatacatattttgaaaattgcctttttgtcatcaggaggataggaaggcagtgagcaaagccaaatttatgtatgctaccatttgtgaatttagaaattaccaaatgagcactcacagcatttatgaggcctaaatgctagctgagcctttttgaggtttggaccactatgaactctcttggggtgcccttcagatgagtaccactgactacagaattcaaagaatgctctgagaaagccatggtccttgggattcccagttgatcaagtcaggtaggaatgatagtaactctatgatctattgagtggctcagctggtaacgaatctgcctgcagtgcgggagacctgggttcgatccctggattgggaagatccctggagaagggaaaggcaacctacttcctgtatttggcctggagaattcccatgactatatagtccatggggtcgcaaagagtcagatacgactgagtgactttcacttcacttcaccatagtctaggacctctgctaagatctagaaatatttatctctttcaaaccttacagtaaaattatctctattttatggatgaggaaacaaattcagaaatgcatgttaatgggcgcaagatagaactgtgttgtttcaggccactcaatcccagcatccatcctttaattgtctgctccactgttaaggggactcccactcaactctgggagtctggactgtgtgtacacttctctacaccaccatgcctaatgatacttgattttaagtaaatacatgtagaaggaaagaagaaagaaagagaagaaagtttccactcgaacaccaggcatctagcaataactggattggtttttgagccctttgattcatcagggcatcttcctctcctcctccttgtcatcagatagtcacacttccaatttagataactttgaacattattgaaaaatattcctataaaatttatctcatcaaattatcaaaatacttctgtgagctaagtagggttggtgtcagacataagatcatttgccagagagtggctagaactaaaaatttcatctctgagctcctaagctgtgttaaaaaaaaaaaaaaaaaagacagagagagaaagaaaagtagaactagaaagagatgaacacattatcaatcaataggaaaattaaaatatattatcaaaattctccatgacaccacaaagactcaaaaggaatcaaaaaaggagaactaggtttctctttgatctgtatttgaagggctgaagagtaactgcttgtctgcggctattggaaaatattacaactcaattgctgtccttgtctacttctgcttcttttaattttctcttcctggttaaaatatctaaaataagatcctttgatttcacttctcttattcatcttcctccgccctttaaaaataaacgagagattctttaaaaaaaataagataaaaaatagtgtctccatctttcagagtcactgtgaggtatactttttataagagaggtagagttctttgtagttacttcctcccaaacaatttggttttatttccacaaaacttcacaaagagaaagcaatactgaatctagtcgatcacactgactgttagggtattcgttgaatctttatttttatttttttcaatttgctgcaagtgtgacctgaggtgaattaacaactaagttttttaataaaatcaaaatacatcaaatagagaacatttatcaaaaagctttctaaaatattttctttctgagtttctcttgcacaagctttcttaaaagttgacagcagtctgactggacatgtatgtcccttgtccatttaaatcttgtaaacctgggacttctctggtagtccagtgcttaggagtctaccttgcagtgcaggagacgtgggttcaattcctggtcatggaactaagatcccacatactgcag

SEQ ID NO: 35907 - DNA, 1303 bp, Bovine  19866881879713
  misc_feature (1)..(1): n is a, c, g, or t
ntcctgacatattttgacattacataactctttaattggggaaatcttccattctttagggctggaacactgagctttcactctctccccaggagtcacagatacaatttttcctcttcatttcatttggacaacagagggaattgggactcagactgagaggaaattaatgccgttaagaatcattgctatattttatcactgagaaaagaaccctaggtttggggttgggggagagtgaagagataatgggattaaaatatagaacagcacaaacaaaagtagagaatcttctataataatgccgaaagtcatactaattcagtactgatgggagaacagaagtgggtgcttctgagactctacacccatctgccaagggtcacgaaaaacgcccgtctgcaagtcctttacaacatacccactcttacctttcttttgatatcagtgaactgggaaaacattaaagaccaataaaacgacagctccaggatataatagtagtgaaggtcaggtgtgagtggctgaggatcaaagagaaaaaggcatgattaataattaataggaaaccaaatctgtttcaaacatctcaagctcagtactggaaagtgacatggtcttacacctccacaaattccagccccattctctctgtcgataagagagctttgaagcattcctctaatccacagcttgatggaattagttttgtttcatctccaaccagaaaagtgacaactggtatgaacatttggctgctgctgctgctaagtcacttcagtcgtgtccgaacatttggcagtggtacccaatttgcgattcatttcaacaatcacatttatggttctctgacatgcatctctacaagattcctttaggcaacttgcaaaaaaattctaacacatacacagaaagaataaatctggacaactcccatgagattctttgagattcctgtactcaattccttgagtacagggaccaggggaggcgaaagaagctggagtactctatgagtcatggaggcacagtttcagattctgtcttaattggagcttttttgtttttagaaaatgttctgtacattgtaaagatttttaaaaagataattcaaaaatatttattacaagatcaggggacaaggaaactgctaagagatacaggttaggcacctaccagggaatctgagatcaagccccagttccacagtttaagaagttataaaacttgggccttggtttacttattggaaaatggaggtaacatctgctttacctgcctcagaggtccaggaatgaggaga

SEQ ID NO: 35908 - DNA, 868 bp, Bovine  19866881915474
  misc_feature (1)..(1): n is a, c, g, or t
nattgcccgagcactccttagaaataactgctggttgacaaccaccacctgtatatctatttttgctctcttccccagttcctttgcaaattctgcaagcagccacttaagtgtgggtgcttcacaggcactaggggtgaaagtgggaggaaagtaaaactgggtgcatggtttcagtaacacggaacaaatgagctcaggagcaattagcacactaaagaaggggtcccggctgtctgcagagtgagctctgctctcaggagctccaacccatgtttaatgagggccccttcaatcacatcttcttttttttaagccatgaaatgtggtaccttgacagtggggcaggcaacacatctcaaatcacccagatgcttcttcccacaaccagcctcattcacccgcagggagaggcagagtagccatttttgttgtatcaatagaaacacccctggccggtgaccagaccaacttaggtgtaacagagcaaacagtcaggtggtgtgaccaacctgattttcaggtccagtttttcctgggctgaggcgtttcctggaatagctccagaaaaagtgggcttgggggcatcatcctacaatggccttgtgagcatcccatagcagccacactgtcccaggacctagacctgggtgggtggtgcagggcaagttacttcatttattcctataggctttggtgtcctgatgcagaaaatgggaggtggcgattgctggctttcccagcatttctcaaattgtggttttcagaacatctgtgccctaaaacagcatctggaagtggtattctaagaagtagggggaggggggtaggaagagtgtgctcaggtaggggggaatttttcactcca

SEQ ID NO: 35909 - DNA, 1950 bp, Bovine  19866880459088
  misc_feature (1)..(1): n is a, c, g, or t
ntcaaaccaaatggatttagcccattacctaagtatactaagcatgaaaatcacttctgcccctcacaagaaatgaacaaagaaaaatccttctagagggtacaaatgttaggtccatagtggttatggaatggtgtcagtatccatcaacagctgaaattaaggttaatgttataaaatgagatttcaccagctcaggctggctcagagagtttgcgctgaaagcatctgtatggggtcggtcattcattactgaatacctcgtgggatcagctgacgagcaaaatatgttctttcacatcttcagttctgcttcccgcaacttagttgtttatcaattaaagtgataaatacaagtgactttggtaacctgagaaacgcattaagtagtagagcaacctccaggaacactgccgtaagaactgcacgcaaagttcaacaactgtgaaggaactattagagaggacacacaaacaagtgaccttgactgacaaacgcactccatcccagcaataaacagtggaggtgctgataactgttcattggcgcagagagtaattacctatctgtcagcgttgctggtgtgtgcgaaatagtataaatgaaacatacataatgtacggcaataatatcgggcatgcagaacctaacacattatcatcattctcaggacccaggcttatgcggctgccaccactgagtaaatgccttctagccatgataatttcattctaatctctgttccatattataattttcatagcaaaaagatattgaggagcaatacgtttcaatcaaggactaaatagaacacaacctgtaactggtattttatacacctatatatattttttctttcaagaaatttagtcaatttatgaagagatgggaataagctggaaatttatgggtgacaaaccctgtcggtagcaatgtcaccatgttggagatgggctgaaaggagcttattgaagaggttggaggctttgtcttctatttctttcaataattctgtcttgttcaacaaaatgctatctcattcaatgtttctattctgttccaaaatacaaggtaaagatgtatttttgaacaaaataaaaggtagcccctattcaatgggagaaaaagaatcatctaggttttgaagacaaattatcttggtttgcatgatttgcttacataacagaaggatgggaaaatctcccccaccatgatgctctattatttgtataaaactgtctgactcttgcatgcttgtttattttgtgcctttaatgcaaatgaaatttgatgatacctctaaatcacatttaagaccatacaaaagaaaccaggaaaatcttaagtaacagcaatgccatcaggataaatcccttgactcaagtatgaagcattagaaaccctcacagttcacagagtgaacgagggatagcagtgcatcccaaactatcgatacataatagaaacagctgttggtcccaccagctccctcatttagaaaaggaagaaaatatatgaatttgggataatgcactggcacacctgattgttttaatttagcctttgaatctttacacagtaagagtacatattttggaaattttacagatgcttgaactaataattaatgtaatagtctgcctttttcaagaagcattttaactgatcatctaacgtcacattttaaagtacatgcatccttttaacttttaaaagatgccatcttcatttaatttttggtttgccagtttctcaaagtgattttctaaaactgatgctgtagttgataaatgaagtctttataggaaactgagcaaaacagagaaacagcacaaatttttcttcagtgcatccttttgtgtgctgcgtttttctaattcccagccaggagagtaaccaataaaaaaaaaaaaaaaaaaaaaacaactaactcatactaagttgttcggg

SEQ ID NO: 35910 - DNA, 2001 bp, Bovine  19866880466398
  misc_feature (1)..(1): n is a, c, g, or t
naggttctgtctcttcattttctaattgttttcttttgttaattgcatattctctcctgcctgacaagcagcacatcatccaaacccccaaacacacagtactcgtaagtagagaattagggttttttttttcacttccccccccccaacattttccctctaacaactgcatcttattatgctgatactgtagcttctaagctaggtattactgagacaaaagactgttaaataattatccataggtggctcagtcagtaaagaatccgcctgtaatgtgagagacctgggttcaatccctgggttgagaagatcccctggaggagggcatggcaacccaccccagtattcttgcctggagaatacccatgaacaggggagcctggtgggccacagtccatggggtcgcaaagagtcagacacgactgagagactaagcacaggccctgattacagtcacttttatcttagctattcaacaagaaagacaaacatgttcacttgcttaagtataggggattttctacagctatatctttatgatgtaaaacaactggaagaaaaggaaaaagaaatagcatctttactgaacaatatgttagtttccacttagcagagttaatagaattacagtttctataccaatttgaaagctgcaaacatattcagaaagtcataatattcatttctgctctattatttgaatcaataaacttcagaagttttgtattaatatttaaaatgaaactttgtgatatatcccaacaatgactctcatttaaaaactaagtattgtttcacttaatattgaatcatcaccctaagacagtaacaacagaaaagacacagattagaaagtcaactattactatgaacgcaagtgacaaacatctcctactttgatcctttgtggtattcaaattttatgtggaagaaacaacaaaagaaagtttggtttatttgactaaactgcaatgatctacaagacctgtttcagaaacacagcatcaacattattatcattgttgctattattattacacaggagtttgacctttatgattgtaaataccaaagatggtaaaatcaacatttgcttggttctaggaatttggtcttggaaatcaagagtttcagctgtcagtttaaataaacattagggagatgcatagacaccagtgatgaagctgttactccaagacttctttctgtgatgttcttaaatttacacaatctgggcaagttttcttcctagtcatgctatagtagacttcagtttatcttgaactcttcctaatgttggtcatttactgctggagattcagttgtatcccacacttggacagactttggataagtatttaaggatatcccaatgatgcgaggtctcctaattattcttttagcatcttagacttcttctctgtagtaagtatcacggttataatcacatacctatgttatttcttgttcattaactgtgttcctgtaacaccataaatcttatgaaagcagaggctatatctgactgtatatttattgcctagaagcatagtgtcagaataaatgtaaaatattcatttcttaaatgagtgaatgaaggaggcaattgcaaatggcaccctcccagttcttcataaattcatgtgacttttacagtagataagtgggaggtgtagagtaagtccatgtttcctcaatttgtctgtctttgaaaatacagattatcagacctttcctatggagatggctgattcagagggtatggggtggaacccgagcactgatattttaaaccagctgccctagggaaaaccaacagagcaaacttgggaaataccatattacaggttcataccaccttagatccataattctagaaagttcctctctgtttagtgatcaaaaggacttctggaattcacaattcttatgtttattaaaagaaatgttaatatgatgacacttctttgttctgcccacttggaatttcctgattta

SEQ ID NO: 35911 - DNA, 1278 bp, Bovine  19866880473139
  misc_feature (1)..(1): n is a, c, g, or t
ntattcataactgtccttgtgtcttggcttttgtgtttgcgaggcaagatagtacccttagttctgatcaaatgctaaatgctatatttgatatggaaagtaatctccataagaaagtctcaaaaatataattgagttcccttggagcacaattatatttttgaaacttctctgaatatttctcccaagcaaatattaatgagtagcataagaatatctttcagccataggcatagattttctttgctttttttaaggatcagtatcgggttacaggaaattgagataagtgaaagagagaaacattcagggagtgagtacatacactcttcactgtagagccatcagacagtagcaaaataaacaccccaaccactgtcttttaatagtcatattcttcagtttatcaccgataatctagcgctcactcactcttactcacaggaagctcacagcctaacccatgactcagtagcctttgttcagagtgctaattctataaacagcaaataaaaaattacatatactggttctctatcatggagtcacatttagaggataataatgggcttgctgtgtgtgtgtgatttggtatatttttaaacacagactatagcacagagccctccttttcaagtgattccaaaatcactgactttagtttggattttttctctgtctactgaagttcttttcttccctcctgcctgcctacctatgagccatcatccacaccctgatcaaatttcattccttcagtgctgcgcttctcagactacatagttaactttattttcagaactacagattttaggtctagtacaatggattgtggtacttgtaatggtgtgtacctccagcacaccgttcttctttatacatcatgagcacttgctcaattctttcgaagactgacaatgagttaatgaatgtagacaattctcagagtctctttcacttgcagttaaattgaagtgaaaacaaatgtctattattattactgctactattattatttaaaaacaaatacttcagaatccaaggctttcattaaatactcttaccaacaactggaaacaatattacaaaacacctgtgtgtgtgtgtcttctgccatctccaaaatatcgatttactttctttcttcctctttttctttttttggccaccgttgtacgactttcaggatcttagttccctgaccaggaattgaacctgtgccctctgtagtgaaaccagaagtcctaaccaaactctctaagcctagaccaccaagaa

SEQ ID NO: 35912 - DNA, 1729 bp, Bovine  19866880514802
  misc_feature (1)..(1): n is a, c, g, or t
nttcactcagactcacatccatcgagtccatgatgccatccagccatctcatcctctgtcatccccttctcctcctgcccccaatccctcccagcatcagagtcttttccaatgagtcaactcttcgcatgaggtggccaaaggactggagtttcagctttagcatcattccttccaaagaaatcccagggctgatctccttcagaatggactggttggatctccttgcagtccaagggactctcaagagtcttctcccaacaccacagttcaaaagcatcaattctttggtgctcagctttagaaattaattagttaatttatttttggccataaagcatgtgggatcttagttccccaaccagggatcaagcccttgttcattgcattggaagtgctgagtcttaaccagtggatggtctgggaactcccctttgacgctctttggagtactttcttgtcatctcaccttttcttgttatgaaatataatacttgggatcttcactctaacatccctcttcaaagaagcttttacccaagcttccgacaggctaggtccccatacaatatgattccacactactaacctctccttcatttgcttgtcacagtttataatgattttttcctggcattatgttttaacacaatcacacgagaggagaaattgtgttgtgtgccttgactcgccatgtaccccagtgcctgacatggtatggttaccacgctgtagacacccagttattaaatgcttaatgactgaatggactccaaggtcactttccaatttcatttcccaccatcctcccatttccctctgctgtttattttcccgttatcttaatgtcagtatgatattccccaaacacataatgtgctttcacatttatctgcctgtgtttatcatctctcttcagtctgaaatgcattttatgctcactgaaattgggctcatagcttaaatgtcttgttctcacatagtcatttcctaggccccccaactaaaaatttgttatttatttctgagtacttctacaacatttaattatatctttggcacccaaccttttcttttcttttttttactttaatcatattgcatgttctttgtcttagtcaatttgggctgctataacaaggcaacgtagaccagggcttaaacaatatacatttatttttcacagcccaggtggcacaatggtaaagaacctacctcccaacaaaggagatgcaagagttgcaggtttgatccttgggaagggaagatcccctggagtaggaaatggcaacccacaccattgtttttgcctggaagatgtcatgaacagaggagcctggtgggctaagtccatggtgtcgcaacatagtcagacatgactgagcagggaaacatgtactccccaaccctcttctagggccaaaattatgcaagtgtcctttgttactcaactgattttttttttcctagcacttagccatcgactttgtgcacagattatatgtactttataaatgttttctaaaattgctgaatttatttttggctgtgctgggtctccattgctgtgtgcgagcattctctagttgtggcttttggggtctactttcaagttgcagtgcgcaggcttttcattgtggtggtttctcttgttgcagaacatggactctagggcatgaggggttcagtagttgcagcacgtgggctcagtagctgtggctccctagct

SEQ ID NO: 35913 - DNA, 1029 bp, Bovine  19866880552669
  misc_feature (1)..(1): n is a, c, g, or t
naactaggataacaagagtgataaaaccacataagcacctattctcttcccttaacttttcagagtctcttcgtgtaagctcctactagagtctagtatgtgtaggctttgaatatgagctattttatagtgactggtaatttaagaagcaaagagtggcaaaagcacttcccaaaaccctgaagaaggaaaagcatcactaagggaccactggtttaggatgggtgaatgatatgatgtgtatttcattcacaggcattaaactgaaatcattaattgcattttcaaaacttgactgtcttccatttttaacagacattgcatgaatttccatacaatgagacaagtgtttaaaaattgcacatttagcacaatcttttaatttttacaagaataagatgttcttgatactaaccccaaacaaacctttggggaaaaaaaaaaaacaatgaaaaagcataagaatcatcatcattcataactttcacacatcacaatttaaaatacactaattactacctggaactttgaatcctttattggcagaaaatttcaaattagtaggggagaaatataatctgggaaacacttttcaaagacaaaaacccaaattatctctgggcacgaggtaaccagctttgaatttttagttattcatcttctacagaaattttagagaaaaccataggaaaacgaaagagattatctcaaggtgcataaggccaaattgtaatctattttagttctcatttatatgtttatcaagattgtgtaatatcttctgtgaatgatgggtgggtgaaaaatttaataaggaaacagattttattgtgaaaagaggactaaaaatggcattacctagaaatgaaatttggcctttatgatttgagtggagagagaaaaacttgtcaaattatcctgagaaattaggtttttttttttttttttccatcatctaaaacttgagacagactgaatgcataaattcccactctgccccaaattcccatgacatccatggtacctata

SEQ ID NO: 35914 - DNA, 1494 bp, Bovine  19866880559106
  misc_feature (1)..(1): n is a, c, g, or t
ngtgcctggtctttgagaaaataaaactttagctgtgtgggagtctagctgaccactcaacatccttggatgacaggatttgactgtttttgcattgcatgatcttttattttaggaaactgtgttttaatggtatgcacaatcacagagccttggagcagacatttgttgttttattcttcccagcctccccctcccctctcctagtaacagatcccaaattttggaggaaccatttcttatcacacggcacagcatggataaaattgacctcatcccccaaattttaaagtggagtctgattggcttaaacctatgagtgaattccctcctctggctaagtaactggttcggtgcagggcacagaacctaagtagaactgtgctgtgcttagtcgtgtctgactcttgagaccccatagactgtagtctgccaggatcctctgtctgtgggattctccaggcaagaatactggagtgggttgcatttccttttctaggggaccttcctgacccaggaattgaacccaggcctcctacattgcaagcagactctttactgactgagctacaagtgaaacccagtagaactagtgaagcaaaagaaatgtttgctgaaacttccaggaatgcaaaacatctctcttccctggaggctaccaaaagaaacctttctttttctagccaatgagtgtgaaaatgtgaggtcttgaactgtgtgggtcattctgagacaattgagggctatcagaggctctgggtagagtctgaggatgaaatcaatacaaaagtcagagaaactgagattaaatcagtcctagaagccacgtagcagcagcagcagcagcagcagactgacattgctgttgttgctgcttagtctctaagtcatgtctgattctttgccacctcatgaactatagccagtcaggctcctctgtccatgggatttcctgggcaagaatactggagcaggttataatttccttctccaggggatctttctgacccagggatcaaacccaagtctcctgagttacaggcaggttctttaactctgagccaccagggaagggccatgttacaagtttccaacactaaccctaagtctcagttccagctcctacttgccttttcgagtatgtgacccaataaatctcctcagcagtttaggtcattttgagctggggtgtctattactggaaacttgaagactcctaacagatgtaagatccgtggctgtatcaaatgtatccctcagtgatccctgaaggaagacagagaggaattaggaagtcatcagcagcaccagagggagagagatgctagcacaccttcctgaaataccacagtttgtgtgcaaaaagtaaaaaataaaaccctttcttaaggaatatcatggcttgcccacattttccaaaccagaaatccataaacataatctagcaaaaaaaatttttttctgatatgccaattcattacagaaaatctcaga

SEQ ID NO: 35915 - DNA, 1391 bp, Bovine  19866880590049
  misc_feature (1)..(1): n is a, c, g, or t
naaaagatacatgcacccccaatgttcatagaaacatttttataattgctgagatgtggaagcaatctaagtgtccatcagggatggatggataaagctgtggtatatacataatggaatattactcagtcataaccaaaaaaatgaaattttaccacttgcagcaacatggatggatttgaaaagtatgatgctaagcgaaataagtcagagaaagacaaatactgtatgatttcatttatgtgtgaaatctaaaaaaatacatcaagctagtgaatataacaaaaaaagaggcagactcacagatatagagaacaaattagtagttaccagtggagagagctgaaagggagaagggaaataagggtaggagattaaggagtacaaactattatgtataaaacaagatacaaagatgtattgtacaacacagggaatatagccaatattttataacttttaaaaagtgagtcatgatattgcacacctgtaacttatatgatgttgtacatcaactagtcttagaaaataaaaaattaaaaataaataaaattacctctttatttctgcactatcaatgactactcttatggatagaagaaaaacaatgaactagtatttgggttctttcctgctgttgctgttgtattaatacatgagagtatgatgacaaatttatgtacactagaccttgagccaccttctgaagaatccacagatccttctgggttcagataccacatattgtgttaactgcatcattggtgacaattctaaataaagtgccactgtttcaataagaaatcacggtgtcctagccctctatagcaaaagctgatagaaccttcttcagaagcaacaagtacattgtaaaagtttgctatatataggtattttattatgcactaaattagatagcattgatactgtaccttataattaggtgcaaatcaaatgctaaagaacaacacatacctttccaacatgatccaattaattctaaatctgctgattatagtctcatgtattaaggacttattcccattgcattaaataaaagcattgttaaagactgtctccccagatagatcaaacatcatttattaagtttcatgcacagctatctaaatggagggtaatgcacttggagtcggtgtcagatttcctactgtttctcagctttctgtgggtgatgtgtctgtctctttgttgtatagtctgaatgtgctttagttttttttgttcctgaccacagcctgcatgctgttcatgtagctcaaatactctctcctgaagtttgggcacagcagctgtctgttaccaattcctgtctcagggtgatcggtcagagagactggagacagagaaggccatgacactcatgtttgggg

SEQ ID NO: 35916 - DNA, 3828 bp, Bovine  19866880596138
  misc_feature (1)..(1): n is a, c, g, or t
nataaaagtaaagagaaagattttgaggtgagggtctcataataactaagtgcggttgacccttgaaaaatgcgggtttgaattgcatggtccacttatacatagatcttttcaacagtaagtattacggcactacatggtccttggttggttgaatccacagatgcagaagtgaagagccaactacaagttgtacaaggattaatccccaccttgttgaagggtcaactgtaatttgaaattgggcagaatttcctcaggggccaccatatgaatccccttgcagaagagaagtaggtggttccttggagcaccctggctcaagagagccaggccaggagctagggaagattaagtctctcttattttgtacatgggcccagagaacacaaataactcagtggtaaagaatccacatgtcaatgcagaggcacaggagatacaggtttgatccctgggttgggaagatcccctggagaaagaaatggcaaccgactccagtattcttgcctggaaaatcccatagaaagaggagcccggtgagctatagtgcatagggtcgcaaaagagtgggacacagcttagcaactaaacaacaataacaacagagaaccctaaaaagccaccacttttccaatgctcccaggtaacaacatcagtttttcaggacttgatgacaatagttatctgtaaaaatcttgagctctcgaagcagacaaggaagataattatcatctgatctttttgtactaaagcatactgaaatgattcattaatctactccccaagttacaggagatgagattcacctctaatgaggtaccaactggacaccttgccatgagacagtaacttaggtgaatatgtttcttattcatatttgcaaagtatctgtgatgggagaaagaactgtgttttggttccttgaaacttaatggctcagatggtaaagaatctgcctccaatgttggagacctgggttcagtccctgggttgggaagagcccctggagaacagaatggcaacccattccagtattcttccctggacaatttcatggacagaggagtctggcgaggctatcgtctttgtgtcacacagagtcgtacacgactgagtgactaacattttcctttaaacaggatgggggataaatgattatctagtcctttttttaacaacctaaagaagtattttatttggatctccatcaacagctataaatattagatataggataatatataataggtgctttggattgcttttgtaaacccacttaactttgctaaatagaaaaaaatattcatatcagatatgcaaattttgtgcaaatattcatatcaaaatctctatacaattcaaacaactcttcaaacaactgttccatcttttaaaaaatttttttcatataagaatagttccagagggtaattactcccctctccaaccccccaagaaagatgggccttcctgtccccagcagtgtttgcgatgtttggggctttaccttttgatgaatgcatgacatgccaagttctatgggtctacagattcatcactctccaaatttatagggatgtatgcagtgtgatttgataaattgttttgttttgcttttcatcactcacacgatattgaaaggacgctccctgtatatcttaggcatcatctatcaaaaataaggctttggggagaacaaataaaatgcagtaaaaacttgttgaactgataactatataatatgaatgtgtcatctctgaatatgaaggaccactatatgaggctcatattttattttttttagcaagtttacatatctggttcccagtggtttaaactgcacttcggttcagacgtttgcaaagcttcccaagtgtctttggggggcagagtgctataaattaaagtgattattaatcttactaaatctatttctttttactggcatttacttaggagatctgtacctccttatgatggattggcttggcaacttacttgacgtactggttggtatatgaaataagaagctggaacctgatatcctgtcttgctgtgtactgtttttaaaggaaaaagactctattaaattggcaactatgtacattgactaaaaaaaaatggtttaaaaagagatttctaggacttcataatttctggacatggcaatttaaatcaaggtggtaataatgattctatttacattttatcacaagagttaagtttcctctaattgataaaacagtctttatccaaggccactaatgactatgagtccaccaaaatacgtttgaattgcagaagaaaattgctttacaggctacaaagcctaaatttcttatcagagacatataaacgtaacagtcaaggactctgttaaacagattccatggttaaaatgtttactcttttttaagcaatcttcacccccttaggcaatcttcaatcttcaatgtaacaggtaatggaaaaggtacatggccaatatacagaactcaaatgaatgaaacagcagtgaaaataaatgaaaacaacaggaaggtttcaaatttgccattcagatagcaaacatttcatagattgaaaatttccagtgctgctgatagccggggtgcaaatgatgatattcatacctttttatcctttgaattcagtgtattttactgatacagaaagatttctaaggcatgctgttgagtgaaagaggttaagtcatagaatagtaactctaatatggtcctatttatataaatgaccccttctgtcatgcatatataaaataaatgcaaaaataaagatctgagaggcttcaaaccaaactcccaatagagcttggggtgatgatggggagagtggggaaggctgcaagatgaaggggctttgcccagagacccctgttatcagttaaactttgtataggaagttatgtcctcctattttttctgtaattactgttttaaagaaaacatgtctttataaaaacatgtggatgaatgacctcattcacaatttttcatagaatgttgaagggctattcccactacattctgaatttgttcccacaatgacaacaacccaacttgcccaaagccacacccaagtgcagaccctaaagaacagtaggaattccaccttccccaatgccctgtaacccaaggcctctccataagcgcagggagccccggtctcagacacacagtcccacacatggaatcaaaagcaaccagcagtagggacaaagcgataaaccaacctcaccctacaccagctttcctattcatgtctgcttaaacatttatatttatcttttaaaaccatacatagataaacaggcttcctagatggctcagtggcaaagaatccgcttgccagtacaagagatccaagagacttgggttcaatccctgggtcaggaagatcccctggagaagggaatggcaatccactccagtattcttgcccaggaaattctatggacagaagagcctggcaggctgtagtccatggggttgcaaagaggcagacacaactgagctactgagcgtgtgcgtgcatgtgcacacacacacacacacacacacacacacacacgtataattgtttcaagtcttctaggttccttaggagataactttagcagatgatctaaataagtacaaaaataagaaaaaggttggtttccactattctcccccagataaaaagactgccaaactaatgaataagatgacatttattacagtcaaaaaaatataacattaaagtcgctaagcgcaaagtaggttaaatgagtcacctcccccactcaattaagagccgaccgca

SEQ ID NO: 35917 - DNA, 1073 bp, Bovine  19866880640892
  misc_feature (1)..(1): n is a, c, g, or t
ntagaaattcaaagcaggttttttagaaatgacgcccgactttctatcctcttctgaacaaggtctcctagatgcaggtgggtaaggacctgcatttagatctttcagttttacacaaacattttcacgggtgaaagtttatagtccacacctttctgaagattaagagacagaatctgaagctctgtttcagtatttctcaaaaatgggaatctgagtccctcttgcttcagaatcaccttgggtaaatattgcaagtgcgtatttccaggatctacttctgactcaaggaattaggtagaatctaagtgattctgatacacatgaaaaatttgcaatcattacatgtattgccctgtacacacatagctggtgtttggtacatttttgtggagtgaatcaaaataattcaagggaataaaacaaaatcattcaatcaagcaaagtacattcttttttaaattaaatgtccttcaggctttatgttgatttaaccacattaaaactgtgaccaaagacattctaaattgtggatctgtggttgataattgaaagagaaaaaccccttagctggtgccttgaagaatattttcttatcctcttggaggcatgtgtcaagcacatctaaaatagctattctggatcattctacttttttaaattaaaaaatttaattattgacaaaagctatttgctggaattgtgtaaaaaatgtttacagatgccttaggaaggaaatggcagaatgtggaactaattgtgttgattcaagataattatgaaacacaaatgaccattacttacaacaagtccctgatggtcaggggttgactccagggatcaggcttgaatgaaggaaaggaaaagaaaataaaaaagagtggtgatatatgtatgtagttataatacagctagaaactgtgccctatcttcaagttcatagaggtcttttgtgacatttcagtatttgaattatacatgctatatttttattaagtaaagcttttttttctaacttcaaaggagcatagtttttttttgtttgttttttttttaatctttacttcctgtca

SEQ ID NO: 35918 - DNA, 919 bp, Bovine  19866880687810
  misc_feature (1)..(1): n is a, c, g, or t
ntttgaggtcagtttgccttggggcattatcaacactctacaaaaatatcgaaattgaaaaaaaaatctttttagcttttttttaatgacagtgaaccatcaaatctcatgagtaatgttgaaaaaagctggattctgcatagattgctctttacccaagatgcacttctgtctgcaagattctgaatagagacacacctgctagctagctgataacactctggggtcatttcattgaagaaactgtcagccaggaggtacttaaaataaagccacagacaaaatcatgacctgcactgttaaatccaaaaaggtgtaaaagcagaaaggaaatgtagataaatgcacattcctttgtaccataacaaaacttttacatgtaaattcaactgaataggaaagaatggggaagaatgtttctctctacagtagaaacaaattagattgttcagctgcacatttggctcccagccaaaggagtcgtgtgccatgcttgtttgcctaccagtgctgcttagattggcaaatgcccacgcagtttgaagagggcaggcggatgactgactggatgcctgccaggaagtgtgtgggaccaacgccactgctggactccacagcctggtaggaatgaggagtacaaaggcattcaataatctgaatgtccctttgcttcaagagagtggtgccaggcagcatttaatgagagattgctttgttacaaagtcctcaacatcaagtgggctggtgagctcattaacctgactgcagcaaataaaaaaggcacactcagaagactcccatgatagcctactcaatggtgtaagagcccttttgcttcctttatggtgatccattagcaagcagcagtgtaaacaccataaagcaagccaggtttcgatgttcaactaaagtcgtttcc

SEQ ID NO: 35919 - DNA, 937 bp, Bovine  19866880746399
  misc_feature (1)..(1): n is a, c, g, or t
ntcacctcatccctccaggttgtcacagagcaccagctttggattccctgtgtcatacatcaaactcccactggttatctattttacatacagtaatgtaggaggtgggatgcatgcagaaatggtaaaaaggaataagagggagtcaacagtgtctgttaaacagatgatcctatgttacaaaaatgtataaaaatgaaatctggagttttcgatagcctggcctgcagtgcttcagaggacaactctcaggctgctggggctacctggctgcaggcgtaaaaagtgggaaggacctgaggggctgtgaccttcttatacaccctgagacagtcaagtgattatgtggtgacagagtatgaaccttcaacacgtaattcatattccagaggtcttctgtaggactaggctgaagcccaccctttgggagattcttcctgagatcagtctctttccatggttttctcccccactgactggtttttcccattcctttaatgtttcccctggaagttcctgcacaggagttctgcttccaaggactgcgatctaagaagatctacagtctcttataatttattttacttaatttcagagcctaagttctcatatctcttcttttaaacaacacatgtaatgatacactgttttttgctgttgttgctgacaagatttcctaaggacataatgctgaacattcattgttttccttaaattattttttcttcacaattagtttctgttcacttgagatctttcaatgtatatttagccgatgaaccagttttcatgatcactctcatgaatcaggtctttacacaatatgtgcattgatcataagagtaaatgacaccaaggacctgaattcttgaaaagaataattatcatgaggattccaacatcaaggtgattgcttcagtcctattagttcattctt

SEQ ID NO: 35920 - DNA, 1585 bp, Bovine  19866880841608
  misc_feature (1)..(1): n is a, c, g, or t
ntcagcagtccacatcttatttggataagagagtcagtaaagcataatgccttgatattgaagaaaatcacaaataagaactgagaaaaaaaaatacagatcctggagtgtaaagagccttggaaagagtgagaattttatctacaaataaattgcattaaactgatcagtaattttttaaaaaacaacctatgtgacactgcctattaaaaaataagcagttattaaaaatcaatgaatacttggttgctaatcatacacagttttccacatttagcttttactgtttttatttgatactaacctcataattcttcccatttcctcaccttgaaggtgagagaaagaaagggagagagagggaatacatgtgtattcatgatgaattatagataaaaatctctaaagtacatgaagcttgtacttcaataagtcagtgactagtggcttctactgccatgactgaatacagttttgtctttccgcttagattttgatgaatacagacaattggtaacaaaaaattccaactattctctaaaattatgttttacaaactaagccttttatgcattctctgaattttagtgacaaatttaaaataactctgtaaagatatgtagcaaaatcctttcatttagtgaaaagagaaaagtatgaatcaccacctgtgaaaatacacagccttgcctaaaattatatcttttgcaacataagagaattgactctttttttcaattatttgtcaggcagatgctggtgattttatttaattaagctgctatggtaaagcaggtgtcataaaatatgcccaaatccagttgagtcagttttgctctcctggggggttgggaatccagtttatgttgtagatataactttgggatctgatcagaatgagtagtcactcaagttttaccctcattcctgaattggcccaccttattaactaaatcaaggggaaatagagtgaatacaatttaagtcatttatttttagggaaaaagttgtagcacatgtatatttatgtacactaaaaccttaaattatgccttaagactgaaaagcaaaaaaaaattatcctatttctaggattaggttaaaattattcaaaactttgtcataaaacttgtcccaaattgaatttaatttctgtgatgctgtttgagttaccagaaataataagtgagttgtttatctaagaaaggttctcacacatacacataaaaacacagaaatgatgacgtgaagagctgagcatagatgttctgacaaacttttcatgtctaatcatttatcattttctagaagacagtaacataagcattacaggtttgtgggatcaacctaaatttcatggtgtgttcttggaaaggaaggcttattaaagttaatatttgagtattgaatgcatatgacttctcattagcaaggagtctttgaagcaacctttgagtgagaaggaaacagaacagtaccaggaaaagcaccggtgtgtggacctgttttcttgtctaggctctgccactaaaaaatggcaacacaatcctggcctttagcttctcctgcctttctttcactggta

SEQ ID NO: 35921 - DNA, 755 bp, Bovine  19866880974594
  misc_feature (1)..(1): n is a, c, g, or t
ntgtcccagcagttttaggctttgggtgtcagttctggagccctggactctgtgctgtttagttcagcattcaccatccgccgatggtggcagcatccgcccatacttgggggcatgtagtgggagtcacctgtggtgaagtttgggatctttcagttgtagtcttgtgtacaaataggtttttccaaattttcagactaacatcccttattggtcactttttttcccccactgattgctatgcctacattattaagattctgccacctcaaggggcatctcaatttaaaagaagaattatttcggctttcctcatttcttgggcaaaaagaatgccaagaaagagcaatttccctggagtccccatggagaaaaatttctctatggccaagtttataattatatacagaatttcggaacataatctcacgtggcttattgaagatgggagggtcaaggatgaccttgaaatgcttaactgtgggaactgtgtgttgacttcttgtgactactataatctaattgactatagctttataaacatgctacgctaaatattaaaaatagtaagaacaattaaccacatggcaaattgtctttgctggtcatcccaattagcaaggtcctgaaagtaattagtctaggctgaacagaaatcaggcaataagggagtaaaaaatttaatcaaacttggaattctgacctattaaactaaaacagggttaaaacctccagttgtgctactcatcgctttg

SEQ ID NO: 35922 - DNA, 2472 bp, Bovine  19866881065477
  misc_feature (1)..(1): n is a, c, g, or t
naaccctgggagagtctggcatcactgggagtgaaaactgaggatgcaagggagacagccctagtcgggactgtggggggcatagctgtgtgcccacgtagagtactgggcagcagtgggagagcacacatggacctgagacaacacatctgggtacccagcaagtggccgaggacccctgtggatgatggagctatctcggaaggtggagctccaagcgtgcatcatttcagcgcttatagaaatgtaacctcaactggatccaggggcagacgaaatccaccgcattctactttcttctagacagcgctgcactgtgtaaaattagcaagaaatatgctggtctgaccttcagttctagaagatgggaagcccaaagataatcaaatggcttcatcagcagtacagtaaaaacatctcaggattagcctatactatttgacctcactgaatgcagtgtgatgatcaaatgcatctcttcttaaaggtgttgttcagttgctcagtcatgtctgactcttagtggccccaaggactcagcgtgccaggcctccctgtccctccccacctcccaaagtgtgcccaagttcatgtccattgcattggtaatgccatccagccatctcatcctctgacaccctcttctccttcctccctcaatctttcccagcattagggagtttcccataagttggctgttcgcatcagatgaccaaaatactggagcttcagttttagcatcagcccttccaacgagtattcagggttgatttcccttaagattgagtggtttgatctccttgctgtccaagggactttcaggagtcttctccagcaccacagttcaaactcatgcattctttggagctctgccttctttacagtccagctctcataactgtatgtgaccactgggaagatcatagccctgactgaacagacgtttgtcagcagagtaatgtctctgcttttcaacacactgtctaggtttgtcacagctttcctgccaagaagcagttgccttctgatttcatggctgcagtcatcatcctctgattttagatcccaagaagagaaaatctgtcacaacttccaccttttcccctctatttgcctggaagtaatggggcccaatgccatgatcttagtttctttaatatttagttttaagccagctctttaactctcctcctccaccctcatcaaggggcttccctggtggctcaaatggtaaagagtctgcctttaatgcaagagacctgggttcgatccctgggtcaggaagatctcctggagaaggaaatggcaacccactccagtattctttcctggaaaatcccatggacagaggagcctggcaggctatagtccatggggtcgcagagtcagactcgactgagggactaacacttaacttcttcactctccttcttcaccctcctcaagaggttctttagttcctctttgctttctgcaattacagtgttatcatctgcatatctgaggttgttgatgtttctcttaaaggggtcactctcctgcagaatcattgtcctagttgttggactgcttttccttcaaaggagagcatttaatgtgctggttagtaaaccatttgttcatgacaagaactctgcattttgaagcatcaaaacctcctggagttagctgcatatacattttttcaaggcctatatattaaaatacaaagatttgttatcatgaaatttactacacacagagcagtgtcacaataagatcagtttctgtatgtctattatctaattggaaagatgacaagtgtaagataatgctgcctgtgctatgatgacagttatgctttcaagagtttatagttcttaaaatcaagggtgagtcagatcagtaaattaagtgtataaaaatataaagcaatatgaataaaacattttagaaatgaaaggcttttaaaccattcttccctcatttctccacttgctgagtttccttattaataagaattatgttttggctaacagtcaaaggaaccaaaaaagcaattattcatcagtatactgcattattactgcagtgcctaaattttcaagtgtataaacaagaagttcctctgcaatcaggaaaaatcaaaaccaggaattggattttgtaaaaggcaggagacctgggtttgatctttgggttgggaagatcccctgggagaagaccatgggcaaccttctccagtattcttgcctggagaatcccatggacagaggagcctggcaggctacagtccgtggggtcgcaaagagtcggacacgagtgaacgactaagcacagaacattttgttagtaagtttgggcaagcagtgagagtttcttcagtctttaccagtttgatatatttagtaaaggatgtgaaaaggaagttgcctattgtgatgatctttaattttggagatatgatggagtatgaagacctttaggaaacat

SEQ ID NO: 35923 - DNA, 4092 bp, Bovine  19866881100575
  misc_feature (1)..(1): n is a, c, g, or t
naactttatatcaacaggtttctgcttttccaggtcgaagtccttggaattgccaagcacttcagacctaaggctagggaccttggcgcgctgccagggctggtccaccgcccacggcccctgcttcttcgcggcgctcctccccatcagccccgccaatccccaacgcacaggcggacatatagcatctcttcgcactgagctttgggggacctagctaagagggtaagaaaagacatgaataaacaaacgggggccgaaaggcttgacttcaggagcttgatggacttgaagctctccgccaccaagtcgaccctgcgttcccgaagccggcgggggcgcaggatgactaacaactgtaccggcttcaaaccgacctaagagttaccaaacagcgccgagcaggcgaggggagccggtaggcagatgcaagttcaaggtcagcgtgcctcagattggggctggagagcagccaagaatgtgagggcctgaagcgctggggactcgccctgccagtgcgcgctttggacgaggcggaggagggctcagagccccaattccctggcggtttcccaggaggacgttccgctggggtcaccctggtcccggcctgttgcaatccccaaggctcggcttctccgcctcaagggcagcgcagccccaggcggtttccatggctctcaggaaatttgcttttccaagcagttcccaagcaaaagttcgtgacatttttgggcaaactttgctttttaccttcttgaatgtcctcaaatagataaatgaaaacacattcacacaagtacaattctccctttcagaaaacacactcaaatcccagtattctagagttctcctaacttaaatattgataaataataagctgtttatcagggctatagaagtaacaaagaggaactcctggctttgctcttaaatgatggattcgattgtgttccgttctgattttattcaggttcctatttcaaattacaagcaagtattaatgaagatgatcaagaaatttaagtacgacctaaaaaaagaaatcagtttggtctgaaatccaatagccctgtcatttcaatgcggggtggcttgttaagtgtttaagcgtcctttcaaagccgtaggtgtgttccttcctgctgaaacaaaactgtattcatctttgcacaacatgcgctggcgtctgtaaattatgcaacactcggccaagaatgctccctgtccggatatgtgtctgccaaaccgcaccgctgcgccaccagcccagcaccaagggcaccctgctaaggtgtccctggacggcgcccaccccgccgtctggaccgcggggtggcctgaactgccaccacctcgactgggcagagggaacagttccctgcgtttcctgtccccccattgcttcagtaactcacactgatcttctctgaaactgcagagtcaagaggatttcgcttctaccgtttcattcccaggggtcatttgtgggtcaggagtttccctcgagggctgattccacaccccaccccaccctaaaagccttcccagacccccagaaagtgcttcctttgttttttttctctgctctctttccaacttgctagttagatgtggaacccaggccctttcccctcttcgtagcagaataaagttcaagcgcagacatttttggagctcctgcggccagagaagggtaccaagttagcagctgacgtcagccctttgctggcccgaaaccaggcggcgggatttctacttaagtggtgaaaaagagcctaggccgtgactcagagctggcgacgattaaaccaggtaacgagacacagggcagatgtgttttcattgccctgtaagataaatgcagcgttaagtgcctgacaacttcccagaagcaatcagcaaaagtttacgagtgcataaacctcaaagaccattccccgacggttgttataaggcccacatttagagcttctataaattcttcagcagtttccccaagctaagtttccagggactattaagcagccacctcctccggggagacctgggggattttcttgaaccgccaaagaaaggtttggggctcctagtgagtgaaatgaaattgcgccaaagtttgcttcagaagtttgggtggccaaggagggaggagggaggaaggtggaccggaagtggggtccagggaaaagttcatgatatgccgggttagctgacagcagcggagggccggggtctgtcgagggtcggggatctagcggagctttgaccgctttgggtggtggccccagtttggccagtccggttctgcagggcacagctccctgtggcgctcctagctaagtccaagctcccccaactcggcccggacacggcagctccttcgtctgtctagtgcccactgagtgtccggcaggaatccagccggccagcgcaccagagaggcggcctggacggagaaccgagtccgaaaccggaaacgtgtctccactccgcccagagccaagacggtgccagcctcggtcctcccccaagtggccagagttcttgggtcatttagtatcagacacaccgactcacctatatttatagagaacctttgtttacgatcccggtgaaaacaaagctgctaattgaaaaatagtaacaggagcgtgtctttcagcaccttaaagcccgaggttaacagctgcgcgcgccgggggagggaggggccagggaagcgaggagcctggggccgccctgcacgtctaacgtgccttgggggtcccgggcgagacacgtgggccggatcgagccttcaagagctcagggccggggtcccaggctggaaagcttccggcagcccgccagctctttctccccctttgggttccagttaaccccaaggggcgaaggtaaccgacgactgcgtagcatttctgatcccgtgagattcaatttcgagcagttattttggaaagatagagctgggcccctttccctgctttccaggtgaaaacgcagacgtttctctgccgtcctcatccctcctttctgaaataaggcgtccaactgttccgatattaccattcaaaaacaggttctgtggcgaacctcatttgtgaatctattacagagattaatagattatttctcctttttcaactaattctcagtggggaaatttaaccatatggtaaggagagaattagaatttcatcacattagagcaaaatgtaatgaaaagagtccaacacctggggccaactctgaaagccacaattaaaaggtttttaatgaaaccagagaaaccaaaaatttcataggcttcagtaattctgccacataaggaagacttattggagatgttgggaaatattgtttttacttatgctgtaaggatgaaaaccagccgctaaataccatgtgcgcccgggcacggaacccagagtcccatttctcatcaggggagcagcacttgtttccacacttcggcttcctctctctccaagaacaatcgaggcagacccagttgtccctgaatggcttcctagccttggaggcgacgtttccgggtaaataaatatgcactgatgccccacttagtgtgtgagagggtttgactcccgttgaagttgactattctgaagccactggattttaatctggagggaagtttgagcaatcagtttctttctggttaggaaatcgtgggcttcatcatcaccatcactgtagccgtggtttggaggcggctgcgaaagtaaccccctccaccaccacctttacaaaaagtctaatgggctgcactccccccgccccccacgcccgatcggggtaggaaatgggcagggagcatagtggagggggcggaataaggcggtgtgttgagaggggcgggggggggggggagggagcgattgctttgctcttttactagctaagaatcttgggtgaatttagggcaagccagcggagacaccatctccccccccactaaagtcccatatccaaatccagatcagagccatcctatgaacaggagtggagtatcagtctcccccggaagggtcatgtagcaatgagacagcagggcgagagaagggcggg

SEQ ID NO: 35924 - DNA, 1100 bp, Bovine  19866881143401
  misc_feature (1)..(1): n is a, c, g, or t
nccccggcccccgccccccgccccaagacaagcagctttttcggcgcaaggatgcgccccaggcggacaggcaggtccccaggctcgcagcgaagggctcacctggcttccaggtgacttttaaggggaggggcgtggtatagcactgctgggactccagcggtagggcaggatacgcagataaaagcaaacagtgaaaagagtttctgaaaaattcactgccttcttggttacctggacatattcagtggcgctccttagaggttgataatactcatttttgttacatgagtttatcttttcgaatcttggaaaacgttctatttgggggggggggggaattgttggcctaaaaaaagtgaacacttttagggcttgtcttggtgtccacgaattaagaagaaactaactgaaaagggctcaattctgcctttggggttttagctttgagatttaaaacccacagcgccatctcctggccgtgaggagaacgtaacgatggatgacaacaacatacttaaatactgagaatgaagtattcaaatatgagagacactttattttacgcctcaaaaattatttcggtgataaattgattgcgatgataaaagatgagctggaaatttatgatcattaaagattgtcagacacaatcccggaagctaattatttgtgaatagaagtctgtatgctatatttacacacatcatttttatagattcggatatagttattattctagggacttgtgataaaatatgattctttaatttatcatcaatacataatttgatggaagaaattaaatcccagattaatttctaaattaggatttgaaccagttattttatgcaaaagatactgtaactttataaatatctcagtgctctcaggtgttaattgactagtgaaaagcaattgctgaattactatcgggatattttaatcaccaaagcatttcttattaagtatgggtttatttattaaaagcagttgtcttttttttttttactttttctgggttatgcttaacatgtaatatgatagaaaggagactactgtgagatgatgctgtgttaaacaaattctcctcctaggcc

SEQ ID NO: 35925 - DNA, 1164 bp, Bovine  19866881147760
  misc_feature (1)..(1): n is a, c, g, or t
natatatatctttgtcttttaaatatatatattataaatatataatatatattatatataatgtatatgttataaatgtatatatatatatatctttgtctatgaggtagacattagtactaatttaagttcataaattataaaggaagaaataaggttgagaaagtttaagaaacttgtccaagtttgcagagttaacacatgacagagtcaaaatccacatctgaacctctgatcaaacttgcaactacttcattgcccaagtgagtattgtcatagaagctgggagctggcagaattgtcatgtacctggaagccattttaatagtaaaagaaagctaagacaaaaaggcttcccagatggcacaggggtaaagaatcctcctgacaatgcaggagacgtgcgttcaatccctgggttgggaagatcctctggagaaagaaatggcagcccactccactattcgtgcctgggaaatctcatggacagaggaacctggagggctatagtctatggggtggcaaagagttggacacgactgagcatgaaaacacacacacatacacaccaccatattgagtatttggaaggagtgctggaaggctagagtccattcttacttggagagaacttgagactgcatcttggaaattaccacatgactacagatgtaataagtgttattatagattttgaactctatcataatcatcatttaaaataattccatgttcttagttttcacggtagaaaaccaaataaaaataagcaacaaagaagacttctgacaaatatgcccataagaataggaacctgtatatggctttaactaatattaataagatgtgaggatttttttccaggaatgctttgaaaatctgaaaaattttaatgctatttgcaaagaacagttctgtgctgcatttatctccctgtgttctctaagcacctatggatttttgtagttctcttcttaagcacgctcatgatgctggagaatcacatggccaagagaattgagctcagtaattccatgagaagaaagtccaactgaggtaatgtatctgaatttagtacctaaattaaaagtttgagactcagctttccccgaagtaatttcttctctcatcagggaatgtatatgctataaataagacttccag

SEQ ID NO: 35926 - DNA, 719 bp, Bovine  19866881151846
  misc_feature (1)..(1): n is a, c, g, or t
nttggggctatttgagaaaattatgaaaaggtggtctccctccgccccaacttgttttgaattatgctgattatactcttcagtggttctcaatatttttaccaccttaacacaccatagtgacaagacacaccccaccagacacacttggcccctaggcagtgcttctcagctggagaaagaaagtcacttgtccctttgctgaagctggagatgagggagtcccttggctcactgccctgtttctaggttcaaaatcaccagtaaatgaaatcttgcttaaatcttgcttatgcagcaggccacagaggtaaatacctcagtacatccagtgtaaggtccgtatgttccttatacagtcagtagaactacataacattagtggatttttttttccctaacaaatcaactagctatttaattcaatcaattatatttttgtatgttttggtcttgcctgtggttcagatggtaaccaatctgcctaccaatgtaagagacctgggtttgaaccctgggtcgggaagatcctctgtaggaagaaatggcagcccactccagtattcttgcctaggaaatcccaggacacaggagcctggtgggctatagtctgtggggtcgcaaagaatcggacccgactgagtgactaacactttatgtgtttcacaagacttaacgtatataacattggctgggcacttgtaaagatggtattgtag

SEQ ID NO: 35927 - DNA, 1552 bp, Bovine  19866881273606
  misc_feature (1)..(1): n is a, c, g, or t
nccttgcttttgaaagactccccctctcctcctgccttcgtcttatttttattggaataccaaaaatctgatcatgacgatcctccagactgactgggatctgtagtttgtctactagacacttctggtggcctttagttttcctcattcaggctcactccttcccctgggttgctgtctttctctctagggtacctttctagttggagatgtcctcattagtcatgtgatggtcatgaatggtcaataagaagaagaatggtcagtaagaagaagaagagaccagatcaggttattgcatctaatgctgtagaaatactccagaaacttagaggagtcttctgaaaaatctccacggtgcaactctgttctgttcccgttaactttccacctgtgatcattcacctgtgtttagacaccatggcacctgatgcttgaaaattcccccgaagttacagcagtaagagagaaggcagtcatttttttcattgacaatcataaaaagagccaaggttaatgaaatcattttgttcttagcattactaaatttaggactaaaacagccaatttcctaacaatttagcacatttattcttccaggtcaaagagcacatctgaactgtctttaatgcagagttcttaccgcaaggccgagcacgctggcactccacggctccactgactgactgaccacctacaactgtttgactgaggttgccaagcaggcttggcacacacgtcctcaattaacagattggatagttgctaattatctggatgaaggatttggctccctcagctcgccttttcctgcaaacaggaaggaaaagattccaccagagtgttctgaattattggaatttgtcccctgtggcccaccgtgatgtcacactgacattttcttgcaagtagtttttgaggtgaatgtggagtctagaaagttaatttggtgaattaaatacatgacatagtgttgaaaatactataaatctgaatgcttttgttgtgatgaagactttataaatgccgggttggggaaaacgttttcgggatatttattaattctttccctggtgaactactgacaatctgttggtgggctgcccagtttcatgcattgtctgtgacaagttgtttgtctagactggcttcctctgtccccgaacctcatgcctttctgtgtcactgcccaccctcacaccttgtgtgtcagcaacacaaactcatttgacacgagcaccacaaaactgcactgcacaaggggaatttttagtcaaaatacagaatatattgtatatatatagacattatactaaagttatttagaaatcccctttgctttttaaaaaattacttgtttttaattaaggataactgctgctgctgctgctgctgctaagtcgcttcagtcatgttcaactctgtgcgaccccatagatggcagcccaccaggctcctctgtccctgggattctccaggcaagaacactggagtgggttgccatttccttctccggaaggataactgctttacaatattgtgttggtttctg

SEQ ID NO: 35928 - DNA, 889 bp, Bovine  19866881410782
  misc_feature (1)..(1): n is a, c, g, or t
ncaaagactgagggcaggaggagaagggggcaacagaggatgagatggtttgatgacatcaccaaaaatatcagaagttggtatctcattgactgaacctaatgtggtgagccattctggttgcccttgaccctgagtcacaagggtgctgtgactctggagtagtctttgaattgtttgtagctgtttctccacttgtaaaaagaaagaactggtctcactgagctgaaacatctcttcctgctctaaaacgatctactctgaacttcatcaaaaaagcttgtatcacatttcctagagtatacacacacacacgcacacacacacacacacacacacacacagctcctgacaaaatataggctatgattactctttataattgccctatttttctaacagattgatttgtttttagaaaactgtcaacttttcaaaacccaaagaatgatatactcctacaataggtgaaggttatcagaaagaaacttgccaaaaattagacaaaacccctcctgttggaaaaggctatgttccaagcgtgaatcagggtcaattcctcaataataattgacaattatatctgccctttagtttgattcatttcacaggattattattgctaacacatttcataatttgactctaacatctcccatggctctgctaatctcaaacatatacttcttcaaaggattgcacctttataagcccccaaacgcttccttagtggcccttcttaactgagtgaaagaatgtttactttttaaaaacacctaaacttcatcatctccatacttggttgattttcttcaaacacaggaagacatcattatttaaactcctgcttaaacattagtttcagagataagctccactgggcaatatt

SEQ ID NO: 35929 - DNA, 2628 bp, Bovine  19866880285167
  misc_feature (1)..(1): n is a, c, g, or t
ngaaacagtgtcagactttatttttttggggttccaaaatcctgcagatggtgattgcaaccatgaaattaaaagacgcttactccttggaaggaaagttatgaccaccctaaatggcatattcaaaagcagagacattactttgccaacaaaagtctgtctagtcaaggctatggtttttccagtagtcatgtatggatgtgagagttggactgtgaagaaagctgagtgctgaagaattgatgcttttgaactgtgatgttggagaagactcttgagaatcccttggactgcaaggacatccaaccagtccattctgaaggagattagttctgggtgttctttggaaggactgatgctaaagctgaaactccagtactttggccacctcatgcgaagagttgactcattggaaaagactctaatgctgggagggattgggggcaggaggagaaggggacaacagaggatgagatggctggatggcatcattgactcgatggacatgagtctgagtgaactccgggagttggtgatggacagggaggcctggcgtgctgcgattcatggagtcgcaaagagtcggacacaactgagcgactgaactgaactgaactccaggggatattccggatctagggatacaacctgtgtctcctgcattgcaggcagatgctttatcactgcaccacctgggaagctattggattgcatatgagcttttaaatctttgctgttgattcttaacctagagctgttgtatgttataatgacaggcaaataaagcatcagtttggatgttcaaaaatcactaatacactgtaagtttaaggcaatatctattgaattaggcttggctgtacccctgtacaaaaaagactcagctgtctggccaaggaaaattccatctacattgtggcaaatatcggggacaagaatctgtgtaatgccagtgaccctcagtgtccccctgatggtcattaccaatacaacactgatgtggtgtttaattctgagggcaggcttatggctcactatcataaggggtgagaattacttgtgccttagctgatcttgacttatttttgtttgtgatatctatgtagacttgtttgttgaatgttggtaaggggaccgttataaacacattccttaattattacatttagttgaaaaggggacttaacttactttgacttttatataagggttctgaatttgaattagtcataaaatagaatctggcagaatattaaagcagatgtgctaatagcctcacaggattttaatattctctgagaaaggagaaattctgtttcatcacatgatttaatactagagtaagtttttggacccagtttgttagtttttggacccaatttgttagtgtttggtattaagctttagtcattcattccattaagatctttttttgtttgaagtgatagaaaaacccccaactgaaattgatttgaaacagtaacaacaaaagcaatggaatgcccttgctcaggtacctgagaaaatataaatcatagaaaggataggtctagtttctgacatggtctgtatcttaaggcctggaagatgtcagccatccccacagctctctctctctctctttcttttttacagtgtgtttttttatcctctcaggccatgccaaagtgcatgcaggatcttagttctctgactagggatcgaacctatgtcccttgcattgggagtgtggaccacgggatcaccaggagaagtcaccctctagttcttagatccttgtaaaaagttccaactttttctcagctgactatcctttcagacgccacatggctgctggttacaaagcgcatatcctaatgggacaaaatccagaggaagactgaatttctctttcctagaaaccccacaaaaaccttattattccttcagtccacctagcaaccacatgcctcgcttgagtcgatctcctgggaatgaaggatgggctgccacctgagcagaggacagaagagtttgggaacctcagtggtgggggtgggatggggtgtggcctgagcatatatgcacacatcaggccaaataaaaacctgagcagaacataaggctgcactcttgagtccagggtagatggagtttgggagcgaaaatcaagctggagaaaattttctaatgacttactaattaacaaggtttacttccctttcacttttcactttcatgcataggagaaggaaatggcaacccactccagtgttcttgcctggagaatcccagggacgggggagcctgatgggctgccgtctatggggtcgcacagagctggacacgactgaagcgacttagcagcagcagcagcagcagctattacattgtctaagttccagtttactttacctcacttatataaacctagccataccatgggaagacatgacaaagtttagtttattaacacatgttaaacttcacaagctcaacattcagaaaatgaagatcatgtcatctggtcccatcacttgatggaaaatagatagggaaacagtagaaacagtgtcagactttatttttttgggctccaaaatcactgcagatggtgattgcagccttaaattaaaagacgctactcct
